United States Patent Application Publication US 2024/0084334 A1 - sequence listing, part 3

SEQ ID NO: 1316 - protein, 2086 aa, synthetic construct
MPAAKRVKLDGGDKKYSIGLDIGTNSVGWAVITDEYKVPSKKFKVLGNTDRHSIKKNLIGALLFDSGETAEATRLKRTARRRYTRRKNRICYLQEIFSNEMAKVDDSFFHRLEESFLVEEDKKHERHPIFGNIVDEVAYHEKYPTIYHLRKKLVDSTDKADLRLIYLALAHMIKFRGHFLIEGDLNPDNSDVDKLFIQLVQTYNQLFEENPINASGVDAKAILSARLSKSRRLENLIAQLPGEKKNGLFGNLIALSLGLTPNFKSNFDLAEDAKLQLSKDTYDDDLDNLLAQIGDQYADLFLAAKNLSDAILLSDILRVNTEITKAPLSASMIKRYDEHHQDLTLLKALVRQQLPEKYKEIFFDQSKNGYAGYIDGGASQEEFYKFIKPILEKMDGTEELLVKLNREDLLRKQRTFDNGSIPHQIHLGELHAILRRQEDFYPFLKDNREKIEKILTFRIPYYVGPLARGNSRFAWMTRKSEETITPWNFEEVVDKGASAQSFIERMTNFDKNLPNEKVLPKHSLLYEYFTVYNELTKVKYVTEGMRKPAFLSGEQKKAIVDLLFKTNRKVTVKQLKEDYFKKIECFDSVEISGVEDRFNASLGTYHDLLKIIKDKDFLDNEENEDILEDIVLTLTLFEDREMIEERLKTYAHLFDDKVMKQLKRRRYTGWGRLSRKLINGIRDKQSGKTILDFLKSDGFANRNFMQLIHDDSLTFKEDIQKAQVSGQGDSLHEHIANLAGSPAIKKGILQTVKVVDELVKVMGRHKPENIVIEMARENQTTQKGQKNSRERMKRIEEGIKELGSQILKEHPVENTQLQNEKLYLYYLQNGRDMYVDQELDINRLSDYDVDHIVPQSFLKDDSIDNKVLTRSDKARGKSDNVPSEEVVKKMKNYWRQLLNAKLITQRKFDNLTKAERGGLSELDKAGFIKRQLVETRQITKHVAQILDSRMNTKYDENDKLIREVKVITLKSKLVSDFRKDFQFYKVREINNYHHAHDAYLNAVVGTALIKKYPKLESEFVYGDYKVYDVRKMIAKSEQEIGKATAKYFFYSNIMNFFKTEITLANGEIRKRPLIETNGETGEIVWDKGRDFATVRKVLSMPQVNIVKKTEVQTGGFSKESILPKRNSDKLIARKKDWDPKKYGGFDSPTVAYSVLVVAKVEKGKSKKLKSVKELLGITIMERSSFEKNPIDFLEAKGYKEVKKDLIIKLPKYSLFELENGRKRMLASAGELQKGNELALPSKYVNFLYLASHYEKLKGSPEDNEQKQLFVEQHKHYLDEIIEQISEFSKRVILADANLDKVLSAYNKHRDKPIREQAENIIHLFTLTNLGAPAAFKYFDTTIDRKRYTSTKEVLDATLIHQSITGLYETRIDLSQLGGDGGGGGGSGGGGSGGVPWLTQQPLQLTILVPLQEYQEKILSKTALPEDQKQQLKTLFVKYDNLWQHWENQVGHRKIRPHNIATGDYPPRPQKQYPINPKAKPSIQIVIDDLLKQGVLTPQNSTMNTPVYPVPKPDGRWRMVLDYREVNKTIPLTAAQNQHSAGILATIVRQKYKTTLDLANGFWAHPITPESYWLTAFTWQGKQYCWTRLPQGFLNSPALFNADVVDLLKEIPNVQVYVDDIYLSHDDPKEHVQQLEKVFQILLQAGYVVSLKKSEIGQKTVEFLGFNITKEGRGLTDTFKTKLLNITPPKDLKQLQSILGKLNFARNFIPNFAELVQPLYNLIAPAKGKYIEWSEENTKQLNMVIEALNTASNLEERLPEQRLVIKVNTSPSAGYVRYYNETGKKPIMYLNYVFSKAELKFSMLEKLLTTMHKALIKAMDLAMGQEILVYSPIVSMTKIQKTPLPERKALPIRWITWMTYLEDPRIQFHYDKTLPELKHIPDVYTSSQSPVKHPSQYEGVFYTDGSAIKSPDPTKSNNAGMGIVHATYKPEYQVLNQWSIPLGNHTAQMAEIAAVEFACKKALKIPGPVLVITDSFYVAESANKELPYWKSNGFVNNKKKPLKHISKWKSIAECLSMKPDITIQHEKGISLQIPVFILKGNALADKLATQGSYVVNAGKRTADGSEFEKRTADGSEFESPKKKAKVE

SEQ ID NO: 1317 - protein, 2087 aa, synthetic construct
MPAAKRVKLDGGDKKYSIGLDIGTNSVGWAVITDEYKVPSKKFKVLGNTDRHSIKKNLIGALLFDSGETAEATRLKRTARRRYTRRKNRICYLQEIFSNEMAKVDDSFFHRLEESFLVEEDKKHERHPIFGNIVDEVAYHEKYPTIYHLRKKLVDSTDKADLRLIYLALAHMIKFRGHFLIEGDLNPDNSDVDKLFIQLVQTYNQLFEENPINASGVDAKAILSARLSKSRRLENLIAQLPGEKKNGLFGNLIALSLGLTPNFKSNFDLAEDAKLQLSKDTYDDDLDNLLAQIGDQYADLFLAAKNLSDAILLSDILRVNTEITKAPLSASMIKRYDEHHQDLTLLKALVRQQLPEKYKEIFFDQSKNGYAGYIDGGASQEEFYKFIKPILEKMDGTEELLVKLNREDLLRKQRTFDNGSIPHQIHLGELHAILRRQEDFYPFLKDNREKIEKILTFRIPYYVGPLARGNSRFAWMTRKSEETITPWNFEEVVDKGASAQSFIERMTNFDKNLPNEKVLPKHSLLYEYFTVYNELTKVKYVTEGMRKPAFLSGEQKKAIVDLLFKTNRKVTVKQLKEDYFKKIECFDSVEISGVEDRFNASLGTYHDLLKIIKDKDFLDNEENEDILEDIVLTLTLFEDREMIEERLKTYAHLFDDKVMKQLKRRRYTGWGRLSRKLINGIRDKQSGKTILDFLKSDGFANRNFMQLIHDDSLTFKEDIQKAQVSGQGDSLHEHIANLAGSPAIKKGILQTVKVVDELVKVMGRHKPENIVIEMARENQTTQKGQKNSRERMKRIEEGIKELGSQILKEHPVENTQLQNEKLYLYYLQNGRDMYVDQELDINRLSDYDVDHIVPQSFLKDDSIDNKVLTRSDKARGKSDNVPSEEVVKKMKNYWRQLLNAKLITQRKFDNLTKAERGGLSELDKAGFIKRQLVETRQITKHVAQILDSRMNTKYDENDKLIREVKVITLKSKLVSDFRKDFQFYKVREINNYHHAHDAYLNAVVGTALIKKYPKLESEFVYGDYKVYDVRKMIAKSEQEIGKATAKYFFYSNIMNFFKTEITLANGEIRKRPLIETNGETGEIVWDKGRDFATVRKVLSMPQVNIVKKTEVQTGGFSKESILPKRNSDKLIARKKDWDPKKYGGFDSPTVAYSVLVVAKVEKGKSKKLKSVKELLGITIMERSSFEKNPIDFLEAKGYKEVKKDLIIKLPKYSLFELENGRKRMLASAGELQKGNELALPSKYVNFLYLASHYEKLKGSPEDNEQKQLFVEQHKHYLDEIIEQISEFSKRVILADANLDKVLSAYNKHRDKPIREQAENIIHLFTLTNLGAPAAFKYFDTTIDRKRYTSTKEVLDATLIHQSITGLYETRIDLSQLGGDGGPAPGSSEAAAKGGVPWLTQQPLQLTILVPLQEYQEKILSKTALPEDQKQQLKTLFVKYDNLWQHWENQVGHRKIRPHNIATGDYPPRPQKQYPINPKAKPSIQIVIDDLLKQGVLTPQNSTMNTPVYPVPKPDGRWRMVLDYREVNKTIPLTAAQNQHSAGILATIVRQKYKTTLDLANGFWAHPITPESYWLTAFTWQGKQYCWTRLPQGFLNSPALFNADVVDLLKEIPNVQVYVDDIYLSHDDPKEHVQQLEKVFQILLQAGYVVSLKKSEIGQKTVEFLGFNITKEGRGLTDTFKTKLLNITPPKDLKQLQSILGKLNFARNFIPNFAELVQPLYNLIAPAKGKYIEWSEENTKQLNMVIEALNTASNLEERLPEQRLVIKVNTSPSAGYVRYYNETGKKPIMYLNYVFSKAELKFSMLEKLLTTMHKALIKAMDLAMGQEILVYSPIVSMTKIQKTPLPERKALPIRWITWMTYLEDPRIQFHYDKTLPELKHIPDVYTSSQSPVKHPSQYEGVFYTDGSAIKSPDPTKSNNAGMGIVHATYKPEYQVLNQWSIPLGNHTAQMAEIAAVEFACKKALKIPGPVLVITDSFYVAESANKELPYWKSNGFVNNKKKPLKHISKWKSIAECLSMKPDITIQHEKGISLQIPVFILKGNALADKLATQGSYVVNAGKRTADGSEFEKRTADGSEFESPKKKAKVE

SEQ ID NO: 1318 - protein, 2087 aa, synthetic construct
MPAAKRVKLDGGDKKYSIGLDIGTNSVGWAVITDEYKVPSKKFKVLGNTDRHSIKKNLIGALLFDSGETAEATRLKRTARRRYTRRKNRICYLQEIFSNEMAKVDDSFFHRLEESFLVEEDKKHERHPIFGNIVDEVAYHEKYPTIYHLRKKLVDSTDKADLRLIYLALAHMIKFRGHFLIEGDLNPDNSDVDKLFIQLVQTYNQLFEENPINASGVDAKAILSARLSKSRRLENLIAQLPGEKKNGLFGNLIALSLGLTPNFKSNFDLAEDAKLQLSKDTYDDDLDNLLAQIGDQYADLFLAAKNLSDAILLSDILRVNTEITKAPLSASMIKRYDEHHQDLTLLKALVRQQLPEKYKEIFFDQSKNGYAGYIDGGASQEEFYKFIKPILEKMDGTEELLVKLNREDLLRKQRTFDNGSIPHQIHLGELHAILRRQEDFYPFLKDNREKIEKILTFRIPYYVGPLARGNSRFAWMTRKSEETITPWNFEEVVDKGASAQSFIERMTNFDKNLPNEKVLPKHSLLYEYFTVYNELTKVKYVTEGMRKPAFLSGEQKKAIVDLLFKTNRKVTVKQLKEDYFKKIECFDSVEISGVEDRFNASLGTYHDLLKIIKDKDFLDNEENEDILEDIVLTLTLFEDREMIEERLKTYAHLFDDKVMKQLKRRRYTGWGRLSRKLINGIRDKQSGKTILDFLKSDGFANRNFMQLIHDDSLTFKEDIQKAQVSGQGDSLHEHIANLAGSPAIKKGILQTVKVVDELVKVMGRHKPENIVIEMARENQTTQKGQKNSRERMKRIEEGIKELGSQILKEHPVENTQLQNEKLYLYYLQNGRDMYVDQELDINRLSDYDVDHIVPQSFLKDDSIDNKVLTRSDKARGKSDNVPSEEVVKKMKNYWRQLLNAKLITQRKFDNLTKAERGGLSELDKAGFIKRQLVETRQITKHVAQILDSRMNTKYDENDKLIREVKVITLKSKLVSDFRKDFQFYKVREINNYHHAHDAYLNAVVGTALIKKYPKLESEFVYGDYKVYDVRKMIAKSEQEIGKATAKYFFYSNIMNFFKTEITLANGEIRKRPLIETNGETGEIVWDKGRDFATVRKVLSMPQVNIVKKTEVQTGGFSKESILPKRNSDKLIARKKDWDPKKYGGFDSPTVAYSVLVVAKVEKGKSKKLKSVKELLGITIMERSSFEKNPIDFLEAKGYKEVKKDLIIKLPKYSLFELENGRKRMLASAGELQKGNELALPSKYVNFLYLASHYEKLKGSPEDNEQKQLFVEQHKHYLDEIIEQISEFSKRVILADANLDKVLSAYNKHRDKPIREQAENIIHLFTLTNLGAPAAFKYFDTTIDRKRYTSTKEVLDATLIHQSITGLYETRIDLSQLGGDGGPAPAPAPAPAPGGVPWLTQQPLQLTILVPLQEYQEKILSKTALPEDQKQQLKTLFVKYDNLWQHWENQVGHRKIRPHNIATGDYPPRPQKQYPINPKAKPSIQIVIDDLLKQGVLTPQNSTMNTPVYPVPKPDGRWRMVLDYREVNKTIPLTAAQNQHSAGILATIVRQKYKTTLDLANGFWAHPITPESYWLTAFTWQGKQYCWTRLPQGFLNSPALFNADVVDLLKEIPNVQVYVDDIYLSHDDPKEHVQQLEKVFQILLQAGYVVSLKKSEIGQKTVEFLGFNITKEGRGLTDTFKTKLLNITPPKDLKQLQSILGKLNFARNFIPNFAELVQPLYNLIAPAKGKYIEWSEENTKQLNMVIEALNTASNLEERLPEQRLVIKVNTSPSAGYVRYYNETGKKPIMYLNYVFSKAELKFSMLEKLLTTMHKALIKAMDLAMGQEILVYSPIVSMTKIQKTPLPERKALPIRWITWMTYLEDPRIQFHYDKTLPELKHIPDVYTSSQSPVKHPSQYEGVFYTDGSAIKSPDPTKSNNAGMGIVHATYKPEYQVLNQWSIPLGNHTAQMAEIAAVEFACKKALKIPGPVLVITDSFYVAESANKELPYWKSNGFVNNKKKPLKHISKWKSIAECLSMKPDITIQHEKGISLQIPVFILKGNALADKLATQGSYVVNAGKRTADGSEFEKRTADGSEFESPKKKAKVE

SEQ ID NO: 1319 - protein, 2085 aa, synthetic construct
MPAAKRVKLDGGDKKYSIGLDIGTNSVGWAVITDEYKVPSKKFKVLGNTDRHSIKKNLIGALLFDSGETAEATRLKRTARRRYTRRKNRICYLQEIFSNEMAKVDDSFFHRLEESFLVEEDKKHERHPIFGNIVDEVAYHEKYPTIYHLRKKLVDSTDKADLRLIYLALAHMIKFRGHFLIEGDLNPDNSDVDKLFIQLVQTYNQLFEENPINASGVDAKAILSARLSKSRRLENLIAQLPGEKKNGLFGNLIALSLGLTPNFKSNFDLAEDAKLQLSKDTYDDDLDNLLAQIGDQYADLFLAAKNLSDAILLSDILRVNTEITKAPLSASMIKRYDEHHQDLTLLKALVRQQLPEKYKEIFFDQSKNGYAGYIDGGASQEEFYKFIKPILEKMDGTEELLVKLNREDLLRKQRTFDNGSIPHQIHLGELHAILRRQEDFYPFLKDNREKIEKILTFRIPYYVGPLARGNSRFAWMTRKSEETITPWNFEEVVDKGASAQSFIERMTNFDKNLPNEKVLPKHSLLYEYFTVYNELTKVKYVTEGMRKPAFLSGEQKKAIVDLLFKTNRKVTVKQLKEDYFKKIECFDSVEISGVEDRFNASLGTYHDLLKIIKDKDFLDNEENEDILEDIVLTLTLFEDREMIEERLKTYAHLFDDKVMKQLKRRRYTGWGRLSRKLINGIRDKQSGKTILDFLKSDGFANRNFMQLIHDDSLTFKEDIQKAQVSGQGDSLHEHIANLAGSPAIKKGILQTVKVVDELVKVMGRHKPENIVIEMARENQTTQKGQKNSRERMKRIEEGIKELGSQILKEHPVENTQLQNEKLYLYYLQNGRDMYVDQELDINRLSDYDVDHIVPQSFLKDDSIDNKVLTRSDKARGKSDNVPSEEVVKKMKNYWRQLLNAKLITQRKFDNLTKAERGGLSELDKAGFIKRQLVETRQITKHVAQILDSRMNTKYDENDKLIREVKVITLKSKLVSDFRKDFQFYKVREINNYHHAHDAYLNAVVGTALIKKYPKLESEFVYGDYKVYDVRKMIAKSEQEIGKATAKYFFYSNIMNFFKTEITLANGEIRKRPLIETNGETGEIVWDKGRDFATVRKVLSMPQVNIVKKTEVQTGGFSKESILPKRNSDKLIARKKDWDPKKYGGFDSPTVAYSVLVVAKVEKGKSKKLKSVKELLGITIMERSSFEKNPIDFLEAKGYKEVKKDLIIKLPKYSLFELENGRKRMLASAGELQKGNELALPSKYVNFLYLASHYEKLKGSPEDNEQKQLFVEQHKHYLDEIIEQISEFSKRVILADANLDKVLSAYNKHRDKPIREQAENIIHLFTLTNLGAPAAFKYFDTTIDRKRYTSTKEVLDATLIHQSITGLYETRIDLSQLGGDGGPAPGSSGGGGGVPWLTQQPLQLTILVPLQEYQEKILSKTALPEDQKQQLKTLFVKYDNLWQHWENQVGHRKIRPHNIATGDYPPRPQKQYPINPKAKPSIQIVIDDLLKQGVLTPQNSTMNTPVYPVPKPDGRWRMVLDYREVNKTIPLTAAQNQHSAGILATIVRQKYKTTLDLANGFWAHPITPESYWLTAFTWQGKQYCWTRLPQGFLNSPALFNADVVDLLKEIPNVQVYVDDIYLSHDDPKEHVQQLEKVFQILLQAGYVVSLKKSEIGQKTVEFLGFNITKEGRGLTDTFKTKLLNITPPKDLKQLQSILGKLNFARNFIPNFAELVQPLYNLIAPAKGKYIEWSEENTKQLNMVIEALNTASNLEERLPEQRLVIKVNTSPSAGYVRYYNETGKKPIMYLNYVFSKAELKFSMLEKLLTTMHKALIKAMDLAMGQEILVYSPIVSMTKIQKTPLPERKALPIRWITWMTYLEDPRIQFHYDKTLPELKHIPDVYTSSQSPVKHPSQYEGVFYTDGSAIKSPDPTKSNNAGMGIVHATYKPEYQVLNQWSIPLGNHTAQMAEIAAVEFACKKALKIPGPVLVITDSFYVAESANKELPYWKSNGFVNNKKKPLKHISKWKSIAECLSMKPDITIQHEKGISLQIPVFILKGNALADKLATQGSYVVNAGKRTADGSEFEKRTADGSEFESPKKKAKVE

SEQ ID NO: 1320 - protein, 2176 aa, synthetic construct
MPAAKRVKLDGGDKKYSIGLDIGTNSVGWAVITDEYKVPSKKFKVLGNTDRHSIKKNLIGALLFDSGETAEATRLKRTARRRYTRRKNRICYLQEIFSNEMAKVDDSFFHRLEESFLVEEDKKHERHPIFGNIVDEVAYHEKYPTIYHLRKKLVDSTDKADLRLIYLALAHMIKFRGHFLIEGDLNPDNSDVDKLFIQLVQTYNQLFEENPINASGVDAKAILSARLSKSRRLENLIAQLPGEKKNGLFGNLIALSLGLTPNFKSNFDLAEDAKLQLSKDTYDDDLDNLLAQIGDQYADLFLAAKNLSDAILLSDILRVNTEITKAPLSASMIKRYDEHHQDLTLLKALVRQQLPEKYKEIFFDQSKNGYAGYIDGGASQEEFYKFIKPILEKMDGTEELLVKLNREDLLRKQRTFDNGSIPHQIHLGELHAILRRQEDFYPFLKDNREKIEKILTFRIPYYVGPLARGNSRFAWMTRKSEETITPWNFEEVVDKGASAQSFIERMTNFDKNLPNEKVLPKHSLLYEYFTVYNELTKVKYVTEGMRKPAFLSGEQKKAIVDLLFKTNRKVTVKQLKEDYFKKIECFDSVEISGVEDRFNASLGTYHDLLKIIKDKDFLDNEENEDILEDIVLTLTLFEDREMIEERLKTYAHLFDDKVMKQLKRRRYTGWGRLSRKLINGIRDKQSGKTILDFLKSDGFANRNFMQLIHDDSLTFKEDIQKAQVSGQGDSLHEHIANLAGSPAIKKGILQTVKVVDELVKVMGRHKPENIVIEMARENQTTQKGQKNSRERMKRIEEGIKELGSQILKEHPVENTQLQNEKLYLYYLQNGRDMYVDQELDINRLSDYDVDHIVPQSFLKDDSIDNKVLTRSDKARGKSDNVPSEEVVKKMKNYWRQLLNAKLITQRKFDNLTKAERGGLSELDKAGFIKRQLVETRQITKHVAQILDSRMNTKYDENDKLIREVKVITLKSKLVSDFRKDFQFYKVREINNYHHAHDAYLNAVVGTALIKKYPKLESEFVYGDYKVYDVRKMIAKSEQEIGKATAKYFFYSNIMNFFKTEITLANGEIRKRPLIETNGETGEIVWDKGRDFATVRKVLSMPQVNIVKKTEVQTGGFSKESILPKRNSDKLIARKKDWDPKKYGGFDSPTVAYSVLVVAKVEKGKSKKLKSVKELLGITIMERSSFEKNPIDFLEAKGYKEVKKDLIIKLPKYSLFELENGRKRMLASAGELQKGNELALPSKYVNFLYLASHYEKLKGSPEDNEQKQLFVEQHKHYLDEIIEQISEFSKRVILADANLDKVLSAYNKHRDKPIREQAENIIHLFTLTNLGAPAAFKYFDTTIDRKRYTSTKEVLDATLIHQSITGLYETRIDLSQLGGDGGEAAAKPAPGSSGGMNPLQLLQPLPAEIKGTKLLAHWNSGATITCIPESFLEDEQPIKKTLIKTIHGEKQQNVYYVTFKVKGRKVEAEVIASPYEYILLSPTDVPWLTQQPLQLTILVPLQEYQEKILSKTALPEDQKQQLKTLFVKYDNLWQHWENQVGHRKIRPHNIATGDYPPRPQKQYPINPKAKPSIQIVIDDLLKQGVLTPQNSTMNTPVYPVPKPDGRWRMVLDYREVNKTIPLTAAQNQHSAGILATIVRQKYKTTLDLANGFWAHPITPESYWLTAFTWQGKQYCWTRLPQGFLNSPALFNADVVDLLKEIPNVQVYVDDIYLSHDDPKEHVQQLEKVFQILLQAGYVVSLKKSEIGQKTVEFLGFNITKEGRGLTDTFKTKLLNITPPKDLKQLQSILGLLNFARNFIPNFAELVQPLYNLIAPAKGKYIEWSEENTKQLNMVIEALNTASNLEERLPEQRLVIKVNTSPSAGYVRYYNETGKKPIMYLNYVFSKAELKFSMLEKLLTTMHKALIKAMDLAMGQEILVYSPIVSMTKIQKTPLPERKALPIRWITWMTYLEDPRIQFHYDKTLPELKHIPDVYTSSQSPVKHPSQYEGVFYTDGSAIKSPDPTKSNNAGMGIVHATYKPEYQVLNQWSIPLGNHTAQMAEIAAVEFACKKALKIPGPVLVITDSFYVAESANKELPYWKSNGFVNNKKKPLKHISKWKSIAECLSMKPDITIQHEKGISLQIPVFILKGNALADKLATQGSYVVNAGKRTADGSEFEKRTADGSEFESPKKKAKVE

SEQ ID NO: 1321 - protein, 2178 aa, synthetic construct
MPAAKRVKLDGGDKKYSIGLDIGTNSVGWAVITDEYKVPSKKFKVLGNTDRHSIKKNLIGALLFDSGETAEATRLKRTARRRYTRRKNRICYLQEIFSNEMAKVDDSFFHRLEESFLVEEDKKHERHPIFGNIVDEVAYHEKYPTIYHLRKKLVDSTDKADLRLIYLALAHMIKFRGHFLIEGDLNPDNSDVDKLFIQLVQTYNQLFEENPINASGVDAKAILSARLSKSRRLENLIAQLPGEKKNGLFGNLIALSLGLTPNFKSNFDLAEDAKLQLSKDTYDDDLDNLLAQIGDQYADLFLAAKNLSDAILLSDILRVNTEITKAPLSASMIKRYDEHHQDLTLLKALVRQQLPEKYKEIFFDQSKNGYAGYIDGGASQEEFYKFIKPILEKMDGTEELLVKLNREDLLRKQRTFDNGSIPHQIHLGELHAILRRQEDFYPFLKDNREKIEKILTFRIPYYVGPLARGNSRFAWMTRKSEETITPWNFEEVVDKGASAQSFIERMTNFDKNLPNEKVLPKHSLLYEYFTVYNELTKVKYVTEGMRKPAFLSGEQKKAIVDLLFKTNRKVTVKQLKEDYFKKIECFDSVEISGVEDRFNASLGTYHDLLKIIKDKDFLDNEENEDILEDIVLTLTLFEDREMIEERLKTYAHLFDDKVMKQLKRRRYTGWGRLSRKLINGIRDKQSGKTILDFLKSDGFANRNFMQLIHDDSLTFKEDIQKAQVSGQGDSLHEHIANLAGSPAIKKGILQTVKVVDELVKVMGRHKPENIVIEMARENQTTQKGQKNSRERMKRIEEGIKELGSQILKEHPVENTQLQNEKLYLYYLQNGRDMYVDQELDINRLSDYDVDHIVPQSFLKDDSIDNKVLTRSDKARGKSDNVPSEEVVKKMKNYWRQLLNAKLITQRKFDNLTKAERGGLSELDKAGFIKRQLVETRQITKHVAQILDSRMNTKYDENDKLIREVKVITLKSKLVSDFRKDFQFYKVREINNYHHAHDAYLNAVVGTALIKKYPKLESEFVYGDYKVYDVRKMIAKSEQEIGKATAKYFFYSNIMNFFKTEITLANGEIRKRPLIETNGETGEIVWDKGRDFATVRKVLSMPQVNIVKKTEVQTGGFSKESILPKRNSDKLIARKKDWDPKKYGGFDSPTVAYSVLVVAKVEKGKSKKLKSVKELLGITIMERSSFEKNPIDFLEAKGYKEVKKDLIIKLPKYSLFELENGRKRMLASAGELQKGNELALPSKYVNFLYLASHYEKLKGSPEDNEQKQLFVEQHKHYLDEIIEQISEFSKRVILADANLDKVLSAYNKHRDKPIREQAENIIHLFTLTNLGAPAAFKYFDTTIDRKRYTSTKEVLDATLIHQSITGLYETRIDLSQLGGDGGPAPAPAPAPAPAPGGMNPLQLLQPLPAEIKGTKLLAHWNSGATITCIPESFLEDEQPIKKTLIKTIHGEKQQNVYYVTFKVKGRKVEAEVIASPYEYILLSPTDVPWLTQQPLQLTILVPLQEYQEKILSKTALPEDQKQQLKTLFVKYDNLWQHWENQVGHRKIRPHNIATGDYPPRPQKQYPINPKAKPSIQIVIDDLLKQGVLTPQNSTMNTPVYPVPKPDGRWRMVLDYREVNKTIPLTAAQNQHSAGILATIVRQKYKTTLDLANGFWAHPITPESYWLTAFTWQGKQYCWTRLPQGFLNSPALFNADVVDLLKEIPNVQVYVDDIYLSHDDPKEHVQQLEKVFQILLQAGYVVSLKKSEIGQKTVEFLGFNITKEGRGLTDTFKTKLLNITPPKDLKQLQSILGLLNFARNFIPNFAELVQPLYNLIAPAKGKYIEWSEENTKQLNMVIEALNTASNLEERLPEQRLVIKVNTSPSAGYVRYYNETGKKPIMYLNYVFSKAELKFSMLEKLLTTMHKALIKAMDLAMGQEILVYSPIVSMTKIQKTPLPERKALPIRWITWMTYLEDPRIQFHYDKTLPELKHIPDVYTSSQSPVKHPSQYEGVFYTDGSAIKSPDPTKSNNAGMGIVHATYKPEYQVLNQWSIPLGNHTAQMAEIAAVEFACKKALKIPGPVLVITDSFYVAESANKELPYWKSNGFVNNKKKPLKHISKWKSIAECLSMKPDITIQHEKGISLQIPVFILKGNALADKLATQGSYVVNAGKRTADGSEFEKRTADGSEFESPKKKAKVE

SEQ ID NO: 1322 - protein, 2174 aa, synthetic construct
MPAAKRVKLDGGDKKYSIGLDIGTNSVGWAVITDEYKVPSKKFKVLGNTDRHSIKKNLIGALLFDSGETAEATRLKRTARRRYTRRKNRICYLQEIFSNEMAKVDDSFFHRLEESFLVEEDKKHERHPIFGNIVDEVAYHEKYPTIYHLRKKLVDSTDKADLRLIYLALAHMIKFRGHFLIEGDLNPDNSDVDKLFIQLVQTYNQLFEENPINASGVDAKAILSARLSKSRRLENLIAQLPGEKKNGLFGNLIALSLGLTPNFKSNFDLAEDAKLQLSKDTYDDDLDNLLAQIGDQYADLFLAAKNLSDAILLSDILRVNTEITKAPLSASMIKRYDEHHQDLTLLKALVRQQLPEKYKEIFFDQSKNGYAGYIDGGASQEEFYKFIKPILEKMDGTEELLVKLNREDLLRKQRTFDNGSIPHQIHLGELHAILRRQEDFYPFLKDNREKIEKILTFRIPYYVGPLARGNSRFAWMTRKSEETITPWNFEEVVDKGASAQSFIERMTNFDKNLPNEKVLPKHSLLYEYFTVYNELTKVKYVTEGMRKPAFLSGEQKKAIVDLLFKTNRKVTVKQLKEDYFKKIECFDSVEISGVEDRFNASLGTYHDLLKIIKDKDFLDNEENEDILEDIVLTLTLFEDREMIEERLKTYAHLFDDKVMKQLKRRRYTGWGRLSRKLINGIRDKQSGKTILDFLKSDGFANRNFMQLIHDDSLTFKEDIQKAQVSGQGDSLHEHIANLAGSPAIKKGILQTVKVVDELVKVMGRHKPENIVIEMARENQTTQKGQKNSRERMKRIEEGIKELGSQILKEHPVENTQLQNEKLYLYYLQNGRDMYVDQELDINRLSDYDVDHIVPQSFLKDDSIDNKVLTRSDKARGKSDNVPSEEVVKKMKNYWRQLLNAKLITQRKFDNLTKAERGGLSELDKAGFIKRQLVETRQITKHVAQILDSRMNTKYDENDKLIREVKVITLKSKLVSDFRKDFQFYKVREINNYHHAHDAYLNAVVGTALIKKYPKLESEFVYGDYKVYDVRKMIAKSEQEIGKATAKYFFYSNIMNFFKTEITLANGEIRKRPLIETNGETGEIVWDKGRDFATVRKVLSMPQVNIVKKTEVQTGGFSKESILPKRNSDKLIARKKDWDPKKYGGFDSPTVAYSVLVVAKVEKGKSKKLKSVKELLGITIMERSSFEKNPIDFLEAKGYKEVKKDLIIKLPKYSLFELENGRKRMLASAGELQKGNELALPSKYVNFLYLASHYEKLKGSPEDNEQKQLFVEQHKHYLDEIIEQISEFSKRVILADANLDKVLSAYNKHRDKPIREQAENIIHLFTLTNLGAPAAFKYFDTTIDRKRYTSTKEVLDATLIHQSITGLYETRIDLSQLGGDGGGGSGGGPAPGGMNPLQLLQPLPAEIKGTKLLAHWNSGATITCIPESFLEDEQPIKKTLIKTIHGEKQQNVYYVTFKVKGRKVEAEVIASPYEYILLSPTDVPWLTQQPLQLTILVPLQEYQEKILSKTALPEDQKQQLKTLFVKYDNLWQHWENQVGHRKIRPHNIATGDYPPRPQKQYPINPKAKPSIQIVIDDLLKQGVLTPQNSTMNTPVYPVPKPDGRWRMVLDYREVNKTIPLTAAQNQHSAGILATIVRQKYKTTLDLANGFWAHPITPESYWLTAFTWQGKQYCWTRLPQGFLNSPALFNADVVDLLKEIPNVQVYVDDIYLSHDDPKEHVQQLEKVFQILLQAGYVVSLKKSEIGQKTVEFLGFNITKEGRGLTDTFKTKLLNITPPKDLKQLQSILGLLNFARNFIPNFAELVQPLYNLIAPAKGKYIEWSEENTKQLNMVIEALNTASNLEERLPEQRLVIKVNTSPSAGYVRYYNETGKKPIMYLNYVFSKAELKFSMLEKLLTTMHKALIKAMDLAMGQEILVYSPIVSMTKIQKTPLPERKALPIRWITWMTYLEDPRIQFHYDKTLPELKHIPDVYTSSQSPVKHPSQYEGVFYTDGSAIKSPDPTKSNNAGMGIVHATYKPEYQVLNQWSIPLGNHTAQMAEIAAVEFACKKALKIPGPVLVITDSFYVAESANKELPYWKSNGFVNNKKKPLKHISKWKSIAECLSMKPDITIQHEKGISLQIPVFILKGNALADKLATQGSYVVNAGKRTADGSEFEKRTADGSEFESPKKKAKVE

SEQ ID NO: 1323 - protein, 2176 aa, synthetic construct
MPAAKRVKLDGGDKKYSIGLDIGTNSVGWAVITDEYKVPSKKFKVLGNTDRHSIKKNLIGALLFDSGETAEATRLKRTARRRYTRRKNRICYLQEIFSNEMAKVDDSFFHRLEESFLVEEDKKHERHPIFGNIVDEVAYHEKYPTIYHLRKKLVDSTDKADLRLIYLALAHMIKFRGHFLIEGDLNPDNSDVDKLFIQLVQTYNQLFEENPINASGVDAKAILSARLSKSRRLENLIAQLPGEKKNGLFGNLIALSLGLTPNFKSNFDLAEDAKLQLSKDTYDDDLDNLLAQIGDQYADLFLAAKNLSDAILLSDILRVNTEITKAPLSASMIKRYDEHHQDLTLLKALVRQQLPEKYKEIFFDQSKNGYAGYIDGGASQEEFYKFIKPILEKMDGTEELLVKLNREDLLRKQRTFDNGSIPHQIHLGELHAILRRQEDFYPFLKDNREKIEKILTFRIPYYVGPLARGNSRFAWMTRKSEETITPWNFEEVVDKGASAQSFIERMTNFDKNLPNEKVLPKHSLLYEYFTVYNELTKVKYVTEGMRKPAFLSGEQKKAIVDLLFKTNRKVTVKQLKEDYFKKIECFDSVEISGVEDRFNASLGTYHDLLKIIKDKDFLDNEENEDILEDIVLTLTLFEDREMIEERLKTYAHLFDDKVMKQLKRRRYTGWGRLSRKLINGIRDKQSGKTILDFLKSDGFANRNFMQLIHDDSLTFKEDIQKAQVSGQGDSLHEHIANLAGSPAIKKGILQTVKVVDELVKVMGRHKPENIVIEMARENQTTQKGQKNSRERMKRIEEGIKELGSQILKEHPVENTQLQNEKLYLYYLQNGRDMYVDQELDINRLSDYDVDHIVPQSFLKDDSIDNKVLTRSDKARGKSDNVPSEEVVKKMKNYWRQLLNAKLITQRKFDNLTKAERGGLSELDKAGFIKRQLVETRQITKHVAQILDSRMNTKYDENDKLIREVKVITLKSKLVSDFRKDFQFYKVREINNYHHAHDAYLNAVVGTALIKKYPKLESEFVYGDYKVYDVRKMIAKSEQEIGKATAKYFFYSNIMNFFKTEITLANGEIRKRPLIETNGETGEIVWDKGRDFATVRKVLSMPQVNIVKKTEVQTGGFSKESILPKRNSDKLIARKKDWDPKKYGGFDSPTVAYSVLVVAKVEKGKSKKLKSVKELLGITIMERSSFEKNPIDFLEAKGYKEVKKDLIIKLPKYSLFELENGRKRMLASAGELQKGNELALPSKYVNFLYLASHYEKLKGSPEDNEQKQLFVEQHKHYLDEIIEQISEFSKRVILADANLDKVLSAYNKHRDKPIREQAENIIHLFTLTNLGAPAAFKYFDTTIDRKRYTSTKEVLDATLIHQSITGLYETRIDLSQLGGDGGGGSEAAAKGGGGGMNPLQLLQPLPAEIKGTKLLAHWNSGATITCIPESFLEDEQPIKKTLIKTIHGEKQQNVYYVTFKVKGRKVEAEVIASPYEYILLSPTDVPWLTQQPLQLTILVPLQEYQEKILSKTALPEDQKQQLKTLFVKYDNLWQHWENQVGHRKIRPHNIATGDYPPRPQKQYPINPKAKPSIQIVIDDLLKQGVLTPQNSTMNTPVYPVPKPDGRWRMVLDYREVNKTIPLTAAQNQHSAGILATIVRQKYKTTLDLANGFWAHPITPESYWLTAFTWQGKQYCWTRLPQGFLNSPALFNADVVDLLKEIPNVQVYVDDIYLSHDDPKEHVQQLEKVFQILLQAGYVVSLKKSEIGQKTVEFLGFNITKEGRGLTDTFKTKLLNITPPKDLKQLQSILGLLNFARNFIPNFAELVQPLYNLIAPAKGKYIEWSEENTKQLNMVIEALNTASNLEERLPEQRLVIKVNTSPSAGYVRYYNETGKKPIMYLNYVFSKAELKFSMLEKLLTTMHKALIKAMDLAMGQEILVYSPIVSMTKIQKTPLPERKALPIRWITWMTYLEDPRIQFHYDKTLPELKHIPDVYTSSQSPVKHPSQYEGVFYTDGSAIKSPDPTKSNNAGMGIVHATYKPEYQVLNQWSIPLGNHTAQMAEIAAVEFACKKALKIPGPVLVITDSFYVAESANKELPYWKSNGFVNNKKKPLKHISKWKSIAECLSMKPDITIQHEKGISLQIPVFILKGNALADKLATQGSYVVNAGKRTADGSEFEKRTADGSEFESPKKKAKVE

SEQ ID NO: 1324 - protein, 2176 aa, synthetic construct
MPAAKRVKLDGGDKKYSIGLDIGTNSVGWAVITDEYKVPSKKFKVLGNTDRHSIKKNLIGALLFDSGETAEATRLKRTARRRYTRRKNRICYLQEIFSNEMAKVDDSFFHRLEESFLVEEDKKHERHPIFGNIVDEVAYHEKYPTIYHLRKKLVDSTDKADLRLIYLALAHMIKFRGHFLIEGDLNPDNSDVDKLFIQLVQTYNQLFEENPINASGVDAKAILSARLSKSRRLENLIAQLPGEKKNGLFGNLIALSLGLTPNFKSNFDLAEDAKLQLSKDTYDDDLDNLLAQIGDQYADLFLAAKNLSDAILLSDILRVNTEITKAPLSASMIKRYDEHHQDLTLLKALVRQQLPEKYKEIFFDQSKNGYAGYIDGGASQEEFYKFIKPILEKMDGTEELLVKLNREDLLRKQRTFDNGSIPHQIHLGELHAILRRQEDFYPFLKDNREKIEKILTFRIPYYVGPLARGNSRFAWMTRKSEETITPWNFEEVVDKGASAQSFIERMTNFDKNLPNEKVLPKHSLLYEYFTVYNELTKVKYVTEGMRKPAFLSGEQKKAIVDLLFKTNRKVTVKQLKEDYFKKIECFDSVEISGVEDRFNASLGTYHDLLKIIKDKDFLDNEENEDILEDIVLTLTLFEDREMIEERLKTYAHLFDDKVMKQLKRRRYTGWGRLSRKLINGIRDKQSGKTILDFLKSDGFANRNFMQLIHDDSLTFKEDIQKAQVSGQGDSLHEHIANLAGSPAIKKGILQTVKVVDELVKVMGRHKPENIVIEMARENQTTQKGQKNSRERMKRIEEGIKELGSQILKEHPVENTQLQNEKLYLYYLQNGRDMYVDQELDINRLSDYDVDHIVPQSFLKDDSIDNKVLTRSDKARGKSDNVPSEEVVKKMKNYWRQLLNAKLITQRKFDNLTKAERGGLSELDKAGFIKRQLVETRQITKHVAQILDSRMNTKYDENDKLIREVKVITLKSKLVSDFRKDFQFYKVREINNYHHAHDAYLNAVVGTALIKKYPKLESEFVYGDYKVYDVRKMIAKSEQEIGKATAKYFFYSNIMNFFKTEITLANGEIRKRPLIETNGETGEIVWDKGRDFATVRKVLSMPQVNIVKKTEVQTGGFSKESILPKRNSDKLIARKKDWDPKKYGGFDSPTVAYSVLVVAKVEKGKSKKLKSVKELLGITIMERSSFEKNPIDFLEAKGYKEVKKDLIIKLPKYSLFELENGRKRMLASAGELQKGNELALPSKYVNFLYLASHYEKLKGSPEDNEQKQLFVEQHKHYLDEIIEQISEFSKRVILADANLDKVLSAYNKHRDKPIREQAENIIHLFTLTNLGAPAAFKYFDTTIDRKRYTSTKEVLDATLIHQSITGLYETRIDLSQLGGDGGPAPEAAAKGGSGGMNPLQLLQPLPAEIKGTKLLAHWNSGATITCIPESFLEDEQPIKKTLIKTIHGEKQQNVYYVTFKVKGRKVEAEVIASPYEYILLSPTDVPWLTQQPLQLTILVPLQEYQEKILSKTALPEDQKQQLKTLFVKYDNLWQHWENQVGHRKIRPHNIATGDYPPRPQKQYPINPKAKPSIQIVIDDLLKQGVLTPQNSTMNTPVYPVPKPDGRWRMVLDYREVNKTIPLTAAQNQHSAGILATIVRQKYKTTLDLANGFWAHPITPESYWLTAFTWQGKQYCWTRLPQGFLNSPALFNADVVDLLKEIPNVQVYVDDIYLSHDDPKEHVQQLEKVFQILLQAGYVVSLKKSEIGQKTVEFLGFNITKEGRGLTDTFKTKLLNITPPKDLKQLQSILGLLNFARNFIPNFAELVQPLYNLIAPAKGKYIEWSEENTKQLNMVIEALNTASNLEERLPEQRLVIKVNTSPSAGYVRYYNETGKKPIMYLNYVFSKAELKFSMLEKLLTTMHKALIKAMDLAMGQEILVYSPIVSMTKIQKTPLPERKALPIRWITWMTYLEDPRIQFHYDKTLPELKHIPDVYTSSQSPVKHPSQYEGVFYTDGSAIKSPDPTKSNNAGMGIVHATYKPEYQVLNQWSIPLGNHTAQMAEIAAVEFACKKALKIPGPVLVITDSFYVAESANKELPYWKSNGFVNNKKKPLKHISKWKSIAECLSMKPDITIQHEKGISLQIPVFILKGNALADKLATQGSYVVNAGKRTADGSEFEKRTADGSEFESPKKKAKVE

SEQ ID NO: 1325 - protein, 2176 aa, synthetic construct
MPAAKRVKLDGGDKKYSIGLDIGTNSVGWAVITDEYKVPSKKFKVLGNTDRHSIKKNLIGALLFDSGETAEATRLKRTARRRYTRRKNRICYLQEIFSNEMAKVDDSFFHRLEESFLVEEDKKHERHPIFGNIVDEVAYHEKYPTIYHLRKKLVDSTDKADLRLIYLALAHMIKFRGHFLIEGDLNPDNSDVDKLFIQLVQTYNQLFEENPINASGVDAKAILSARLSKSRRLENLIAQLPGEKKNGLFGNLIALSLGLTPNFKSNFDLAEDAKLQLSKDTYDDDLDNLLAQIGDQYADLFLAAKNLSDAILLSDILRVNTEITKAPLSASMIKRYDEHHQDLTLLKALVRQQLPEKYKEIFFDQSKNGYAGYIDGGASQEEFYKFIKPILEKMDGTEELLVKLNREDLLRKQRTFDNGSIPHQIHLGELHAILRRQEDFYPFLKDNREKIEKILTFRIPYYVGPLARGNSRFAWMTRKSEETITPWNFEEVVDKGASAQSFIERMTNFDKNLPNEKVLPKHSLLYEYFTVYNELTKVKYVTEGMRKPAFLSGEQKKAIVDLLFKTNRKVTVKQLKEDYFKKIECFDSVEISGVEDRFNASLGTYHDLLKIIKDKDFLDNEENEDILEDIVLTLTLFEDREMIEERLKTYAHLFDDKVMKQLKRRRYTGWGRLSRKLINGIRDKQSGKTILDFLKSDGFANRNFMQLIHDDSLTFKEDIQKAQVSGQGDSLHEHIANLAGSPAIKKGILQTVKVVDELVKVMGRHKPENIVIEMARENQTTQKGQKNSRERMKRIEEGIKELGSQILKEHPVENTQLQNEKLYLYYLQNGRDMYVDQELDINRLSDYDVDHIVPQSFLKDDSIDNKVLTRSDKARGKSDNVPSEEVVKKMKNYWRQLLNAKLITQRKFDNLTKAERGGLSELDKAGFIKRQLVETRQITKHVAQILDSRMNTKYDENDKLIREVKVITLKSKLVSDFRKDFQFYKVREINNYHHAHDAYLNAVVGTALIKKYPKLESEFVYGDYKVYDVRKMIAKSEQEIGKATAKYFFYSNIMNFFKTEITLANGEIRKRPLIETNGETGEIVWDKGRDFATVRKVLSMPQVNIVKKTEVQTGGFSKESILPKRNSDKLIARKKDWDPKKYGGFDSPTVAYSVLVVAKVEKGKSKKLKSVKELLGITIMERSSFEKNPIDFLEAKGYKEVKKDLIIKLPKYSLFELENGRKRMLASAGELQKGNELALPSKYVNFLYLASHYEKLKGSPEDNEQKQLFVEQHKHYLDEIIEQISEFSKRVILADANLDKVLSAYNKHRDKPIREQAENIIHLFTLTNLGAPAAFKYFDTTIDRKRYTSTKEVLDATLIHQSITGLYETRIDLSQLGGDGGEAAAKGGSPAPGGMNPLQLLQPLPAEIKGTKLLAHWNSGATITCIPESFLEDEQPIKKTLIKTIHGEKQQNVYYVTFKVKGRKVEAEVIASPYEYILLSPTDVPWLTQQPLQLTILVPLQEYQEKILSKTALPEDQKQQLKTLFVKYDNLWQHWENQVGHRKIRPHNIATGDYPPRPQKQYPINPKAKPSIQIVIDDLLKQGVLTPQNSTMNTPVYPVPKPDGRWRMVLDYREVNKTIPLTAAQNQHSAGILATIVRQKYKTTLDLANGFWAHPITPESYWLTAFTWQGKQYCWTRLPQGFLNSPALFNADVVDLLKEIPNVQVYVDDIYLSHDDPKEHVQQLEKVFQILLQAGYVVSLKKSEIGQKTVEFLGFNITKEGRGLTDTFKTKLLNITPPKDLKQLQSILGLLNFARNFIPNFAELVQPLYNLIAPAKGKYIEWSEENTKQLNMVIEALNTASNLEERLPEQRLVIKVNTSPSAGYVRYYNETGKKPIMYLNYVFSKAELKFSMLEKLLTTMHKALIKAMDLAMGQEILVYSPIVSMTKIQKTPLPERKALPIRWITWMTYLEDPRIQFHYDKTLPELKHIPDVYTSSQSPVKHPSQYEGVFYTDGSAIKSPDPTKSNNAGMGIVHATYKPEYQVLNQWSIPLGNHTAQMAEIAAVEFACKKALKIPGPVLVITDSFYVAESANKELPYWKSNGFVNNKKKPLKHISKWKSIAECLSMKPDITIQHEKGISLQIPVFILKGNALADKLATQGSYVVNAGKRTADGSEFEKRTADGSEFESPKKKAKVE

SEQ ID NO: 1326 - protein, 2176 aa, synthetic construct
MPAAKRVKLDGGDKKYSIGLDIGTNSVGWAVITDEYKVPSKKFKVLGNTDRHSIKKNLIGALLFDSGETAEATRLKRTARRRYTRRKNRICYLQEIFSNEMAKVDDSFFHRLEESFLVEEDKKHERHPIFGNIVDEVAYHEKYPTIYHLRKKLVDSTDKADLRLIYLALAHMIKFRGHFLIEGDLNPDNSDVDKLFIQLVQTYNQLFEENPINASGVDAKAILSARLSKSRRLENLIAQLPGEKKNGLFGNLIALSLGLTPNFKSNFDLAEDAKLQLSKDTYDDDLDNLLAQIGDQYADLFLAAKNLSDAILLSDILRVNTEITKAPLSASMIKRYDEHHQDLTLLKALVRQQLPEKYKEIFFDQSKNGYAGYIDGGASQEEFYKFIKPILEKMDGTEELLVKLNREDLLRKQRTFDNGSIPHQIHLGELHAILRRQEDFYPFLKDNREKIEKILTFRIPYYVGPLARGNSRFAWMTRKSEETITPWNFEEVVDKGASAQSFIERMTNFDKNLPNEKVLPKHSLLYEYFTVYNELTKVKYVTEGMRKPAFLSGEQKKAIVDLLFKTNRKVTVKQLKEDYFKKIECFDSVEISGVEDRFNASLGTYHDLLKIIKDKDFLDNEENEDILEDIVLTLTLFEDREMIEERLKTYAHLFDDKVMKQLKRRRYTGWGRLSRKLINGIRDKQSGKTILDFLKSDGFANRNFMQLIHDDSLTFKEDIQKAQVSGQGDSLHEHIANLAGSPAIKKGILQTVKVVDELVKVMGRHKPENIVIEMARENQTTQKGQKNSRERMKRIEEGIKELGSQILKEHPVENTQLQNEKLYLYYLQNGRDMYVDQELDINRLSDYDVDHIVPQSFLKDDSIDNKVLTRSDKARGKSDNVPSEEVVKKMKNYWRQLLNAKLITQRKFDNLTKAERGGLSELDKAGFIKRQLVETRQITKHVAQILDSRMNTKYDENDKLIREVKVITLKSKLVSDFRKDFQFYKVREINNYHHAHDAYLNAVVGTALIKKYPKLESEFVYGDYKVYDVRKMIAKSEQEIGKATAKYFFYSNIMNFFKTEITLANGEIRKRPLIETNGETGEIVWDKGRDFATVRKVLSMPQVNIVKKTEVQTGGFSKESILPKRNSDKLIARKKDWDPKKYGGFDSPTVAYSVLVVAKVEKGKSKKLKSVKELLGITIMERSSFEKNPIDFLEAKGYKEVKKDLIIKLPKYSLFELENGRKRMLASAGELQKGNELALPSKYVNFLYLASHYEKLKGSPEDNEQKQLFVEQHKHYLDEIIEQISEFSKRVILADANLDKVLSAYNKHRDKPIREQAENIIHLFTLTNLGAPAAFKYFDTTIDRKRYTSTKEVLDATLIHQSITGLYETRIDLSQLGGDGGGGGGGSEAAAKGGMNPLQLLQPLPAEIKGTKLLAHWNSGATITCIPESFLEDEQPIKKTLIKTIHGEKQQNVYYVTFKVKGRKVEAEVIASPYEYILLSPTDVPWLTQQPLQLTILVPLQEYQEKILSKTALPEDQKQQLKTLFVKYDNLWQHWENQVGHRKIRPHNIATGDYPPRPQKQYPINPKAKPSIQIVIDDLLKQGVLTPQNSTMNTPVYPVPKPDGRWRMVLDYREVNKTIPLTAAQNQHSAGILATIVRQKYKTTLDLANGFWAHPITPESYWLTAFTWQGKQYCWTRLPQGFLNSPALFNADVVDLLKEIPNVQVYVDDIYLSHDDPKEHVQQLEKVFQILLQAGYVVSLKKSEIGQKTVEFLGFNITKEGRGLTDTFKTKLLNITPPKDLKQLQSILGLLNFARNFIPNFAELVQPLYNLIAPAKGKYIEWSEENTKQLNMVIEALNTASNLEERLPEQRLVIKVNTSPSAGYVRYYNETGKKPIMYLNYVFSKAELKFSMLEKLLTTMHKALIKAMDLAMGQEILVYSPIVSMTKIQKTPLPERKALPIRWITWMTYLEDPRIQFHYDKTLPELKHIPDVYTSSQSPVKHPSQYEGVFYTDGSAIKSPDPTKSNNAGMGIVHATYKPEYQVLNQWSIPLGNHTAQMAEIAAVEFACKKALKIPGPVLVITDSFYVAESANKELPYWKSNGFVNNKKKPLKHISKWKSIAECLSMKPDITIQHEKGISLQIPVFILKGNALADKLATQGSYVVNAGKRTADGSEFEKRTADGSEFESPKKKAKVE

SEQ ID NO: 1327 - protein, 2176 aa, synthetic construct
MPAAKRVKLDGGDKKYSIGLDIGTNSVGWAVITDEYKVPSKKFKVLGNTDRHSIKKNLIGALLFDSGETAEATRLKRTARRRYTRRKNRICYLQEIFSNEMAKVDDSFFHRLEESFLVEEDKKHERHPIFGNIVDEVAYHEKYPTIYHLRKKLVDSTDKADLRLIYLALAHMIKFRGHFLIEGDLNPDNSDVDKLFIQLVQTYNQLFEENPINASGVDAKAILSARLSKSRRLENLIAQLPGEKKNGLFGNLIALSLGLTPNFKSNFDLAEDAKLQLSKDTYDDDLDNLLAQIGDQYADLFLAAKNLSDAILLSDILRVNTEITKAPLSASMIKRYDEHHQDLTLLKALVRQQLPEKYKEIFFDQSKNGYAGYIDGGASQEEFYKFIKPILEKMDGTEELLVKLNREDLLRKQRTFDNGSIPHQIHLGELHAILRRQEDFYPFLKDNREKIEKILTFRIPYYVGPLARGNSRFAWMTRKSEETITPWNFEEVVDKGASAQSFIERMTNFDKNLPNEKVLPKHSLLYEYFTVYNELTKVKYVTEGMRKPAFLSGEQKKAIVDLLFKTNRKVTVKQLKEDYFKKIECFDSVEISGVEDRFNASLGTYHDLLKIIKDKDFLDNEENEDILEDIVLTLTLFEDREMIEERLKTYAHLFDDKVMKQLKRRRYTGWGRLSRKLINGIRDKQSGKTILDFLKSDGFANRNFMQLIHDDSLTFKEDIQKAQVSGQGDSLHEHIANLAGSPAIKKGILQTVKVVDELVKVMGRHKPENIVIEMARENQTTQKGQKNSRERMKRIEEGIKELGSQILKEHPVENTQLQNEKLYLYYLQNGRDMYVDQELDINRLSDYDVDHIVPQSFLKDDSIDNKVLTRSDKARGKSDNVPSEEVVKKMKNYWRQLLNAKLITQRKFDNLTKAERGGLSELDKAGFIKRQLVETRQITKHVAQILDSRMNTKYDENDKLIREVKVITLKSKLVSDFRKDFQFYKVREINNYHHAHDAYLNAVVGTALIKKYPKLESEFVYGDYKVYDVRKMIAKSEQEIGKATAKYFFYSNIMNFFKTEITLANGEIRKRPLIETNGETGEIVWDKGRDFATVRKVLSMPQVNIVKKTEVQTGGFSKESILPKRNSDKLIARKKDWDPKKYGGFDSPTVAYSVLVVAKVEKGKSKKLKSVKELLGITIMERSSFEKNPIDFLEAKGYKEVKKDLIIKLPKYSLFELENGRKRMLASAGELQKGNELALPSKYVNFLYLASHYEKLKGSPEDNEQKQLFVEQHKHYLDEIIEQISEFSKRVILADANLDKVLSAYNKHRDKPIREQAENIIHLFTLTNLGAPAAFKYFDTTIDRKRYTSTKEVLDATLIHQSITGLYETRIDLSQLGGDGGEAAAKGSSPAPGGMNPLQLLQPLPAEIKGTKLLAHWNSGATITCIPESFLEDEQPIKKTLIKTIHGEKQQNVYYVTFKVKGRKVEAEVIASPYEYILLSPTDVPWLTQQPLQLTILVPLQEYQEKILSKTALPEDQKQQLKTLFVKYDNLWQHWENQVGHRKIRPHNIATGDYPPRPQKQYPINPKAKPSIQIVIDDLLKQGVLTPQNSTMNTPVYPVPKPDGRWRMVLDYREVNKTIPLTAAQNQHSAGILATIVRQKYKTTLDLANGFWAHPITPESYWLTAFTWQGKQYCWTRLPQGFLNSPALFNADVVDLLKEIPNVQVYVDDIYLSHDDPKEHVQQLEKVFQILLQAGYVVSLKKSEIGQKTVEFLGFNITKEGRGLTDTFKTKLLNITPPKDLKQLQSILGLLNFARNFIPNFAELVQPLYNLIAPAKGKYIEWSEENTKQLNMVIEALNTASNLEERLPEQRLVIKVNTSPSAGYVRYYNETGKKPIMYLNYVFSKAELKFSMLEKLLTTMHKALIKAMDLAMGQEILVYSPIVSMTKIQKTPLPERKALPIRWITWMTYLEDPRIQFHYDKTLPELKHIPDVYTSSQSPVKHPSQYEGVFYTDGSAIKSPDPTKSNNAGMGIVHATYKPEYQVLNQWSIPLGNHTAQMAEIAAVEFACKKALKIPGPVLVITDSFYVAESANKELPYWKSNGFVNNKKKPLKHISKWKSIAECLSMKPDITIQHEKGISLQIPVFILKGNALADKLATQGSYVVNAGKRTADGSEFEKRTADGSEFESPKKKAKVE

SEQ ID NO: 1328 - protein, 2176 aa, synthetic construct
MPAAKRVKLDGGDKKYSIGLDIGTNSVGWAVITDEYKVPSKKFKVLGNTDRHSIKKNLIGALLFDSGETAEATRLKRTARRRYTRRKNRICYLQEIFSNEMAKVDDSFFHRLEESFLVEEDKKHERHPIFGNIVDEVAYHEKYPTIYHLRKKLVDSTDKADLRLIYLALAHMIKFRGHFLIEGDLNPDNSDVDKLFIQLVQTYNQLFEENPINASGVDAKAILSARLSKSRRLENLIAQLPGEKKNGLFGNLIALSLGLTPNFKSNFDLAEDAKLQLSKDTYDDDLDNLLAQIGDQYADLFLAAKNLSDAILLSDILRVNTEITKAPLSASMIKRYDEHHQDLTLLKALVRQQLPEKYKEIFFDQSKNGYAGYIDGGASQEEFYKFIKPILEKMDGTEELLVKLNREDLLRKQRTFDNGSIPHQIHLGELHAILRRQEDFYPFLKDNREKIEKILTFRIPYYVGPLARGNSRFAWMTRKSEETITPWNFEEVVDKGASAQSFIERMTNFDKNLPNEKVLPKHSLLYEYFTVYNELTKVKYVTEGMRKPAFLSGEQKKAIVDLLFKTNRKVTVKQLKEDYFKKIECFDSVEISGVEDRFNASLGTYHDLLKIIKDKDFLDNEENEDILEDIVLTLTLFEDREMIEERLKTYAHLFDDKVMKQLKRRRYTGWGRLSRKLINGIRDKQSGKTILDFLKSDGFANRNFMQLIHDDSLTFKEDIQKAQVSGQGDSLHEHIANLAGSPAIKKGILQTVKVVDELVKVMGRHKPENIVIEMARENQTTQKGQKNSRERMKRIEEGIKELGSQILKEHPVENTQLQNEKLYLYYLQNGRDMYVDQELDINRLSDYDVDHIVPQSFLKDDSIDNKVLTRSDKARGKSDNVPSEEVVKKMKNYWRQLLNAKLITQRKFDNLTKAERGGLSELDKAGFIKRQLVETRQITKHVAQILDSRMNTKYDENDKLIREVKVITLKSKLVSDFRKDFQFYKVREINNYHHAHDAYLNAVVGTALIKKYPKLESEFVYGDYKVYDVRKMIAKSEQEIGKATAKYFFYSNIMNFFKTEITLANGEIRKRPLIETNGETGEIVWDKGRDFATVRKVLSMPQVNIVKKTEVQTGGFSKESILPKRNSDKLIARKKDWDPKKYGGFDSPTVAYSVLVVAKVEKGKSKKLKSVKELLGITIMERSSFEKNPIDFLEAKGYKEVKKDLIIKLPKYSLFELENGRKRMLASAGELQKGNELALPSKYVNFLYLASHYEKLKGSPEDNEQKQLFVEQHKHYLDEIIEQISEFSKRVILADANLDKVLSAYNKHRDKPIREQAENIIHLFTLTNLGAPAAFKYFDTTIDRKRYTSTKEVLDATLIHQSITGLYETRIDLSQLGGDGGGGSPAPEAAAKGGMNPLQLLQPLPAEIKGTKLLAHWNSGATITCIPESFLEDEQPIKKTLIKTIHGEKQQNVYYVTFKVKGRKVEAEVIASPYEYILLSPTDVPWLTQQPLQLTILVPLQEYQEKILSKTALPEDQKQQLKTLFVKYDNLWQHWENQVGHRKIRPHNIATGDYPPRPQKQYPINPKAKPSIQIVIDDLLKQGVLTPQNSTMNTPVYPVPKPDGRWRMVLDYREVNKTIPLTAAQNQHSAGILATIVRQKYKTTLDLANGFWAHPITPESYWLTAFTWQGKQYCWTRLPQGFLNSPALFNADVVDLLKEIPNVQVYVDDIYLSHDDPKEHVQQLEKVFQILLQAGYVVSLKKSEIGQKTVEFLGFNITKEGRGLTDTFKTKLLNITPPKDLKQLQSILGLLNFARNFIPNFAELVQPLYNLIAPAKGKYIEWSEENTKQLNMVIEALNTASNLEERLPEQRLVIKVNTSPSAGYVRYYNETGKKPIMYLNYVFSKAELKFSMLEKLLTTMHKALIKAMDLAMGQEILVYSPIVSMTKIQKTPLPERKALPIRWITWMTYLEDPRIQFHYDKTLPELKHIPDVYTSSQSPVKHPSQYEGVFYTDGSAIKSPDPTKSNNAGMGIVHATYKPEYQVLNQWSIPLGNHTAQMAEIAAVEFACKKALKIPGPVLVITDSFYVAESANKELPYWKSNGFVNNKKKPLKHISKWKSIAECLSMKPDITIQHEKGISLQIPVFILKGNALADKLATQGSYVVNAGKRTADGSEFEKRTADGSEFESPKKKAKVE

SEQ ID NO: 1329 - protein, 2176 aa, synthetic construct
MPAAKRVKLDGGDKKYSIGLDIGTNSVGWAVITDEYKVPSKKFKVLGNTDRHSIKKNLIGALLFDSGETAEATRLKRTARRRYTRRKNRICYLQEIFSNEMAKVDDSFFHRLEESFLVEEDKKHERHPIFGNIVDEVAYHEKYPTIYHLRKKLVDSTDKADLRLIYLALAHMIKFRGHFLIEGDLNPDNSDVDKLFIQLVQTYNQLFEENPINASGVDAKAILSARLSKSRRLENLIAQLPGEKKNGLFGNLIALSLGLTPNFKSNFDLAEDAKLQLSKDTYDDDLDNLLAQIGDQYADLFLAAKNLSDAILLSDILRVNTEITKAPLSASMIKRYDEHHQDLTLLKALVRQQLPEKYKEIFFDQSKNGYAGYIDGGASQEEFYKFIKPILEKMDGTEELLVKLNREDLLRKQRTFDNGSIPHQIHLGELHAILRRQEDFYPFLKDNREKIEKILTFRIPYYVGPLARGNSRFAWMTRKSEETITPWNFEEVVDKGASAQSFIERMTNFDKNLPNEKVLPKHSLLYEYFTVYNELTKVKYVTEGMRKPAFLSGEQKKAIVDLLFKTNRKVTVKQLKEDYFKKIECFDSVEISGVEDRFNASLGTYHDLLKIIKDKDFLDNEENEDILEDIVLTLTLFEDREMIEERLKTYAHLFDDKVMKQLKRRRYTGWGRLSRKLINGIRDKQSGKTILDFLKSDGFANRNFMQLIHDDSLTFKEDIQKAQVSGQGDSLHEHIANLAGSPAIKKGILQTVKVVDELVKVMGRHKPENIVIEMARENQTTQKGQKNSRERMKRIEEGIKELGSQILKEHPVENTQLQNEKLYLYYLQNGRDMYVDQELDINRLSDYDVDHIVPQSFLKDDSIDNKVLTRSDKARGKSDNVPSEEVVKKMKNYWRQLLNAKLITQRKFDNLTKAERGGLSELDKAGFIKRQLVETRQITKHVAQILDSRMNTKYDENDKLIREVKVITLKSKLVSDFRKDFQFYKVREINNYHHAHDAYLNAVVGTALIKKYPKLESEFVYGDYKVYDVRKMIAKSEQEIGKATAKYFFYSNIMNFFKTEITLANGEIRKRPLIETNGETGEIVWDKGRDFATVRKVLSMPQVNIVKKTEVQTGGFSKESILPKRNSDKLIARKKDWDPKKYGGFDSPTVAYSVLVVAKVEKGKSKKLKSVKELLGITIMERSSFEKNPIDFLEAKGYKEVKKDLIIKLPKYSLFELENGRKRMLASAGELQKGNELALPSKYVNFLYLASHYEKLKGSPEDNEQKQLFVEQHKHYLDEIIEQISEFSKRVILADANLDKVLSAYNKHRDKPIREQAENIIHLFTLTNLGAPAAFKYFDTTIDRKRYTSTKEVLDATLIHQSITGLYETRIDLSQLGGDGGEAAAKGGSGGGGGMNPLQLLQPLPAEIKGTKLLAHWNSGATITCIPESFLEDEQPIKKTLIKTIHGEKQQNVYYVTFKVKGRKVEAEVIASPYEYILLSPTDVPWLTQQPLQLTILVPLQEYQEKILSKTALPEDQKQQLKTLFVKYDNLWQHWENQVGHRKIRPHNIATGDYPPRPQKQYPINPKAKPSIQIVIDDLLKQGVLTPQNSTMNTPVYPVPKPDGRWRMVLDYREVNKTIPLTAAQNQHSAGILATIVRQKYKTTLDLANGFWAHPITPESYWLTAFTWQGKQYCWTRLPQGFLNSPALFNADVVDLLKEIPNVQVYVDDIYLSHDDPKEHVQQLEKVFQILLQAGYVVSLKKSEIGQKTVEFLGFNITKEGRGLTDTFKTKLLNITPPKDLKQLQSILGLLNFARNFIPNFAELVQPLYNLIAPAKGKYIEWSEENTKQLNMVIEALNTASNLEERLPEQRLVIKVNTSPSAGYVRYYNETGKKPIMYLNYVFSKAELKFSMLEKLLTTMHKALIKAMDLAMGQEILVYSPIVSMTKIQKTPLPERKALPIRWITWMTYLEDPRIQFHYDKTLPELKHIPDVYTSSQSPVKHPSQYEGVFYTDGSAIKSPDPTKSNNAGMGIVHATYKPEYQVLNQWSIPLGNHTAQMAEIAAVEFACKKALKIPGPVLVITDSFYVAESANKELPYWKSNGFVNNKKKPLKHISKWKSIAECLSMKPDITIQHEKGISLQIPVFILKGNALADKLATQGSYVVNAGKRTADGSEFEKRTADGSEFESPKKKAKVE

SEQ ID NO: 1330 - protein, 2180 aa, synthetic construct
MPAAKRVKLDGGDKKYSIGLDIGTNSVGWAVITDEYKVPSKKFKVLGNTDRHSIKKNLIGALLFDSGETAEATRLKRTARRRYTRRKNRICYLQEIFSNEMAKVDDSFFHRLEESFLVEEDKKHERHPIFGNIVDEVAYHEKYPTIYHLRKKLVDSTDKADLRLIYLALAHMIKFRGHFLIEGDLNPDNSDVDKLFIQLVQTYNQLFEENPINASGVDAKAILSARLSKSRRLENLIAQLPGEKKNGLFGNLIALSLGLTPNFKSNFDLAEDAKLQLSKDTYDDDLDNLLAQIGDQYADLFLAAKNLSDAILLSDILRVNTEITKAPLSASMIKRYDEHHQDLTLLKALVRQQLPEKYKEIFFDQSKNGYAGYIDGGASQEEFYKFIKPILEKMDGTEELLVKLNREDLLRKQRTFDNGSIPHQIHLGELHAILRRQEDFYPFLKDNREKIEKILTFRIPYYVGPLARGNSRFAWMTRKSEETITPWNFEEVVDKGASAQSFIERMTNFDKNLPNEKVLPKHSLLYEYFTVYNELTKVKYVTEGMRKPAFLSGEQKKAIVDLLFKTNRKVTVKQLKEDYFKKIECFDSVEISGVEDRFNASLGTYHDLLKIIKDKDFLDNEENEDILEDIVLTLTLFEDREMIEERLKTYAHLFDDKVMKQLKRRRYTGWGRLSRKLINGIRDKQSGKTILDFLKSDGFANRNFMQLIHDDSLTFKEDIQKAQVSGQGDSLHEHIANLAGSPAIKKGILQTVKVVDELVKVMGRHKPENIVIEMARENQTTQKGQKNSRERMKRIEEGIKELGSQILKEHPVENTQLQNEKLYLYYLQNGRDMYVDQELDINRLSDYDVDHIVPQSFLKDDSIDNKVLTRSDKARGKSDNVPSEEVVKKMKNYWRQLLNAKLITQRKFDNLTKAERGGLSELDKAGFIKRQLVETRQITKHVAQILDSRMNTKYDENDKLIREVKVITLKSKLVSDFRKDFQFYKVREINNYHHAHDAYLNAVVGTALIKKYPKLESEFVYGDYKVYDVRKMIAKSEQEIGKATAKYFFYSNIMNFFKTEITLANGEIRKRPLIETNGETGEIVWDKGRDFATVRKVLSMPQVNIVKKTEVQTGGFSKESILPKRNSDKLIARKKDWDPKKYGGFDSPTVAYSVLVVAKVEKGKSKKLKSVKELLGITIMERSSFEKNPIDFLEAKGYKEVKKDLIIKLPKYSLFELENGRKRMLASAGELQKGNELALPSKYVNFLYLASHYEKLKGSPEDNEQKQLFVEQHKHYLDEIIEQISEFSKRVILADANLDKVLSAYNKHRDKPIREQAENIIHLFTLTNLGAPAAFKYFDTTIDRKRYTSTKEVLDATLIHQSITGLYETRIDLSQLGGDGGGGGGSEAAAKGGGGSGGMNPLQLLQPLPAEIKGTKLLAHWNSGATITCIPESFLEDEQPIKKTLIKTIHGEKQQNVYYVTFKVKGRKVEAEVIASPYEYILLSPTDVPWLTQQPLQLTILVPLQEYQEKILSKTALPEDQKQQLKTLFVKYDNLWQHWENQVGHRKIRPHNIATGDYPPRPQKQYPINPKAKPSIQIVIDDLLKQGVLTPQNSTMNTPVYPVPKPDGRWRMVLDYREVNKTIPLTAAQNQHSAGILATIVRQKYKTTLDLANGFWAHPITPESYWLTAFTWQGKQYCWTRLPQGFLNSPALFNADVVDLLKEIPNVQVYVDDIYLSHDDPKEHVQQLEKVFQILLQAGYVVSLKKSEIGQKTVEFLGFNITKEGRGLTDTFKTKLLNITPPKDLKQLQSILGLLNFARNFIPNFAELVQPLYNLIAPAKGKYIEWSEENTKQLNMVIEALNTASNLEERLPEQRLVIKVNTSPSAGYVRYYNETGKKPIMYLNYVFSKAELKFSMLEKLLTTMHKALIKAMDLAMGQEILVYSPIVSMTKIQKTPLPERKALPIRWITWMTYLEDPRIQFHYDKTLPELKHIPDVYTSSQSPVKHPSQYEGVFYTDGSAIKSPDPTKSNNAGMGIVHATYKPEYQVLNQWSIPLGNHTAQMAEIAAVEFACKKALKIPGPVLVITDSFYVAESANKELPYWKSNGFVNNKKKPLKHISKWKSIAECLSMKPDITIQHEKGISLQIPVFILKGNALADKLATQGSYVVNAGKRTADGSEFEKRTADGSEFESPKKKAKVE

SEQ ID NO: 1331 - protein, 2174 aa, synthetic construct
MPAAKRVKLDGGDKKYSIGLDIGTNSVGWAVITDEYKVPSKKFKVLGNTDRHSIKKNLIGALLFDSGETAEATRLKRTARRRYTRRKNRICYLQEIFSNEMAKVDDSFFHRLEESFLVEEDKKHERHPIFGNIVDEVAYHEKYPTIYHLRKKLVDSTDKADLRLIYLALAHMIKFRGHFLIEGDLNPDNSDVDKLFIQLVQTYNQLFEENPINASGVDAKAILSARLSKSRRLENLIAQLPGEKKNGLFGNLIALSLGLTPNFKSNFDLAEDAKLQLSKDTYDDDLDNLLAQIGDQYADLFLAAKNLSDAILLSDILRVNTEITKAPLSASMIKRYDEHHQDLTLLKALVRQQLPEKYKEIFFDQSKNGYAGYIDGGASQEEFYKFIKPILEKMDGTEELLVKLNREDLLRKQRTFDNGSIPHQIHLGELHAILRRQEDFYPFLKDNREKIEKILTFRIPYYVGPLARGNSRFAWMTRKSEETITPWNFEEVVDKGASAQSFIERMTNFDKNLPNEKVLPKHSLLYEYFTVYNELTKVKYVTEGMRKPAFLSGEQKKAIVDLLFKTNRKVTVKQLKEDYFKKIECFDSVEISGVEDRFNASLGTYHDLLKIIKDKDFLDNEENEDILEDIVLTLTLFEDREMIEERLKTYAHLFDDKVMKQLKRRRYTGWGRLSRKLINGIRDKQSGKTILDFLKSDGFANRNFMQLIHDDSLTFKEDIQKAQVSGQGDSLHEHIANLAGSPAIKKGILQTVKVVDELVKVMGRHKPENIVIEMARENQTTQKGQKNSRERMKRIEEGIKELGSQILKEHPVENTQLQNEKLYLYYLQNGRDMYVDQELDINRLSDYDVDHIVPQSFLKDDSIDNKVLTRSDKARGKSDNVPSEEVVKKMKNYWRQLLNAKLITQRKFDNLTKAERGGLSELDKAGFIKRQLVETRQITKHVAQILDSRMNTKYDENDKLIREVKVITLKSKLVSDFRKDFQFYKVREINNYHHAHDAYLNAVVGTALIKKYPKLESEFVYGDYKVYDVRKMIAKSEQEIGKATAKYFFYSNIMNFFKTEITLANGEIRKRPLIETNGETGEIVWDKGRDFATVRKVLSMPQVNIVKKTEVQTGGFSKESILPKRNSDKLIARKKDWDPKKYGGFDSPTVAYSVLVVAKVEKGKSKKLKSVKELLGITIMERSSFEKNPIDFLEAKGYKEVKKDLIIKLPKYSLFELENGRKRMLASAGELQKGNELALPSKYVNFLYLASHYEKLKGSPEDNEQKQLFVEQHKHYLDEIIEQISEFSKRVILADANLDKVLSAYNKHRDKPIREQAENIIHLFTLTNLGAPAAFKYFDTTIDRKRYTSTKEVLDATLIHQSITGLYETRIDLSQLGGDGGGGSPAPGSSGGMNPLQLLQPLPAEIKGTKLLAHWNSGATITCIPESFLEDEQPIKKTLIKTIHGEKQQNVYYVTFKVKGRKVEAEVIASPYEYILLSPTDVPWLTQQPLQLTILVPLQEYQEKILSKTALPEDQKQQLKTLFVKYDNLWQHWENQVGHRKIRPHNIATGDYPPRPQKQYPINPKAKPSIQIVIDDLLKQGVLTPQNSTMNTPVYPVPKPDGRWRMVLDYREVNKTIPLTAAQNQHSAGILATIVRQKYKTTLDLANGFWAHPITPESYWLTAFTWQGKQYCWTRLPQGFLNSPALFNADVVDLLKEIPNVQVYVDDIYLSHDDPKEHVQQLEKVFQILLQAGYVVSLKKSEIGQKTVEFLGFNITKEGRGLTDTFKTKLLNITPPKDLKQLQSILGLLNFARNFIPNFAELVQPLYNLIAPAKGKYIEWSEENTKQLNMVIEALNTASNLEERLPEQRLVIKVNTSPSAGYVRYYNETGKKPIMYLNYVFSKAELKFSMLEKLLTTMHKALIKAMDLAMGQEILVYSPIVSMTKIQKTPLPERKALPIRWITWMTYLEDPRIQFHYDKTLPELKHIPDVYTSSQSPVKHPSQYEGVFYTDGSAIKSPDPTKSNNAGMGIVHATYKPEYQVLNQWSIPLGNHTAQMAEIAAVEFACKKALKIPGPVLVITDSFYVAESANKELPYWKSNGFVNNKKKPLKHISKWKSIAECLSMKPDITIQHEKGISLQIPVFILKGNALADKLATQGSYVVNAGKRTADGSEFEKRTADGSEFESPKKKAKVE

SEQ ID NO: 1332 - protein, 2177 aa, synthetic construct
MPAAKRVKLDGGDKKYSIGLDIGTNSVGWAVITDEYKVPSKKFKVLGNTDRHSIKKNLIGALLFDSGETAEATRLKRTARRRYTRRKNRICYLQEIFSNEMAKVDDSFFHRLEESFLVEEDKKHERHPIFGNIVDEVAYHEKYPTIYHLRKKLVDSTDKADLRLIYLALAHMIKFRGHFLIEGDLNPDNSDVDKLFIQLVQTYNQLFEENPINASGVDAKAILSARLSKSRRLENLIAQLPGEKKNGLFGNLIALSLGLTPNFKSNFDLAEDAKLQLSKDTYDDDLDNLLAQIGDQYADLFLAAKNLSDAILLSDILRVNTEITKAPLSASMIKRYDEHHQDLTLLKALVRQQLPEKYKEIFFDQSKNGYAGYIDGGASQEEFYKFIKPILEKMDGTEELLVKLNREDLLRKQRTFDNGSIPHQIHLGELHAILRRQEDFYPFLKDNREKIEKILTFRIPYYVGPLARGNSRFAWMTRKSEETITPWNFEEVVDKGASAQSFIERMTNFDKNLPNEKVLPKHSLLYEYFTVYNELTKVKYVTEGMRKPAFLSGEQKKAIVDLLFKTNRKVTVKQLKEDYFKKIECFDSVEISGVEDRFNASLGTYHDLLKIIKDKDFLDNEENEDILEDIVLTLTLFEDREMIEERLKTYAHLFDDKVMKQLKRRRYTGWGRLSRKLINGIRDKQSGKTILDFLKSDGFANRNFMQLIHDDSLTFKEDIQKAQVSGQGDSLHEHIANLAGSPAIKKGILQTVKVVDELVKVMGRHKPENIVIEMARENQTTQKGQKNSRERMKRIEEGIKELGSQILKEHPVENTQLQNEKLYLYYLQNGRDMYVDQELDINRLSDYDVDHIVPQSFLKDDSIDNKVLTRSDKARGKSDNVPSEEVVKKMKNYWRQLLNAKLITQRKFDNLTKAERGGLSELDKAGFIKRQLVETRQITKHVAQILDSRMNTKYDENDKLIREVKVITLKSKLVSDFRKDFQFYKVREINNYHHAHDAYLNAVVGTALIKKYPKLESEFVYGDYKVYDVRKMIAKSEQEIGKATAKYFFYSNIMNFFKTEITLANGEIRKRPLIETNGETGEIVWDKGRDFATVRKVLSMPQVNIVKKTEVQTGGFSKESILPKRNSDKLIARKKDWDPKKYGGFDSPTVAYSVLVVAKVEKGKSKKLKSVKELLGITIMERSSFEKNPIDFLEAKGYKEVKKDLIIKLPKYSLFELENGRKRMLASAGELQKGNELALPSKYVNFLYLASHYEKLKGSPEDNEQKQLFVEQHKHYLDEIIEQISEFSKRVILADANLDKVLSAYNKHRDKPIREQAENIIHLFTLTNLGAPAAFKYFDTTIDRKRYTSTKEVLDATLIHQSITGLYETRIDLSQLGGDGGGSSGSSGSSGSSGGMNPLQLLQPLPAEIKGTKLLAHWNSGATITCIPESFLEDEQPIKKTLIKTIHGEKQQNVYYVTFKVKGRKVEAEVIASPYEYILLSPTDVPWLTQQPLQLTILVPLQEYQEKILSKTALPEDQKQQLKTLFVKYDNLWQHWENQVGHRKIRPHNIATGDYPPRPQKQYPINPKAKPSIQIVIDDLLKQGVLTPQNSTMNTPVYPVPKPDGRWRMVLDYREVNKTIPLTAAQNQHSAGILATIVRQKYKTTLDLANGFWAHPITPESYWLTAFTWQGKQYCWTRLPQGFLNSPALFNADVVDLLKEIPNVQVYVDDIYLSHDDPKEHVQQLEKVFQILLQAGYVVSLKKSEIGQKTVEFLGFNITKEGRGLTDTFKTKLLNITPPKDLKQLQSILGLLNFARNFIPNFAELVQPLYNLIAPAKGKYIEWSEENTKQLNMVIEALNTASNLEERLPEQRLVIKVNTSPSAGYVRYYNETGKKPIMYLNYVFSKAELKFSMLEKLLTTMHKALIKAMDLAMGQEILVYSPIVSMTKIQKTPLPERKALPIRWITWMTYLEDPRIQFHYDKTLPELKHIPDVYTSSQSPVKHPSQYEGVFYTDGSAIKSPDPTKSNNAGMGIVHATYKPEYQVLNQWSIPLGNHTAQMAEIAAVEFACKKALKIPGPVLVITDSFYVAESANKELPYWKSNGFVNNKKKPLKHISKWKSIAECLSMKPDITIQHEKGISLQIPVFILKGNALADKLATQGSYVVNAGKRTADGSEFEKRTADGSEFESPKKKAKVE

SEQ ID NO: 1333 - protein, 2174 aa, synthetic construct
MPAAKRVKLDGGDKKYSIGLDIGTNSVGWAVITDEYKVPSKKFKVLGNTDRHSIKKNLIGALLFDSGETAEATRLKRTARRRYTRRKNRICYLQEIFSNEMAKVDDSFFHRLEESFLVEEDKKHERHPIFGNIVDEVAYHEKYPTIYHLRKKLVDSTDKADLRLIYLALAHMIKFRGHFLIEGDLNPDNSDVDKLFIQLVQTYNQLFEENPINASGVDAKAILSARLSKSRRLENLIAQLPGEKKNGLFGNLIALSLGLTPNFKSNFDLAEDAKLQLSKDTYDDDLDNLLAQIGDQYADLFLAAKNLSDAILLSDILRVNTEITKAPLSASMIKRYDEHHQDLTLLKALVRQQLPEKYKEIFFDQSKNGYAGYIDGGASQEEFYKFIKPILEKMDGTEELLVKLNREDLLRKQRTFDNGSIPHQIHLGELHAILRRQEDFYPFLKDNREKIEKILTFRIPYYVGPLARGNSRFAWMTRKSEETITPWNFEEVVDKGASAQSFIERMTNFDKNLPNEKVLPKHSLLYEYFTVYNELTKVKYVTEGMRKPAFLSGEQKKAIVDLLFKTNRKVTVKQLKEDYFKKIECFDSVEISGVEDRFNASLGTYHDLLKIIKDKDFLDNEENEDILEDIVLTLTLFEDREMIEERLKTYAHLFDDKVMKQLKRRRYTGWGRLSRKLINGIRDKQSGKTILDFLKSDGFANRNFMQLIHDDSLTFKEDIQKAQVSGQGDSLHEHIANLAGSPAIKKGILQTVKVVDELVKVMGRHKPENIVIEMARENQTTQKGQKNSRERMKRIEEGIKELGSQILKEHPVENTQLQNEKLYLYYLQNGRDMYVDQELDINRLSDYDVDHIVPQSFLKDDSIDNKVLTRSDKARGKSDNVPSEEVVKKMKNYWRQLLNAKLITQRKFDNLTKAERGGLSELDKAGFIKRQLVETRQITKHVAQILDSRMNTKYDENDKLIREVKVITLKSKLVSDFRKDFQFYKVREINNYHHAHDAYLNAVVGTALIKKYPKLESEFVYGDYKVYDVRKMIAKSEQEIGKATAKYFFYSNIMNFFKTEITLANGEIRKRPLIETNGETGEIVWDKGRDFATVRKVLSMPQVNIVKKTEVQTGGFSKESILPKRNSDKLIARKKDWDPKKYGGFDSPTVAYSVLVVAKVEKGKSKKLKSVKELLGITIMERSSFEKNPIDFLEAKGYKEVKKDLIIKLPKYSLFELENGRKRMLASAGELQKGNELALPSKYVNFLYLASHYEKLKGSPEDNEQKQLFVEQHKHYLDEIIEQISEFSKRVILADANLDKVLSAYNKHRDKPIREQAENIIHLFTLTNLGAPAAFKYFDTTIDRKRYTSTKEVLDATLIHQSITGLYETRIDLSQLGGDGGPAPGSSGGSGGMNPLQLLQPLPAEIKGTKLLAHWNSGATITCIPESFLEDEQPIKKTLIKTIHGEKQQNVYYVTFKVKGRKVEAEVIASPYEYILLSPTDVPWLTQQPLQLTILVPLQEYQEKILSKTALPEDQKQQLKTLFVKYDNLWQHWENQVGHRKIRPHNIATGDYPPRPQKQYPINPKAKPSIQIVIDDLLKQGVLTPQNSTMNTPVYPVPKPDGRWRMVLDYREVNKTIPLTAAQNQHSAGILATIVRQKYKTTLDLANGFWAHPITPESYWLTAFTWQGKQYCWTRLPQGFLNSPALFNADVVDLLKEIPNVQVYVDDIYLSHDDPKEHVQQLEKVFQILLQAGYVVSLKKSEIGQKTVEFLGFNITKEGRGLTDTFKTKLLNITPPKDLKQLQSILGLLNFARNFIPNFAELVQPLYNLIAPAKGKYIEWSEENTKQLNMVIEALNTASNLEERLPEQRLVIKVNTSPSAGYVRYYNETGKKPIMYLNYVFSKAELKFSMLEKLLTTMHKALIKAMDLAMGQEILVYSPIVSMTKIQKTPLPERKALPIRWITWMTYLEDPRIQFHYDKTLPELKHIPDVYTSSQSPVKHPSQYEGVFYTDGSAIKSPDPTKSNNAGMGIVHATYKPEYQVLNQWSIPLGNHTAQMAEIAAVEFACKKALKIPGPVLVITDSFYVAESANKELPYWKSNGFVNNKKKPLKHISKWKSIAECLSMKPDITIQHEKGISLQIPVFILKGNALADKLATQGSYVVNAGKRTADGSEFEKRTADGSEFESPKKKAKVE

SEQ ID NO: 1334 - protein, 2176 aa, synthetic construct
MPAAKRVKLDGGDKKYSIGLDIGTNSVGWAVITDEYKVPSKKFKVLGNTDRHSIKKNLIGALLFDSGETAEATRLKRTARRRYTRRKNRICYLQEIFSNEMAKVDDSFFHRLEESFLVEEDKKHERHPIFGNIVDEVAYHEKYPTIYHLRKKLVDSTDKADLRLIYLALAHMIKFRGHFLIEGDLNPDNSDVDKLFIQLVQTYNQLFEENPINASGVDAKAILSARLSKSRRLENLIAQLPGEKKNGLFGNLIALSLGLTPNFKSNFDLAEDAKLQLSKDTYDDDLDNLLAQIGDQYADLFLAAKNLSDAILLSDILRVNTEITKAPLSASMIKRYDEHHQDLTLLKALVRQQLPEKYKEIFFDQSKNGYAGYIDGGASQEEFYKFIKPILEKMDGTEELLVKLNREDLLRKQRTFDNGSIPHQIHLGELHAILRRQEDFYPFLKDNREKIEKILTFRIPYYVGPLARGNSRFAWMTRKSEETITPWNFEEVVDKGASAQSFIERMTNFDKNLPNEKVLPKHSLLYEYFTVYNELTKVKYVTEGMRKPAFLSGEQKKAIVDLLFKTNRKVTVKQLKEDYFKKIECFDSVEISGVEDRFNASLGTYHDLLKIIKDKDFLDNEENEDILEDIVLTLTLFEDREMIEERLKTYAHLFDDKVMKQLKRRRYTGWGRLSRKLINGIRDKQSGKTILDFLKSDGFANRNFMQLIHDDSLTFKEDIQKAQVSGQGDSLHEHIANLAGSPAIKKGILQTVKVVDELVKVMGRHKPENIVIEMARENQTTQKGQKNSRERMKRIEEGIKELGSQILKEHPVENTQLQNEKLYLYYLQNGRDMYVDQELDINRLSDYDVDHIVPQSFLKDDSIDNKVLTRSDKARGKSDNVPSEEVVKKMKNYWRQLLNAKLITQRKFDNLTKAERGGLSELDKAGFIKRQLVETRQITKHVAQILDSRMNTKYDENDKLIREVKVITLKSKLVSDFRKDFQFYKVREINNYHHAHDAYLNAVVGTALIKKYPKLESEFVYGDYKVYDVRKMIAKSEQEIGKATAKYFFYSNIMNFFKTEITLANGEIRKRPLIETNGETGEIVWDKGRDFATVRKVLSMPQVNIVKKTEVQTGGFSKESILPKRNSDKLIARKKDWDPKKYGGFDSPTVAYSVLVVAKVEKGKSKKLKSVKELLGITIMERSSFEKNPIDFLEAKGYKEVKKDLIIKLPKYSLFELENGRKRMLASAGELQKGNELALPSKYVNFLYLASHYEKLKGSPEDNEQKQLFVEQHKHYLDEIIEQISEFSKRVILADANLDKVLSAYNKHRDKPIREQAENIIHLFTLTNLGAPAAFKYFDTTIDRKRYTSTKEVLDATLIHQSITGLYETRIDLSQLGGDGGEAAAKGGGGGSGGMNPLQLLQPLPAEIKGTKLLAHWNSGATITCIPESFLEDEQPIKKTLIKTIHGEKQQNVYYVTFKVKGRKVEAEVIASPYEYILLSPTDVPWLTQQPLQLTILVPLQEYQEKILSKTALPEDQKQQLKTLFVKYDNLWQHWENQVGHRKIRPHNIATGDYPPRPQKQYPINPKAKPSIQIVIDDLLKQGVLTPQNSTMNTPVYPVPKPDGRWRMVLDYREVNKTIPLTAAQNQHSAGILATIVRQKYKTTLDLANGFWAHPITPESYWLTAFTWQGKQYCWTRLPQGFLNSPALFNADVVDLLKEIPNVQVYVDDIYLSHDDPKEHVQQLEKVFQILLQAGYVVSLKKSEIGQKTVEFLGFNITKEGRGLTDTFKTKLLNITPPKDLKQLQSILGLLNFARNFIPNFAELVQPLYNLIAPAKGKYIEWSEENTKQLNMVIEALNTASNLEERLPEQRLVIKVNTSPSAGYVRYYNETGKKPIMYLNYVFSKAELKFSMLEKLLTTMHKALIKAMDLAMGQEILVYSPIVSMTKIQKTPLPERKALPIRWITWMTYLEDPRIQFHYDKTLPELKHIPDVYTSSQSPVKHPSQYEGVFYTDGSAIKSPDPTKSNNAGMGIVHATYKPEYQVLNQWSIPLGNHTAQMAEIAAVEFACKKALKIPGPVLVITDSFYVAESANKELPYWKSNGFVNNKKKPLKHISKWKSIAECLSMKPDITIQHEKGISLQIPVFILKGNALADKLATQGSYVVNAGKRTADGSEFEKRTADGSEFESPKKKAKVE

SEQ ID NO: 1335 - protein, 2176 aa, synthetic construct
MPAAKRVKLDGGDKKYSIGLDIGTNSVGWAVITDEYKVPSKKFKVLGNTDRHSIKKNLIGALLFDSGETAEATRLKRTARRRYTRRKNRICYLQEIFSNEMAKVDDSFFHRLEESFLVEEDKKHERHPIFGNIVDEVAYHEKYPTIYHLRKKLVDSTDKADLRLIYLALAHMIKFRGHFLIEGDLNPDNSDVDKLFIQLVQTYNQLFEENPINASGVDAKAILSARLSKSRRLENLIAQLPGEKKNGLFGNLIALSLGLTPNFKSNFDLAEDAKLQLSKDTYDDDLDNLLAQIGDQYADLFLAAKNLSDAILLSDILRVNTEITKAPLSASMIKRYDEHHQDLTLLKALVRQQLPEKYKEIFFDQSKNGYAGYIDGGASQEEFYKFIKPILEKMDGTEELLVKLNREDLLRKQRTFDNGSIPHQIHLGELHAILRRQEDFYPFLKDNREKIEKILTFRIPYYVGPLARGNSRFAWMTRKSEETITPWNFEEVVDKGASAQSFIERMTNFDKNLPNEKVLPKHSLLYEYFTVYNELTKVKYVTEGMRKPAFLSGEQKKAIVDLLFKTNRKVTVKQLKEDYFKKIECFDSVEISGVEDRFNASLGTYHDLLKIIKDKDFLDNEENEDILEDIVLTLTLFEDREMIEERLKTYAHLFDDKVMKQLKRRRYTGWGRLSRKLINGIRDKQSGKTILDFLKSDGFANRNFMQLIHDDSLTFKEDIQKAQVSGQGDSLHEHIANLAGSPAIKKGILQTVKVVDELVKVMGRHKPENIVIEMARENQTTQKGQKNSRERMKRIEEGIKELGSQILKEHPVENTQLQNEKLYLYYLQNGRDMYVDQELDINRLSDYDVDHIVPQSFLKDDSIDNKVLTRSDKARGKSDNVPSEEVVKKMKNYWRQLLNAKLITQRKFDNLTKAERGGLSELDKAGFIKRQLVETRQITKHVAQILDSRMNTKYDENDKLIREVKVITLKSKLVSDFRKDFQFYKVREINNYHHAHDAYLNAVVGTALIKKYPKLESEFVYGDYKVYDVRKMIAKSEQEIGKATAKYFFYSNIMNFFKTEITLANGEIRKRPLIETNGETGEIVWDKGRDFATVRKVLSMPQVNIVKKTEVQTGGFSKESILPKRNSDKLIARKKDWDPKKYGGFDSPTVAYSVLVVAKVEKGKSKKLKSVKELLGITIMERSSFEKNPIDFLEAKGYKEVKKDLIIKLPKYSLFELENGRKRMLASAGELQKGNELALPSKYVNFLYLASHYEKLKGSPEDNEQKQLFVEQHKHYLDEIIEQISEFSKRVILADANLDKVLSAYNKHRDKPIREQAENIIHLFTLTNLGAPAAFKYFDTTIDRKRYTSTKEVLDATLIHQSITGLYETRIDLSQLGGDGGEAAAKGGGGSSGGMNPLQLLQPLPAEIKGTKLLAHWNSGATITCIPESFLEDEQPIKKTLIKTIHGEKQQNVYYVTFKVKGRKVEAEVIASPYEYILLSPTDVPWLTQQPLQLTILVPLQEYQEKILSKTALPEDQKQQLKTLFVKYDNLWQHWENQVGHRKIRPHNIATGDYPPRPQKQYPINPKAKPSIQIVIDDLLKQGVLTPQNSTMNTPVYPVPKPDGRWRMVLDYREVNKTIPLTAAQNQHSAGILATIVRQKYKTTLDLANGFWAHPITPESYWLTAFTWQGKQYCWTRLPQGFLNSPALFNADVVDLLKEIPNVQVYVDDIYLSHDDPKEHVQQLEKVFQILLQAGYVVSLKKSEIGQKTVEFLGFNITKEGRGLTDTFKTKLLNITPPKDLKQLQSILGLLNFARNFIPNFAELVQPLYNLIAPAKGKYIEWSEENTKQLNMVIEALNTASNLEERLPEQRLVIKVNTSPSAGYVRYYNETGKKPIMYLNYVFSKAELKFSMLEKLLTTMHKALIKAMDLAMGQEILVYSPIVSMTKIQKTPLPERKALPIRWITWMTYLEDPRIQFHYDKTLPELKHIPDVYTSSQSPVKHPSQYEGVFYTDGSAIKSPDPTKSNNAGMGIVHATYKPEYQVLNQWSIPLGNHTAQMAEIAAVEFACKKALKIPGPVLVITDSFYVAESANKELPYWKSNGFVNNKKKPLKHISKWKSIAECLSMKPDITIQHEKGISLQIPVFILKGNALADKLATQGSYVVNAGKRTADGSEFEKRTADGSEFESPKKKAKVE

SEQ ID NO: 1336 - protein, 2174 aa, synthetic construct
MPAAKRVKLDGGDKKYSIGLDIGTNSVGWAVITDEYKVPSKKFKVLGNTDRHSIKKNLIGALLFDSGETAEATRLKRTARRRYTRRKNRICYLQEIFSNEMAKVDDSFFHRLEESFLVEEDKKHERHPIFGNIVDEVAYHEKYPTIYHLRKKLVDSTDKADLRLIYLALAHMIKFRGHFLIEGDLNPDNSDVDKLFIQLVQTYNQLFEENPINASGVDAKAILSARLSKSRRLENLIAQLPGEKKNGLFGNLIALSLGLTPNFKSNFDLAEDAKLQLSKDTYDDDLDNLLAQIGDQYADLFLAAKNLSDAILLSDILRVNTEITKAPLSASMIKRYDEHHQDLTLLKALVRQQLPEKYKEIFFDQSKNGYAGYIDGGASQEEFYKFIKPILEKMDGTEELLVKLNREDLLRKQRTFDNGSIPHQIHLGELHAILRRQEDFYPFLKDNREKIEKILTFRIPYYVGPLARGNSRFAWMTRKSEETITPWNFEEVVDKGASAQSFIERMTNFDKNLPNEKVLPKHSLLYEYFTVYNELTKVKYVTEGMRKPAFLSGEQKKAIVDLLFKTNRKVTVKQLKEDYFKKIECFDSVEISGVEDRFNASLGTYHDLLKIIKDKDFLDNEENEDILEDIVLTLTLFEDREMIEERLKTYAHLFDDKVMKQLKRRRYTGWGRLSRKLINGIRDKQSGKTILDFLKSDGFANRNFMQLIHDDSLTFKEDIQKAQVSGQGDSLHEHIANLAGSPAIKKGILQTVKVVDELVKVMGRHKPENIVIEMARENQTTQKGQKNSRERMKRIEEGIKELGSQILKEHPVENTQLQNEKLYLYYLQNGRDMYVDQELDINRLSDYDVDHIVPQSFLKDDSIDNKVLTRSDKARGKSDNVPSEEVVKKMKNYWRQLLNAKLITQRKFDNLTKAERGGLSELDKAGFIKRQLVETRQITKHVAQILDSRMNTKYDENDKLIREVKVITLKSKLVSDFRKDFQFYKVREINNYHHAHDAYLNAVVGTALIKKYPKLESEFVYGDYKVYDVRKMIAKSEQEIGKATAKYFFYSNIMNFFKTEITLANGEIRKRPLIETNGETGEIVWDKGRDFATVRKVLSMPQVNIVKKTEVQTGGFSKESILPKRNSDKLIARKKDWDPKKYGGFDSPTVAYSVLVVAKVEKGKSKKLKSVKELLGITIMERSSFEKNPIDFLEAKGYKEVKKDLIIKLPKYSLFELENGRKRMLASAGELQKGNELALPSKYVNFLYLASHYEKLKGSPEDNEQKQLFVEQHKHYLDEIIEQISEFSKRVILADANLDKVLSAYNKHRDKPIREQAENIIHLFTLTNLGAPAAFKYFDTTIDRKRYTSTKEVLDATLIHQSITGLYETRIDLSQLGGDGGGGGGSSPAPGGMNPLQLLQPLPAEIKGTKLLAHWNSGATITCIPESFLEDEQPIKKTLIKTIHGEKQQNVYYVTFKVKGRKVEAEVIASPYEYILLSPTDVPWLTQQPLQLTILVPLQEYQEKILSKTALPEDQKQQLKTLFVKYDNLWQHWENQVGHRKIRPHNIATGDYPPRPQKQYPINPKAKPSIQIVIDDLLKQGVLTPQNSTMNTPVYPVPKPDGRWRMVLDYREVNKTIPLTAAQNQHSAGILATIVRQKYKTTLDLANGFWAHPITPESYWLTAFTWQGKQYCWTRLPQGFLNSPALFNADVVDLLKEIPNVQVYVDDIYLSHDDPKEHVQQLEKVFQILLQAGYVVSLKKSEIGQKTVEFLGFNITKEGRGLTDTFKTKLLNITPPKDLKQLQSILGLLNFARNFIPNFAELVQPLYNLIAPAKGKYIEWSEENTKQLNMVIEALNTASNLEERLPEQRLVIKVNTSPSAGYVRYYNETGKKPIMYLNYVFSKAELKFSMLEKLLTTMHKALIKAMDLAMGQEILVYSPIVSMTKIQKTPLPERKALPIRWITWMTYLEDPRIQFHYDKTLPELKHIPDVYTSSQSPVKHPSQYEGVFYTDGSAIKSPDPTKSNNAGMGIVHATYKPEYQVLNQWSIPLGNHTAQMAEIAAVEFACKKALKIPGPVLVITDSFYVAESANKELPYWKSNGFVNNKKKPLKHISKWKSIAECLSMKPDITIQHEKGISLQIPVFILKGNALADKLATQGSYVVNAGKRTADGSEFEKRTADGSEFESPKKKAKVE

SEQ ID NO: 1337 - protein, 2176 aa, synthetic construct
MPAAKRVKLDGGDKKYSIGLDIGTNSVGWAVITDEYKVPSKKFKVLGNTDRHSIKKNLIGALLFDSGETAEATRLKRTARRRYTRRKNRICYLQEIFSNEMAKVDDSFFHRLEESFLVEEDKKHERHPIFGNIVDEVAYHEKYPTIYHLRKKLVDSTDKADLRLIYLALAHMIKFRGHFLIEGDLNPDNSDVDKLFIQLVQTYNQLFEENPINASGVDAKAILSARLSKSRRLENLIAQLPGEKKNGLFGNLIALSLGLTPNFKSNFDLAEDAKLQLSKDTYDDDLDNLLAQIGDQYADLFLAAKNLSDAILLSDILRVNTEITKAPLSASMIKRYDEHHQDLTLLKALVRQQLPEKYKEIFFDQSKNGYAGYIDGGASQEEFYKFIKPILEKMDGTEELLVKLNREDLLRKQRTFDNGSIPHQIHLGELHAILRRQEDFYPFLKDNREKIEKILTFRIPYYVGPLARGNSRFAWMTRKSEETITPWNFEEVVDKGASAQSFIERMTNFDKNLPNEKVLPKHSLLYEYFTVYNELTKVKYVTEGMRKPAFLSGEQKKAIVDLLFKTNRKVTVKQLKEDYFKKIECFDSVEISGVEDRFNASLGTYHDLLKIIKDKDFLDNEENEDILEDIVLTLTLFEDREMIEERLKTYAHLFDDKVMKQLKRRRYTGWGRLSRKLINGIRDKQSGKTILDFLKSDGFANRNFMQLIHDDSLTFKEDIQKAQVSGQGDSLHEHIANLAGSPAIKKGILQTVKVVDELVKVMGRHKPENIVIEMARENQTTQKGQKNSRERMKRIEEGIKELGSQILKEHPVENTQLQNEKLYLYYLQNGRDMYVDQELDINRLSDYDVDHIVPQSFLKDDSIDNKVLTRSDKARGKSDNVPSEEVVKKMKNYWRQLLNAKLITQRKFDNLTKAERGGLSELDKAGFIKRQLVETRQITKHVAQILDSRMNTKYDENDKLIREVKVITLKSKLVSDFRKDFQFYKVREINNYHHAHDAYLNAVVGTALIKKYPKLESEFVYGDYKVYDVRKMIAKSEQEIGKATAKYFFYSNIMNFFKTEITLANGEIRKRPLIETNGETGEIVWDKGRDFATVRKVLSMPQVNIVKKTEVQTGGFSKESILPKRNSDKLIARKKDWDPKKYGGFDSPTVAYSVLVVAKVEKGKSKKLKSVKELLGITIMERSSFEKNPIDFLEAKGYKEVKKDLIIKLPKYSLFELENGRKRMLASAGELQKGNELALPSKYVNFLYLASHYEKLKGSPEDNEQKQLFVEQHKHYLDEIIEQISEFSKRVILADANLDKVLSAYNKHRDKPIREQAENIIHLFTLTNLGAPAAFKYFDTTIDRKRYTSTKEVLDATLIHQSITGLYETRIDLSQLGGDGGGGGGSSEAAAKGGMNPLQLLQPLPAEIKGTKLLAHWNSGATITCIPESFLEDEQPIKKTLIKTIHGEKQQNVYYVTFKVKGRKVEAEVIASPYEYILLSPTDVPWLTQQPLQLTILVPLQEYQEKILSKTALPEDQKQQLKTLFVKYDNLWQHWENQVGHRKIRPHNIATGDYPPRPQKQYPINPKAKPSIQIVIDDLLKQGVLTPQNSTMNTPVYPVPKPDGRWRMVLDYREVNKTIPLTAAQNQHSAGILATIVRQKYKTTLDLANGFWAHPITPESYWLTAFTWQGKQYCWTRLPQGFLNSPALFNADVVDLLKEIPNVQVYVDDIYLSHDDPKEHVQQLEKVFQILLQAGYVVSLKKSEIGQKTVEFLGFNITKEGRGLTDTFKTKLLNITPPKDLKQLQSILGLLNFARNFIPNFAELVQPLYNLIAPAKGKYIEWSEENTKQLNMVIEALNTASNLEERLPEQRLVIKVNTSPSAGYVRYYNETGKKPIMYLNYVFSKAELKFSMLEKLLTTMHKALIKAMDLAMGQEILVYSPIVSMTKIQKTPLPERKALPIRWITWMTYLEDPRIQFHYDKTLPELKHIPDVYTSSQSPVKHPSQYEGVFYTDGSAIKSPDPTKSNNAGMGIVHATYKPEYQVLNQWSIPLGNHTAQMAEIAAVEFACKKALKIPGPVLVITDSFYVAESANKELPYWKSNGFVNNKKKPLKHISKWKSIAECLSMKPDITIQHEKGISLQIPVFILKGNALADKLATQGSYVVNAGKRTADGSEFEKRTADGSEFESPKKKAKVE

SEQ ID NO: 1338 - protein, 2174 aa, synthetic construct
MPAAKRVKLDGGDKKYSIGLDIGTNSVGWAVITDEYKVPSKKFKVLGNTDRHSIKKNLIGALLFDSGETAEATRLKRTARRRYTRRKNRICYLQEIFSNEMAKVDDSFFHRLEESFLVEEDKKHERHPIFGNIVDEVAYHEKYPTIYHLRKKLVDSTDKADLRLIYLALAHMIKFRGHFLIEGDLNPDNSDVDKLFIQLVQTYNQLFEENPINASGVDAKAILSARLSKSRRLENLIAQLPGEKKNGLFGNLIALSLGLTPNFKSNFDLAEDAKLQLSKDTYDDDLDNLLAQIGDQYADLFLAAKNLSDAILLSDILRVNTEITKAPLSASMIKRYDEHHQDLTLLKALVRQQLPEKYKEIFFDQSKNGYAGYIDGGASQEEFYKFIKPILEKMDGTEELLVKLNREDLLRKQRTFDNGSIPHQIHLGELHAILRRQEDFYPFLKDNREKIEKILTFRIPYYVGPLARGNSRFAWMTRKSEETITPWNFEEVVDKGASAQSFIERMTNFDKNLPNEKVLPKHSLLYEYFTVYNELTKVKYVTEGMRKPAFLSGEQKKAIVDLLFKTNRKVTVKQLKEDYFKKIECFDSVEISGVEDRFNASLGTYHDLLKIIKDKDFLDNEENEDILEDIVLTLTLFEDREMIEERLKTYAHLFDDKVMKQLKRRRYTGWGRLSRKLINGIRDKQSGKTILDFLKSDGFANRNFMQLIHDDSLTFKEDIQKAQVSGQGDSLHEHIANLAGSPAIKKGILQTVKVVDELVKVMGRHKPENIVIEMARENQTTQKGQKNSRERMKRIEEGIKELGSQILKEHPVENTQLQNEKLYLYYLQNGRDMYVDQELDINRLSDYDVDHIVPQSFLKDDSIDNKVLTRSDKARGKSDNVPSEEVVKKMKNYWRQLLNAKLITQRKFDNLTKAERGGLSELDKAGFIKRQLVETRQITKHVAQILDSRMNTKYDENDKLIREVKVITLKSKLVSDFRKDFQFYKVREINNYHHAHDAYLNAVVGTALIKKYPKLESEFVYGDYKVYDVRKMIAKSEQEIGKATAKYFFYSNIMNFFKTEITLANGEIRKRPLIETNGETGEIVWDKGRDFATVRKVLSMPQVNIVKKTEVQTGGFSKESILPKRNSDKLIARKKDWDPKKYGGFDSPTVAYSVLVVAKVEKGKSKKLKSVKELLGITIMERSSFEKNPIDFLEAKGYKEVKKDLIIKLPKYSLFELENGRKRMLASAGELQKGNELALPSKYVNFLYLASHYEKLKGSPEDNEQKQLFVEQHKHYLDEIIEQISEFSKRVILADANLDKVLSAYNKHRDKPIREQAENIIHLFTLTNLGAPAAFKYFDTTIDRKRYTSTKEVLDATLIHQSITGLYETRIDLSQLGGDGGGGGGGSGSSGGMNPLQLLQPLPAEIKGTKLLAHWNSGATITCIPESFLEDEQPIKKTLIKTIHGEKQQNVYYVTFKVKGRKVEAEVIASPYEYILLSPTDVPWLTQQPLQLTILVPLQEYQEKILSKTALPEDQKQQLKTLFVKYDNLWQHWENQVGHRKIRPHNIATGDYPPRPQKQYPINPKAKPSIQIVIDDLLKQGVLTPQNSTMNTPVYPVPKPDGRWRMVLDYREVNKTIPLTAAQNQHSAGILATIVRQKYKTTLDLANGFWAHPITPESYWLTAFTWQGKQYCWTRLPQGFLNSPALFNADVVDLLKEIPNVQVYVDDIYLSHDDPKEHVQQLEKVFQILLQAGYVVSLKKSEIGQKTVEFLGFNITKEGRGLTDTFKTKLLNITPPKDLKQLQSILGLLNFARNFIPNFAELVQPLYNLIAPAKGKYIEWSEENTKQLNMVIEALNTASNLEERLPEQRLVIKVNTSPSAGYVRYYNETGKKPIMYLNYVFSKAELKFSMLEKLLTTMHKALIKAMDLAMGQEILVYSPIVSMTKIQKTPLPERKALPIRWITWMTYLEDPRIQFHYDKTLPELKHIPDVYTSSQSPVKHPSQYEGVFYTDGSAIKSPDPTKSNNAGMGIVHATYKPEYQVLNQWSIPLGNHTAQMAEIAAVEFACKKALKIPGPVLVITDSFYVAESANKELPYWKSNGFVNNKKKPLKHISKWKSIAECLSMKPDITIQHEKGISLQIPVFILKGNALADKLATQGSYVVNAGKRTADGSEFEKRTADGSEFESPKKKAKVE

SEQ ID NO: 1339 - protein, 2176 aa, synthetic construct
MPAAKRVKLDGGDKKYSIGLDIGTNSVGWAVITDEYKVPSKKFKVLGNTDRHSIKKNLIGALLFDSGETAEATRLKRTARRRYTRRKNRICYLQEIFSNEMAKVDDSFFHRLEESFLVEEDKKHERHPIFGNIVDEVAYHEKYPTIYHLRKKLVDSTDKADLRLIYLALAHMIKFRGHFLIEGDLNPDNSDVDKLFIQLVQTYNQLFEENPINASGVDAKAILSARLSKSRRLENLIAQLPGEKKNGLFGNLIALSLGLTPNFKSNFDLAEDAKLQLSKDTYDDDLDNLLAQIGDQYADLFLAAKNLSDAILLSDILRVNTEITKAPLSASMIKRYDEHHQDLTLLKALVRQQLPEKYKEIFFDQSKNGYAGYIDGGASQEEFYKFIKPILEKMDGTEELLVKLNREDLLRKQRTFDNGSIPHQIHLGELHAILRRQEDFYPFLKDNREKIEKILTFRIPYYVGPLARGNSRFAWMTRKSEETITPWNFEEVVDKGASAQSFIERMTNFDKNLPNEKVLPKHSLLYEYFTVYNELTKVKYVTEGMRKPAFLSGEQKKAIVDLLFKTNRKVTVKQLKEDYFKKIECFDSVEISGVEDRFNASLGTYHDLLKIIKDKDFLDNEENEDILEDIVLTLTLFEDREMIEERLKTYAHLFDDKVMKQLKRRRYTGWGRLSRKLINGIRDKQSGKTILDFLKSDGFANRNFMQLIHDDSLTFKEDIQKAQVSGQGDSLHEHIANLAGSPAIKKGILQTVKVVDELVKVMGRHKPENIVIEMARENQTTQKGQKNSRERMKRIEEGIKELGSQILKEHPVENTQLQNEKLYLYYLQNGRDMYVDQELDINRLSDYDVDHIVPQSFLKDDSIDNKVLTRSDKARGKSDNVPSEEVVKKMKNYWRQLLNAKLITQRKFDNLTKAERGGLSELDKAGFIKRQLVETRQITKHVAQILDSRMNTKYDENDKLIREVKVITLKSKLVSDFRKDFQFYKVREINNYHHAHDAYLNAVVGTALIKKYPKLESEFVYGDYKVYDVRKMIAKSEQEIGKATAKYFFYSNIMNFFKTEITLANGEIRKRPLIETNGETGEIVWDKGRDFATVRKVLSMPQVNIVKKTEVQTGGFSKESILPKRNSDKLIARKKDWDPKKYGGFDSPTVAYSVLVVAKVEKGKSKKLKSVKELLGITIMERSSFEKNPIDFLEAKGYKEVKKDLIIKLPKYSLFELENGRKRMLASAGELQKGNELALPSKYVNFLYLASHYEKLKGSPEDNEQKQLFVEQHKHYLDEIIEQISEFSKRVILADANLDKVLSAYNKHRDKPIREQAENIIHLFTLTNLGAPAAFKYFDTTIDRKRYTSTKEVLDATLIHQSITGLYETRIDLSQLGGDGGGGGEAAAKGSSGGMNPLQLLQPLPAEIKGTKLLAHWNSGATITCIPESFLEDEQPIKKTLIKTIHGEKQQNVYYVTFKVKGRKVEAEVIASPYEYILLSPTDVPWLTQQPLQLTILVPLQEYQEKILSKTALPEDQKQQLKTLFVKYDNLWQHWENQVGHRKIRPHNIATGDYPPRPQKQYPINPKAKPSIQIVIDDLLKQGVLTPQNSTMNTPVYPVPKPDGRWRMVLDYREVNKTIPLTAAQNQHSAGILATIVRQKYKTTLDLANGFWAHPITPESYWLTAFTWQGKQYCWTRLPQGFLNSPALFNADVVDLLKEIPNVQVYVDDIYLSHDDPKEHVQQLEKVFQILLQAGYVVSLKKSEIGQKTVEFLGFNITKEGRGLTDTFKTKLLNITPPKDLKQLQSILGLLNFARNFIPNFAELVQPLYNLIAPAKGKYIEWSEENTKQLNMVIEALNTASNLEERLPEQRLVIKVNTSPSAGYVRYYNETGKKPIMYLNYVFSKAELKFSMLEKLLTTMHKALIKAMDLAMGQEILVYSPIVSMTKIQKTPLPERKALPIRWITWMTYLEDPRIQFHYDKTLPELKHIPDVYTSSQSPVKHPSQYEGVFYTDGSAIKSPDPTKSNNAGMGIVHATYKPEYQVLNQWSIPLGNHTAQMAEIAAVEFACKKALKIPGPVLVITDSFYVAESANKELPYWKSNGFVNNKKKPLKHISKWKSIAECLSMKPDITIQHEKGISLQIPVFILKGNALADKLATQGSYVVNAGKRTADGSEFEKRTADGSEFESPKKKAKVE

SEQ ID NO: 1340 - protein, 2171 aa, synthetic construct
MPAAKRVKLDGGDKKYSIGLDIGTNSVGWAVITDEYKVPSKKFKVLGNTDRHSIKKNLIGALLFDSGETAEATRLKRTARRRYTRRKNRICYLQEIFSNEMAKVDDSFFHRLEESFLVEEDKKHERHPIFGNIVDEVAYHEKYPTIYHLRKKLVDSTDKADLRLIYLALAHMIKFRGHFLIEGDLNPDNSDVDKLFIQLVQTYNQLFEENPINASGVDAKAILSARLSKSRRLENLIAQLPGEKKNGLFGNLIALSLGLTPNFKSNFDLAEDAKLQLSKDTYDDDLDNLLAQIGDQYADLFLAAKNLSDAILLSDILRVNTEITKAPLSASMIKRYDEHHQDLTLLKALVRQQLPEKYKEIFFDQSKNGYAGYIDGGASQEEFYKFIKPILEKMDGTEELLVKLNREDLLRKQRTFDNGSIPHQIHLGELHAILRRQEDFYPFLKDNREKIEKILTFRIPYYVGPLARGNSRFAWMTRKSEETITPWNFEEVVDKGASAQSFIERMTNFDKNLPNEKVLPKHSLLYEYFTVYNELTKVKYVTEGMRKPAFLSGEQKKAIVDLLFKTNRKVTVKQLKEDYFKKIECFDSVEISGVEDRFNASLGTYHDLLKIIKDKDFLDNEENEDILEDIVLTLTLFEDREMIEERLKTYAHLFDDKVMKQLKRRRYTGWGRLSRKLINGIRDKQSGKTILDFLKSDGFANRNFMQLIHDDSLTFKEDIQKAQVSGQGDSLHEHIANLAGSPAIKKGILQTVKVVDELVKVMGRHKPENIVIEMARENQTTQKGQKNSRERMKRIEEGIKELGSQILKEHPVENTQLQNEKLYLYYLQNGRDMYVDQELDINRLSDYDVDHIVPQSFLKDDSIDNKVLTRSDKARGKSDNVPSEEVVKKMKNYWRQLLNAKLITQRKFDNLTKAERGGLSELDKAGFIKRQLVETRQITKHVAQILDSRMNTKYDENDKLIREVKVITLKSKLVSDFRKDFQFYKVREINNYHHAHDAYLNAVVGTALIKKYPKLESEFVYGDYKVYDVRKMIAKSEQEIGKATAKYFFYSNIMNFFKTEITLANGEIRKRPLIETNGETGEIVWDKGRDFATVRKVLSMPQVNIVKKTEVQTGGFSKESILPKRNSDKLIARKKDWDPKKYGGFDSPTVAYSVLVVAKVEKGKSKKLKSVKELLGITIMERSSFEKNPIDFLEAKGYKEVKKDLIIKLPKYSLFELENGRKRMLASAGELQKGNELALPSKYVNFLYLASHYEKLKGSPEDNEQKQLFVEQHKHYLDEIIEQISEFSKRVILADANLDKVLSAYNKHRDKPIREQAENIIHLFTLTNLGAPAAFKYFDTTIDRKRYTSTKEVLDATLIHQSITGLYETRIDLSQLGGDGGGSSGGGGGMNPLQLLQPLPAEIKGTKLLAHWNSGATITCIPESFLEDEQPIKKTLIKTIHGEKQQNVYYVTFKVKGRKVEAEVIASPYEYILLSPTDVPWLTQQPLQLTILVPLQEYQEKILSKTALPEDQKQQLKTLFVKYDNLWQHWENQVGHRKIRPHNIATGDYPPRPQKQYPINPKAKPSIQIVIDDLLKQGVLTPQNSTMNTPVYPVPKPDGRWRMVLDYREVNKTIPLTAAQNQHSAGILATIVRQKYKTTLDLANGFWAHPITPESYWLTAFTWQGKQYCWTRLPQGFLNSPALFNADVVDLLKEIPNVQVYVDDIYLSHDDPKEHVQQLEKVFQILLQAGYVVSLKKSEIGQKTVEFLGFNITKEGRGLTDTFKTKLLNITPPKDLKQLQSILGLLNFARNFIPNFAELVQPLYNLIAPAKGKYIEWSEENTKQLNMVIEALNTASNLEERLPEQRLVIKVNTSPSAGYVRYYNETGKKPIMYLNYVFSKAELKFSMLEKLLTTMHKALIKAMDLAMGQEILVYSPIVSMTKIQKTPLPERKALPIRWITWMTYLEDPRIQFHYDKTLPELKHIPDVYTSSQSPVKHPSQYEGVFYTDGSAIKSPDPTKSNNAGMGIVHATYKPEYQVLNQWSIPLGNHTAQMAEIAAVEFACKKALKIPGPVLVITDSFYVAESANKELPYWKSNGFVNNKKKPLKHISKWKSIAECLSMKPDITIQHEKGISLQIPVFILKGNALADKLATQGSYVVNAGKRTADGSEFEKRTADGSEFESPKKKAKVE

SEQ ID NO: 1341 - protein, 2171 aa, synthetic construct
MPAAKRVKLDGGDKKYSIGLDIGTNSVGWAVITDEYKVPSKKFKVLGNTDRHSIKKNLIGALLFDSGETAEATRLKRTARRRYTRRKNRICYLQEIFSNEMAKVDDSFFHRLEESFLVEEDKKHERHPIFGNIVDEVAYHEKYPTIYHLRKKLVDSTDKADLRLIYLALAHMIKFRGHFLIEGDLNPDNSDVDKLFIQLVQTYNQLFEENPINASGVDAKAILSARLSKSRRLENLIAQLPGEKKNGLFGNLIALSLGLTPNFKSNFDLAEDAKLQLSKDTYDDDLDNLLAQIGDQYADLFLAAKNLSDAILLSDILRVNTEITKAPLSASMIKRYDEHHQDLTLLKALVRQQLPEKYKEIFFDQSKNGYAGYIDGGASQEEFYKFIKPILEKMDGTEELLVKLNREDLLRKQRTFDNGSIPHQIHLGELHAILRRQEDFYPFLKDNREKIEKILTFRIPYYVGPLARGNSRFAWMTRKSEETITPWNFEEVVDKGASAQSFIERMTNFDKNLPNEKVLPKHSLLYEYFTVYNELTKVKYVTEGMRKPAFLSGEQKKAIVDLLFKTNRKVTVKQLKEDYFKKIECFDSVEISGVEDRFNASLGTYHDLLKIIKDKDFLDNEENEDILEDIVLTLTLFEDREMIEERLKTYAHLFDDKVMKQLKRRRYTGWGRLSRKLINGIRDKQSGKTILDFLKSDGFANRNFMQLIHDDSLTFKEDIQKAQVSGQGDSLHEHIANLAGSPAIKKGILQTVKVVDELVKVMGRHKPENIVIEMARENQTTQKGQKNSRERMKRIEEGIKELGSQILKEHPVENTQLQNEKLYLYYLQNGRDMYVDQELDINRLSDYDVDHIVPQSFLKDDSIDNKVLTRSDKARGKSDNVPSEEVVKKMKNYWRQLLNAKLITQRKFDNLTKAERGGLSELDKAGFIKRQLVETRQITKHVAQILDSRMNTKYDENDKLIREVKVITLKSKLVSDFRKDFQFYKVREINNYHHAHDAYLNAVVGTALIKKYPKLESEFVYGDYKVYDVRKMIAKSEQEIGKATAKYFFYSNIMNFFKTEITLANGEIRKRPLIETNGETGEIVWDKGRDFATVRKVLSMPQVNIVKKTEVQTGGFSKESILPKRNSDKLIARKKDWDPKKYGGFDSPTVAYSVLVVAKVEKGKSKKLKSVKELLGITIMERSSFEKNPIDFLEAKGYKEVKKDLIIKLPKYSLFELENGRKRMLASAGELQKGNELALPSKYVNFLYLASHYEKLKGSPEDNEQKQLFVEQHKHYLDEIIEQISEFSKRVILADANLDKVLSAYNKHRDKPIREQAENIIHLFTLTNLGAPAAFKYFDTTIDRKRYTSTKEVLDATLIHQSITGLYETRIDLSQLGGDGGGGGGGSGGMNPLQLLQPLPAEIKGTKLLAHWNSGATITCIPESFLEDEQPIKKTLIKTIHGEKQQNVYYVTFKVKGRKVEAEVIASPYEYILLSPTDVPWLTQQPLQLTILVPLQEYQEKILSKTALPEDQKQQLKTLFVKYDNLWQHWENQVGHRKIRPHNIATGDYPPRPQKQYPINPKAKPSIQIVIDDLLKQGVLTPQNSTMNTPVYPVPKPDGRWRMVLDYREVNKTIPLTAAQNQHSAGILATIVRQKYKTTLDLANGFWAHPITPESYWLTAFTWQGKQYCWTRLPQGFLNSPALFNADVVDLLKEIPNVQVYVDDIYLSHDDPKEHVQQLEKVFQILLQAGYVVSLKKSEIGQKTVEFLGFNITKEGRGLTDTFKTKLLNITPPKDLKQLQSILGLLNFARNFIPNFAELVQPLYNLIAPAKGKYIEWSEENTKQLNMVIEALNTASNLEERLPEQRLVIKVNTSPSAGYVRYYNETGKKPIMYLNYVFSKAELKFSMLEKLLTTMHKALIKAMDLAMGQEILVYSPIVSMTKIQKTPLPERKALPIRWITWMTYLEDPRIQFHYDKTLPELKHIPDVYTSSQSPVKHPSQYEGVFYTDGSAIKSPDPTKSNNAGMGIVHATYKPEYQVLNQWSIPLGNHTAQMAEIAAVEFACKKALKIPGPVLVITDSFYVAESANKELPYWKSNGFVNNKKKPLKHISKWKSIAECLSMKPDITIQHEKGISLQIPVFILKGNALADKLATQGSYVVNAGKRTADGSEFEKRTADGSEFESPKKKAKVE

SEQ ID NO: 1342 - protein, 2176 aa, synthetic construct
MPAAKRVKLDGGDKKYSIGLDIGTNSVGWAVITDEYKVPSKKFKVLGNTDRHSIKKNLIGALLFDSGETAEATRLKRTARRRYTRRKNRICYLQEIFSNEMAKVDDSFFHRLEESFLVEEDKKHERHPIFGNIVDEVAYHEKYPTIYHLRKKLVDSTDKADLRLIYLALAHMIKFRGHFLIEGDLNPDNSDVDKLFIQLVQTYNQLFEENPINASGVDAKAILSARLSKSRRLENLIAQLPGEKKNGLFGNLIALSLGLTPNFKSNFDLAEDAKLQLSKDTYDDDLDNLLAQIGDQYADLFLAAKNLSDAILLSDILRVNTEITKAPLSASMIKRYDEHHQDLTLLKALVRQQLPEKYKEIFFDQSKNGYAGYIDGGASQEEFYKFIKPILEKMDGTEELLVKLNREDLLRKQRTFDNGSIPHQIHLGELHAILRRQEDFYPFLKDNREKIEKILTFRIPYYVGPLARGNSRFAWMTRKSEETITPWNFEEVVDKGASAQSFIERMTNFDKNLPNEKVLPKHSLLYEYFTVYNELTKVKYVTEGMRKPAFLSGEQKKAIVDLLFKTNRKVTVKQLKEDYFKKIECFDSVEISGVEDRFNASLGTYHDLLKIIKDKDFLDNEENEDILEDIVLTLTLFEDREMIEERLKTYAHLFDDKVMKQLKRRRYTGWGRLSRKLINGIRDKQSGKTILDFLKSDGFANRNFMQLIHDDSLTFKEDIQKAQVSGQGDSLHEHIANLAGSPAIKKGILQTVKVVDELVKVMGRHKPENIVIEMARENQTTQKGQKNSRERMKRIEEGIKELGSQILKEHPVENTQLQNEKLYLYYLQNGRDMYVDQELDINRLSDYDVDHIVPQSFLKDDSIDNKVLTRSDKARGKSDNVPSEEVVKKMKNYWRQLLNAKLITQRKFDNLTKAERGGLSELDKAGFIKRQLVETRQITKHVAQILDSRMNTKYDENDKLIREVKVITLKSKLVSDFRKDFQFYKVREINNYHHAHDAYLNAVVGTALIKKYPKLESEFVYGDYKVYDVRKMIAKSEQEIGKATAKYFFYSNIMNFFKTEITLANGEIRKRPLIETNGETGEIVWDKGRDFATVRKVLSMPQVNIVKKTEVQTGGFSKESILPKRNSDKLIARKKDWDPKKYGGFDSPTVAYSVLVVAKVEKGKSKKLKSVKELLGITIMERSSFEKNPIDFLEAKGYKEVKKDLIIKLPKYSLFELENGRKRMLASAGELQKGNELALPSKYVNFLYLASHYEKLKGSPEDNEQKQLFVEQHKHYLDEIIEQISEFSKRVILADANLDKVLSAYNKHRDKPIREQAENIIHLFTLTNLGAPAAFKYFDTTIDRKRYTSTKEVLDATLIHQSITGLYETRIDLSQLGGDGGEAAAKGGGPAPGGMNPLQLLQPLPAEIKGTKLLAHWNSGATITCIPESFLEDEQPIKKTLIKTIHGEKQQNVYYVTFKVKGRKVEAEVIASPYEYILLSPTDVPWLTQQPLQLTILVPLQEYQEKILSKTALPEDQKQQLKTLFVKYDNLWQHWENQVGHRKIRPHNIATGDYPPRPQKQYPINPKAKPSIQIVIDDLLKQGVLTPQNSTMNTPVYPVPKPDGRWRMVLDYREVNKTIPLTAAQNQHSAGILATIVRQKYKTTLDLANGFWAHPITPESYWLTAFTWQGKQYCWTRLPQGFLNSPALFNADVVDLLKEIPNVQVYVDDIYLSHDDPKEHVQQLEKVFQILLQAGYVVSLKKSEIGQKTVEFLGFNITKEGRGLTDTFKTKLLNITPPKDLKQLQSILGLLNFARNFIPNFAELVQPLYNLIAPAKGKYIEWSEENTKQLNMVIEALNTASNLEERLPEQRLVIKVNTSPSAGYVRYYNETGKKPIMYLNYVFSKAELKFSMLEKLLTTMHKALIKAMDLAMGQEILVYSPIVSMTKIQKTPLPERKALPIRWITWMTYLEDPRIQFHYDKTLPELKHIPDVYTSSQSPVKHPSQYEGVFYTDGSAIKSPDPTKSNNAGMGIVHATYKPEYQVLNQWSIPLGNHTAQMAEIAAVEFACKKALKIPGPVLVITDSFYVAESANKELPYWKSNGFVNNKKKPLKHISKWKSIAECLSMKPDITIQHEKGISLQIPVFILKGNALADKLATQGSYVVNAGKRTADGSEFEKRTADGSEFESPKKKAKVE

SEQ ID NO: 1343 - protein, 2171 aa, synthetic construct
MPAAKRVKLDGGDKKYSIGLDIGTNSVGWAVITDEYKVPSKKFKVLGNTDRHSIKKNLIGALLFDSGETAEATRLKRTARRRYTRRKNRICYLQEIFSNEMAKVDDSFFHRLEESFLVEEDKKHERHPIFGNIVDEVAYHEKYPTIYHLRKKLVDSTDKADLRLIYLALAHMIKFRGHFLIEGDLNPDNSDVDKLFIQLVQTYNQLFEENPINASGVDAKAILSARLSKSRRLENLIAQLPGEKKNGLFGNLIALSLGLTPNFKSNFDLAEDAKLQLSKDTYDDDLDNLLAQIGDQYADLFLAAKNLSDAILLSDILRVNTEITKAPLSASMIKRYDEHHQDLTLLKALVRQQLPEKYKEIFFDQSKNGYAGYIDGGASQEEFYKFIKPILEKMDGTEELLVKLNREDLLRKQRTFDNGSIPHQIHLGELHAILRRQEDFYPFLKDNREKIEKILTFRIPYYVGPLARGNSRFAWMTRKSEETITPWNFEEVVDKGASAQSFIERMTNFDKNLPNEKVLPKHSLLYEYFTVYNELTKVKYVTEGMRKPAFLSGEQKKAIVDLLFKTNRKVTVKQLKEDYFKKIECFDSVEISGVEDRFNASLGTYHDLLKIIKDKDFLDNEENEDILEDIVLTLTLFEDREMIEERLKTYAHLFDDKVMKQLKRRRYTGWGRLSRKLINGIRDKQSGKTILDFLKSDGFANRNFMQLIHDDSLTFKEDIQKAQVSGQGDSLHEHIANLAGSPAIKKGILQTVKVVDELVKVMGRHKPENIVIEMARENQTTQKGQKNSRERMKRIEEGIKELGSQILKEHPVENTQLQNEKLYLYYLQNGRDMYVDQELDINRLSDYDVDHIVPQSFLKDDSIDNKVLTRSDKARGKSDNVPSEEVVKKMKNYWRQLLNAKLITQRKFDNLTKAERGGLSELDKAGFIKRQLVETRQITKHVAQILDSRMNTKYDENDKLIREVKVITLKSKLVSDFRKDFQFYKVREINNYHHAHDAYLNAVVGTALIKKYPKLESEFVYGDYKVYDVRKMIAKSEQEIGKATAKYFFYSNIMNFFKTEITLANGEIRKRPLIETNGETGEIVWDKGRDFATVRKVLSMPQVNIVKKTEVQTGGFSKESILPKRNSDKLIARKKDWDPKKYGGFDSPTVAYSVLVVAKVEKGKSKKLKSVKELLGITIMERSSFEKNPIDFLEAKGYKEVKKDLIIKLPKYSLFELENGRKRMLASAGELQKGNELALPSKYVNFLYLASHYEKLKGSPEDNEQKQLFVEQHKHYLDEIIEQISEFSKRVILADANLDKVLSAYNKHRDKPIREQAENIIHLFTLTNLGAPAAFKYFDTTIDRKRYTSTKEVLDATLIHQSITGLYETRIDLSQLGGDGGGGGGSSGGMNPLQLLQPLPAEIKGTKLLAHWNSGATITCIPESFLEDEQPIKKTLIKTIHGEKQQNVYYVTFKVKGRKVEAEVIASPYEYILLSPTDVPWLTQQPLQLTILVPLQEYQEKILSKTALPEDQKQQLKTLFVKYDNLWQHWENQVGHRKIRPHNIATGDYPPRPQKQYPINPKAKPSIQIVIDDLLKQGVLTPQNSTMNTPVYPVPKPDGRWRMVLDYREVNKTIPLTAAQNQHSAGILATIVRQKYKTTLDLANGFWAHPITPESYWLTAFTWQGKQYCWTRLPQGFLNSPALFNADVVDLLKEIPNVQVYVDDIYLSHDDPKEHVQQLEKVFQILLQAGYVVSLKKSEIGQKTVEFLGFNITKEGRGLTDTFKTKLLNITPPKDLKQLQSILGLLNFARNFIPNFAELVQPLYNLIAPAKGKYIEWSEENTKQLNMVIEALNTASNLEERLPEQRLVIKVNTSPSAGYVRYYNETGKKPIMYLNYVFSKAELKFSMLEKLLTTMHKALIKAMDLAMGQEILVYSPIVSMTKIQKTPLPERKALPIRWITWMTYLEDPRIQFHYDKTLPELKHIPDVYTSSQSPVKHPSQYEGVFYTDGSAIKSPDPTKSNNAGMGIVHATYKPEYQVLNQWSIPLGNHTAQMAEIAAVEFACKKALKIPGPVLVITDSFYVAESANKELPYWKSNGFVNNKKKPLKHISKWKSIAECLSMKPDITIQHEKGISLQIPVFILKGNALADKLATQGSYVVNAGKRTADGSEFEKRTADGSEFESPKKKAKVE

SEQ ID NO: 1344 - protein, 2174 aa, synthetic construct
MPAAKRVKLDGGDKKYSIGLDIGTNSVGWAVITDEYKVPSKKFKVLGNTDRHSIKKNLIGALLFDSGETAEATRLKRTARRRYTRRKNRICYLQEIFSNEMAKVDDSFFHRLEESFLVEEDKKHERHPIFGNIVDEVAYHEKYPTIYHLRKKLVDSTDKADLRLIYLALAHMIKFRGHFLIEGDLNPDNSDVDKLFIQLVQTYNQLFEENPINASGVDAKAILSARLSKSRRLENLIAQLPGEKKNGLFGNLIALSLGLTPNFKSNFDLAEDAKLQLSKDTYDDDLDNLLAQIGDQYADLFLAAKNLSDAILLSDILRVNTEITKAPLSASMIKRYDEHHQDLTLLKALVRQQLPEKYKEIFFDQSKNGYAGYIDGGASQEEFYKFIKPILEKMDGTEELLVKLNREDLLRKQRTFDNGSIPHQIHLGELHAILRRQEDFYPFLKDNREKIEKILTFRIPYYVGPLARGNSRFAWMTRKSEETITPWNFEEVVDKGASAQSFIERMTNFDKNLPNEKVLPKHSLLYEYFTVYNELTKVKYVTEGMRKPAFLSGEQKKAIVDLLFKTNRKVTVKQLKEDYFKKIECFDSVEISGVEDRFNASLGTYHDLLKIIKDKDFLDNEENEDILEDIVLTLTLFEDREMIEERLKTYAHLFDDKVMKQLKRRRYTGWGRLSRKLINGIRDKQSGKTILDFLKSDGFANRNFMQLIHDDSLTFKEDIQKAQVSGQGDSLHEHIANLAGSPAIKKGILQTVKVVDELVKVMGRHKPENIVIEMARENQTTQKGQKNSRERMKRIEEGIKELGSQILKEHPVENTQLQNEKLYLYYLQNGRDMYVDQELDINRLSDYDVDHIVPQSFLKDDSIDNKVLTRSDKARGKSDNVPSEEVVKKMKNYWRQLLNAKLITQRKFDNLTKAERGGLSELDKAGFIKRQLVETRQITKHVAQILDSRMNTKYDENDKLIREVKVITLKSKLVSDFRKDFQFYKVREINNYHHAHDAYLNAVVGTALIKKYPKLESEFVYGDYKVYDVRKMIAKSEQEIGKATAKYFFYSNIMNFFKTEITLANGEIRKRPLIETNGETGEIVWDKGRDFATVRKVLSMPQVNIVKKTEVQTGGFSKESILPKRNSDKLIARKKDWDPKKYGGFDSPTVAYSVLVVAKVEKGKSKKLKSVKELLGITIMERSSFEKNPIDFLEAKGYKEVKKDLIIKLPKYSLFELENGRKRMLASAGELQKGNELALPSKYVNFLYLASHYEKLKGSPEDNEQKQLFVEQHKHYLDEIIEQISEFSKRVILADANLDKVLSAYNKHRDKPIREQAENIIHLFTLTNLGAPAAFKYFDTTIDRKRYTSTKEVLDATLIHQSITGLYETRIDLSQLGGDGGGSSGSSGSSGGMNPLQLLQPLPAEIKGTKLLAHWNSGATITCIPESFLEDEQPIKKTLIKTIHGEKQQNVYYVTFKVKGRKVEAEVIASPYEYILLSPTDVPWLTQQPLQLTILVPLQEYQEKILSKTALPEDQKQQLKTLFVKYDNLWQHWENQVGHRKIRPHNIATGDYPPRPQKQYPINPKAKPSIQIVIDDLLKQGVLTPQNSTMNTPVYPVPKPDGRWRMVLDYREVNKTIPLTAAQNQHSAGILATIVRQKYKTTLDLANGFWAHPITPESYWLTAFTWQGKQYCWTRLPQGFLNSPALFNADVVDLLKEIPNVQVYVDDIYLSHDDPKEHVQQLEKVFQILLQAGYVVSLKKSEIGQKTVEFLGFNITKEGRGLTDTFKTKLLNITPPKDLKQLQSILGLLNFARNFIPNFAELVQPLYNLIAPAKGKYIEWSEENTKQLNMVIEALNTASNLEERLPEQRLVIKVNTSPSAGYVRYYNETGKKPIMYLNYVFSKAELKFSMLEKLLTTMHKALIKAMDLAMGQEILVYSPIVSMTKIQKTPLPERKALPIRWITWMTYLEDPRIQFHYDKTLPELKHIPDVYTSSQSPVKHPSQYEGVFYTDGSAIKSPDPTKSNNAGMGIVHATYKPEYQVLNQWSIPLGNHTAQMAEIAAVEFACKKALKIPGPVLVITDSFYVAESANKELPYWKSNGFVNNKKKPLKHISKWKSIAECLSMKPDITIQHEKGISLQIPVFILKGNALADKLATQGSYVVNAGKRTADGSEFEKRTADGSEFESPKKKAKVE

SEQ ID NO: 1345 - protein, 2171 aa, synthetic construct
MPAAKRVKLDGGDKKYSIGLDIGTNSVGWAVITDEYKVPSKKFKVLGNTDRHSIKKNLIGALLFDSGETAEATRLKRTARRRYTRRKNRICYLQEIFSNEMAKVDDSFFHRLEESFLVEEDKKHERHPIFGNIVDEVAYHEKYPTIYHLRKKLVDSTDKADLRLIYLALAHMIKFRGHFLIEGDLNPDNSDVDKLFIQLVQTYNQLFEENPINASGVDAKAILSARLSKSRRLENLIAQLPGEKKNGLFGNLIALSLGLTPNFKSNFDLAEDAKLQLSKDTYDDDLDNLLAQIGDQYADLFLAAKNLSDAILLSDILRVNTEITKAPLSASMIKRYDEHHQDLTLLKALVRQQLPEKYKEIFFDQSKNGYAGYIDGGASQEEFYKFIKPILEKMDGTEELLVKLNREDLLRKQRTFDNGSIPHQIHLGELHAILRRQEDFYPFLKDNREKIEKILTFRIPYYVGPLARGNSRFAWMTRKSEETITPWNFEEVVDKGASAQSFIERMTNFDKNLPNEKVLPKHSLLYEYFTVYNELTKVKYVTEGMRKPAFLSGEQKKAIVDLLFKTNRKVTVKQLKEDYFKKIECFDSVEISGVEDRFNASLGTYHDLLKIIKDKDFLDNEENEDILEDIVLTLTLFEDREMIEERLKTYAHLFDDKVMKQLKRRRYTGWGRLSRKLINGIRDKQSGKTILDFLKSDGFANRNFMQLIHDDSLTFKEDIQKAQVSGQGDSLHEHIANLAGSPAIKKGILQTVKVVDELVKVMGRHKPENIVIEMARENQTTQKGQKNSRERMKRIEEGIKELGSQILKEHPVENTQLQNEKLYLYYLQNGRDMYVDQELDINRLSDYDVDHIVPQSFLKDDSIDNKVLTRSDKARGKSDNVPSEEVVKKMKNYWRQLLNAKLITQRKFDNLTKAERGGLSELDKAGFIKRQLVETRQITKHVAQILDSRMNTKYDENDKLIREVKVITLKSKLVSDFRKDFQFYKVREINNYHHAHDAYLNAVVGTALIKKYPKLESEFVYGDYKVYDVRKMIAKSEQEIGKATAKYFFYSNIMNFFKTEITLANGEIRKRPLIETNGETGEIVWDKGRDFATVRKVLSMPQVNIVKKTEVQTGGFSKESILPKRNSDKLIARKKDWDPKKYGGFDSPTVAYSVLVVAKVEKGKSKKLKSVKELLGITIMERSSFEKNPIDFLEAKGYKEVKKDLIIKLPKYSLFELENGRKRMLASAGELQKGNELALPSKYVNFLYLASHYEKLKGSPEDNEQKQLFVEQHKHYLDEIIEQISEFSKRVILADANLDKVLSAYNKHRDKPIREQAENIIHLFTLTNLGAPAAFKYFDTTIDRKRYTSTKEVLDATLIHQSITGLYETRIDLSQLGGDGGPAPGGGGGMNPLQLLQPLPAEIKGTKLLAHWNSGATITCIPESFLEDEQPIKKTLIKTIHGEKQQNVYYVTFKVKGRKVEAEVIASPYEYILLSPTDVPWLTQQPLQLTILVPLQEYQEKILSKTALPEDQKQQLKTLFVKYDNLWQHWENQVGHRKIRPHNIATGDYPPRPQKQYPINPKAKPSIQIVIDDLLKQGVLTPQNSTMNTPVYPVPKPDGRWRMVLDYREVNKTIPLTAAQNQHSAGILATIVRQKYKTTLDLANGFWAHPITPESYWLTAFTWQGKQYCWTRLPQGFLNSPALFNADVVDLLKEIPNVQVYVDDIYLSHDDPKEHVQQLEKVFQILLQAGYVVSLKKSEIGQKTVEFLGFNITKEGRGLTDTFKTKLLNITPPKDLKQLQSILGLLNFARNFIPNFAELVQPLYNLIAPAKGKYIEWSEENTKQLNMVIEALNTASNLEERLPEQRLVIKVNTSPSAGYVRYYNETGKKPIMYLNYVFSKAELKFSMLEKLLTTMHKALIKAMDLAMGQEILVYSPIVSMTKIQKTPLPERKALPIRWITWMTYLEDPRIQFHYDKTLPELKHIPDVYTSSQSPVKHPSQYEGVFYTDGSAIKSPDPTKSNNAGMGIVHATYKPEYQVLNQWSIPLGNHTAQMAEIAAVEFACKKALKIPGPVLVITDSFYVAESANKELPYWKSNGFVNNKKKPLKHISKWKSIAECLSMKPDITIQHEKGISLQIPVFILKGNALADKLATQGSYVVNAGKRTADGSEFEKRTADGSEFESPKKKAKVE

SEQ ID NO: 1346 - protein, 2195 aa, synthetic construct
MPAAKRVKLDGGDKKYSIGLDIGTNSVGWAVITDEYKVPSKKFKVLGNTDRHSIKKNLIGALLFDSGETAEATRLKRTARRRYTRRKNRICYLQEIFSNEMAKVDDSFFHRLEESFLVEEDKKHERHPIFGNIVDEVAYHEKYPTIYHLRKKLVDSTDKADLRLIYLALAHMIKFRGHFLIEGDLNPDNSDVDKLFIQLVQTYNQLFEENPINASGVDAKAILSARLSKSRRLENLIAQLPGEKKNGLFGNLIALSLGLTPNFKSNFDLAEDAKLQLSKDTYDDDLDNLLAQIGDQYADLFLAAKNLSDAILLSDILRVNTEITKAPLSASMIKRYDEHHQDLTLLKALVRQQLPEKYKEIFFDQSKNGYAGYIDGGASQEEFYKFIKPILEKMDGTEELLVKLNREDLLRKQRTFDNGSIPHQIHLGELHAILRRQEDFYPFLKDNREKIEKILTFRIPYYVGPLARGNSRFAWMTRKSEETITPWNFEEVVDKGASAQSFIERMTNFDKNLPNEKVLPKHSLLYEYFTVYNELTKVKYVTEGMRKPAFLSGEQKKAIVDLLFKTNRKVTVKQLKEDYFKKIECFDSVEISGVEDRFNASLGTYHDLLKIIKDKDFLDNEENEDILEDIVLTLTLFEDREMIEERLKTYAHLFDDKVMKQLKRRRYTGWGRLSRKLINGIRDKQSGKTILDFLKSDGFANRNFMQLIHDDSLTFKEDIQKAQVSGQGDSLHEHIANLAGSPAIKKGILQTVKVVDELVKVMGRHKPENIVIEMARENQTTQKGQKNSRERMKRIEEGIKELGSQILKEHPVENTQLQNEKLYLYYLQNGRDMYVDQELDINRLSDYDVDHIVPQSFLKDDSIDNKVLTRSDKARGKSDNVPSEEVVKKMKNYWRQLLNAKLITQRKFDNLTKAERGGLSELDKAGFIKRQLVETRQITKHVAQILDSRMNTKYDENDKLIREVKVITLKSKLVSDFRKDFQFYKVREINNYHHAHDAYLNAVVGTALIKKYPKLESEFVYGDYKVYDVRKMIAKSEQEIGKATAKYFFYSNIMNFFKTEITLANGEIRKRPLIETNGETGEIVWDKGRDFATVRKVLSMPQVNIVKKTEVQTGGFSKESILPKRNSDKLIARKKDWDPKKYGGFDSPTVAYSVLVVAKVEKGKSKKLKSVKELLGITIMERSSFEKNPIDFLEAKGYKEVKKDLIIKLPKYSLFELENGRKRMLASAGELQKGNELALPSKYVNFLYLASHYEKLKGSPEDNEQKQLFVEQHKHYLDEIIEQISEFSKRVILADANLDKVLSAYNKHRDKPIREQAENIIHLFTLTNLGAPAAFKYFDTTIDRKRYTSTKEVLDATLIHQSITGLYETRIDLSQLGGDGGEAAAKEAAAKEAAAKEAAAKEAAAKEAAAKGGMNPLQLLQPLPAEIKGTKLLAHWNSGATITCIPESFLEDEQPIKKTLIKTIHGEKQQNVYYVTFKVKGRKVEAEVIASPYEYILLSPTDVPWLTQQPLQLTILVPLQEYQEKILSKTALPEDQKQQLKTLFVKYDNLWQHWENQVGHRKIRPHNIATGDYPPRPQKQYPINPKAKPSIQIVIDDLLKQGVLTPQNSTMNTPVYPVPKPDGRWRMVLDYREVNKTIPLTAAQNQHSAGILATIVRQKYKTTLDLANGFWAHPITPESYWLTAFTWQGKQYCWTRLPQGFLNSPALFNADVVDLLKEIPNVQVYVDDIYLSHDDPKEHVQQLEKVFQILLQAGYVVSLKKSEIGQKTVEFLGFNITKEGRGLTDTFKTKLLNITPPKDLKQLQSILGKLNFARNFIPNFAELVQPLYNLIAPAKGKYIEWSEENTKQLNMVIEALNTASNLEERLPEQRLVIKVNTSPSAGYVRYYNETGKKPIMYLNYVFSKAELKFSMLEKLLTTMHKALIKAMDLAMGQEILVYSPIVSMTKIQKTPLPERKALPIRWITWMTYLEDPRIQFHYDKTLPELKHIPDVYTSSQSPVKHPSQYEGVFYTDGSAIKSPDPTKSNNAGMGIVHATYKPEYQVLNQWSIPLGNHTAQMAEIAAVEFACKKALKIPGPVLVITDSFYVAESANKELPYWKSNGFVNNKKKPLKHISKWKSIAECLSMKPDITIQHEKGISLQIPVFILKGNALADKLATQGSYVVNAGKRTADGSEFEKRTADGSEFESPKKKAKVE

SEQ ID NO: 1347 - protein, 2185 aa, synthetic construct
MPAAKRVKLDGGDKKYSIGLDIGTNSVGWAVITDEYKVPSKKFKVLGNTDRHSIKKNLIGALLFDSGETAEATRLKRTARRRYTRRKNRICYLQEIFSNEMAKVDDSFFHRLEESFLVEEDKKHERHPIFGNIVDEVAYHEKYPTIYHLRKKLVDSTDKADLRLIYLALAHMIKFRGHFLIEGDLNPDNSDVDKLFIQLVQTYNQLFEENPINASGVDAKAILSARLSKSRRLENLIAQLPGEKKNGLFGNLIALSLGLTPNFKSNFDLAEDAKLQLSKDTYDDDLDNLLAQIGDQYADLFLAAKNLSDAILLSDILRVNTEITKAPLSASMIKRYDEHHQDLTLLKALVRQQLPEKYKEIFFDQSKNGYAGYIDGGASQEEFYKFIKPILEKMDGTEELLVKLNREDLLRKQRTFDNGSIPHQIHLGELHAILRRQEDFYPFLKDNREKIEKILTFRIPYYVGPLARGNSRFAWMTRKSEETITPWNFEEVVDKGASAQSFIERMTNFDKNLPNEKVLPKHSLLYEYFTVYNELTKVKYVTEGMRKPAFLSGEQKKAIVDLLFKTNRKVTVKQLKEDYFKKIECFDSVEISGVEDRFNASLGTYHDLLKIIKDKDFLDNEENEDILEDIVLTLTLFEDREMIEERLKTYAHLFDDKVMKQLKRRRYTGWGRLSRKLINGIRDKQSGKTILDFLKSDGFANRNFMQLIHDDSLTFKEDIQKAQVSGQGDSLHEHIANLAGSPAIKKGILQTVKVVDELVKVMGRHKPENIVIEMARENQTTQKGQKNSRERMKRIEEGIKELGSQILKEHPVENTQLQNEKLYLYYLQNGRDMYVDQELDINRLSDYDVDHIVPQSFLKDDSIDNKVLTRSDKARGKSDNVPSEEVVKKMKNYWRQLLNAKLITQRKFDNLTKAERGGLSELDKAGFIKRQLVETRQITKHVAQILDSRMNTKYDENDKLIREVKVITLKSKLVSDFRKDFQFYKVREINNYHHAHDAYLNAVVGTALIKKYPKLESEFVYGDYKVYDVRKMIAKSEQEIGKATAKYFFYSNIMNFFKTEITLANGEIRKRPLIETNGETGEIVWDKGRDFATVRKVLSMPQVNIVKKTEVQTGGFSKESILPKRNSDKLIARKKDWDPKKYGGFDSPTVAYSVLVVAKVEKGKSKKLKSVKELLGITIMERSSFEKNPIDFLEAKGYKEVKKDLIIKLPKYSLFELENGRKRMLASAGELQKGNELALPSKYVNFLYLASHYEKLKGSPEDNEQKQLFVEQHKHYLDEIIEQISEFSKRVILADANLDKVLSAYNKHRDKPIREQAENIIHLFTLTNLGAPAAFKYFDTTIDRKRYTSTKEVLDATLIHQSITGLYETRIDLSQLGGDGGEAAAKEAAAKEAAAKEAAAKGGMNPLQLLQPLPAEIKGTKLLAHWNSGATITCIPESFLEDEQPIKKTLIKTIHGEKQQNVYYVTFKVKGRKVEAEVIASPYEYILLSPTDVPWLTQQPLQLTILVPLQEYQEKILSKTALPEDQKQQLKTLFVKYDNLWQHWENQVGHRKIRPHNIATGDYPPRPQKQYPINPKAKPSIQIVIDDLLKQGVLTPQNSTMNTPVYPVPKPDGRWRMVLDYREVNKTIPLTAAQNQHSAGILATIVRQKYKTTLDLANGFWAHPITPESYWLTAFTWQGKQYCWTRLPQGFLNSPALFNADVVDLLKEIPNVQVYVDDIYLSHDDPKEHVQQLEKVFQILLQAGYVVSLKKSEIGQKTVEFLGFNITKEGRGLTDTFKTKLLNITPPKDLKQLQSILGKLNFARNFIPNFAELVQPLYNLIAPAKGKYIEWSEENTKQLNMVIEALNTASNLEERLPEQRLVIKVNTSPSAGYVRYYNETGKKPIMYLNYVFSKAELKFSMLEKLLTTMHKALIKAMDLAMGQEILVYSPIVSMTKIQKTPLPERKALPIRWITWMTYLEDPRIQFHYDKTLPELKHIPDVYTSSQSPVKHPSQYEGVFYTDGSAIKSPDPTKSNNAGMGIVHATYKPEYQVLNQWSIPLGNHTAQMAEIAAVEFACKKALKIPGPVLVITDSFYVAESANKELPYWKSNGFVNNKKKPLKHISKWKSIAECLSMKPDITIQHEKGISLQIPVFILKGNALADKLATQGSYVVNAGKRTADGSEFEKRTADGSEFESPKKKAKVE

SEQ ID NO: 1348 - protein, 2176 aa, synthetic construct
MPAAKRVKLDGGDKKYSIGLDIGTNSVGWAVITDEYKVPSKKFKVLGNTDRHSIKKNLIGALLFDSGETAEATRLKRTARRRYTRRKNRICYLQEIFSNEMAKVDDSFFHRLEESFLVEEDKKHERHPIFGNIVDEVAYHEKYPTIYHLRKKLVDSTDKADLRLIYLALAHMIKFRGHFLIEGDLNPDNSDVDKLFIQLVQTYNQLFEENPINASGVDAKAILSARLSKSRRLENLIAQLPGEKKNGLFGNLIALSLGLTPNFKSNFDLAEDAKLQLSKDTYDDDLDNLLAQIGDQYADLFLAAKNLSDAILLSDILRVNTEITKAPLSASMIKRYDEHHQDLTLLKALVRQQLPEKYKEIFFDQSKNGYAGYIDGGASQEEFYKFIKPILEKMDGTEELLVKLNREDLLRKQRTFDNGSIPHQIHLGELHAILRRQEDFYPFLKDNREKIEKILTFRIPYYVGPLARGNSRFAWMTRKSEETITPWNFEEVVDKGASAQSFIERMTNFDKNLPNEKVLPKHSLLYEYFTVYNELTKVKYVTEGMRKPAFLSGEQKKAIVDLLFKTNRKVTVKQLKEDYFKKIECFDSVEISGVEDRFNASLGTYHDLLKIIKDKDFLDNEENEDILEDIVLTLTLFEDREMIEERLKTYAHLFDDKVMKQLKRRRYTGWGRLSRKLINGIRDKQSGKTILDFLKSDGFANRNFMQLIHDDSLTFKEDIQKAQVSGQGDSLHEHIANLAGSPAIKKGILQTVKVVDELVKVMGRHKPENIVIEMARENQTTQKGQKNSRERMKRIEEGIKELGSQILKEHPVENTQLQNEKLYLYYLQNGRDMYVDQELDINRLSDYDVDHIVPQSFLKDDSIDNKVLTRSDKARGKSDNVPSEEVVKKMKNYWRQLLNAKLITQRKFDNLTKAERGGLSELDKAGFIKRQLVETRQITKHVAQILDSRMNTKYDENDKLIREVKVITLKSKLVSDFRKDFQFYKVREINNYHHAHDAYLNAVVGTALIKKYPKLESEFVYGDYKVYDVRKMIAKSEQEIGKATAKYFFYSNIMNFFKTEITLANGEIRKRPLIETNGETGEIVWDKGRDFATVRKVLSMPQVNIVKKTEVQTGGFSKESILPKRNSDKLIARKKDWDPKKYGGFDSPTVAYSVLVVAKVEKGKSKKLKSVKELLGITIMERSSFEKNPIDFLEAKGYKEVKKDLIIKLPKYSLFELENGRKRMLASAGELQKGNELALPSKYVNFLYLASHYEKLKGSPEDNEQKQLFVEQHKHYLDEIIEQISEFSKRVILADANLDKVLSAYNKHRDKPIREQAENIIHLFTLTNLGAPAAFKYFDTTIDRKRYTSTKEVLDATLIHQSITGLYETRIDLSQLGGDGGGGSPAPEAAAKGGMNPLQLLQPLPAEIKGTKLLAHWNSGATITCIPESFLEDEQPIKKTLIKTIHGEKQQNVYYVTFKVKGRKVEAEVIASPYEYILLSPTDVPWLTQQPLQLTILVPLQEYQEKILSKTALPEDQKQQLKTLFVKYDNLWQHWENQVGHRKIRPHNIATGDYPPRPQKQYPINPKAKPSIQIVIDDLLKQGVLTPQNSTMNTPVYPVPKPDGRWRMVLDYREVNKTIPLTAAQNQHSAGILATIVRQKYKTTLDLANGFWAHPITPESYWLTAFTWQGKQYCWTRLPQGFLNSPALFNADVVDLLKEIPNVQVYVDDIYLSHDDPKEHVQQLEKVFQILLQAGYVVSLKKSEIGQKTVEFLGFNITKEGRGLTDTFKTKLLNITPPKDLKQLQSILGKLNFARNFIPNFAELVQPLYNLIAPAKGKYIEWSEENTKQLNMVIEALNTASNLEERLPEQRLVIKVNTSPSAGYVRYYNETGKKPIMYLNYVFSKAELKFSMLEKLLTTMHKALIKAMDLAMGQEILVYSPIVSMTKIQKTPLPERKALPIRWITWMTYLEDPRIQFHYDKTLPELKHIPDVYTSSQSPVKHPSQYEGVFYTDGSAIKSPDPTKSNNAGMGIVHATYKPEYQVLNQWSIPLGNHTAQMAEIAAVEFACKKALKIPGPVLVITDSFYVAESANKELPYWKSNGFVNNKKKPLKHISKWKSIAECLSMKPDITIQHEKGISLQIPVFILKGNALADKLATQGSYVVNAGKRTADGSEFEKRTADGSEFESPKKKAKVE

SEQ ID NO: 1349 - protein, 2177 aa, synthetic construct
MPAAKRVKLDGGDKKYSIGLDIGTNSVGWAVITDEYKVPSKKFKVLGNTDRHSIKKNLIGALLFDSGETAEATRLKRTARRRYTRRKNRICYLQEIFSNEMAKVDDSFFHRLEESFLVEEDKKHERHPIFGNIVDEVAYHEKYPTIYHLRKKLVDSTDKADLRLIYLALAHMIKFRGHFLIEGDLNPDNSDVDKLFIQLVQTYNQLFEENPINASGVDAKAILSARLSKSRRLENLIAQLPGEKKNGLFGNLIALSLGLTPNFKSNFDLAEDAKLQLSKDTYDDDLDNLLAQIGDQYADLFLAAKNLSDAILLSDILRVNTEITKAPLSASMIKRYDEHHQDLTLLKALVRQQLPEKYKEIFFDQSKNGYAGYIDGGASQEEFYKFIKPILEKMDGTEELLVKLNREDLLRKQRTFDNGSIPHQIHLGELHAILRRQEDFYPFLKDNREKIEKILTFRIPYYVGPLARGNSRFAWMTRKSEETITPWNFEEVVDKGASAQSFIERMTNFDKNLPNEKVLPKHSLLYEYFTVYNELTKVKYVTEGMRKPAFLSGEQKKAIVDLLFKTNRKVTVKQLKEDYFKKIECFDSVEISGVEDRFNASLGTYHDLLKIIKDKDFLDNEENEDILEDIVLTLTLFEDREMIEERLKTYAHLFDDKVMKQLKRRRYTGWGRLSRKLINGIRDKQSGKTILDFLKSDGFANRNFMQLIHDDSLTFKEDIQKAQVSGQGDSLHEHIANLAGSPAIKKGILQTVKVVDELVKVMGRHKPENIVIEMARENQTTQKGQKNSRERMKRIEEGIKELGSQILKEHPVENTQLQNEKLYLYYLQNGRDMYVDQELDINRLSDYDVDHIVPQSFLKDDSIDNKVLTRSDKARGKSDNVPSEEVVKKMKNYWRQLLNAKLITQRKFDNLTKAERGGLSELDKAGFIKRQLVETRQITKHVAQILDSRMNTKYDENDKLIREVKVITLKSKLVSDFRKDFQFYKVREINNYHHAHDAYLNAVVGTALIKKYPKLESEFVYGDYKVYDVRKMIAKSEQEIGKATAKYFFYSNIMNFFKTEITLANGEIRKRPLIETNGETGEIVWDKGRDFATVRKVLSMPQVNIVKKTEVQTGGFSKESILPKRNSDKLIARKKDWDPKKYGGFDSPTVAYSVLVVAKVEKGKSKKLKSVKELLGITIMERSSFEKNPIDFLEAKGYKEVKKDLIIKLPKYSLFELENGRKRMLASAGELQKGNELALPSKYVNFLYLASHYEKLKGSPEDNEQKQLFVEQHKHYLDEIIEQISEFSKRVILADANLDKVLSAYNKHRDKPIREQAENIIHLFTLTNLGAPAAFKYFDTTIDRKRYTSTKEVLDATLIHQSITGLYETRIDLSQLGGDGGGSAGSAAGSGEFGGMNPLQLLQPLPAEIKGTKLLAHWNSGATITCIPESFLEDEQPIKKTLIKTIHGEKQQNVYYVTFKVKGRKVEAEVIASPYEYILLSPTDVPWLTQQPLQLTILVPLQEYQEKILSKTALPEDQKQQLKTLFVKYDNLWQHWENQVGHRKIRPHNIATGDYPPRPQKQYPINPKAKPSIQIVIDDLLKQGVLTPQNSTMNTPVYPVPKPDGRWRMVLDYREVNKTIPLTAAQNQHSAGILATIVRQKYKTTLDLANGFWAHPITPESYWLTAFTWQGKQYCWTRLPQGFLNSPALFNADVVDLLKEIPNVQVYVDDIYLSHDDPKEHVQQLEKVFQILLQAGYVVSLKKSEIGQKTVEFLGFNITKEGRGLTDTFKTKLLNITPPKDLKQLQSILGKLNFARNFIPNFAELVQPLYNLIAPAKGKYIEWSEENTKQLNMVIEALNTASNLEERLPEQRLVIKVNTSPSAGYVRYYNETGKKPIMYLNYVFSKAELKFSMLEKLLTTMHKALIKAMDLAMGQEILVYSPIVSMTKIQKTPLPERKALPIRWITWMTYLEDPRIQFHYDKTLPELKHIPDVYTSSQSPVKHPSQYEGVFYTDGSAIKSPDPTKSNNAGMGIVHATYKPEYQVLNQWSIPLGNHTAQMAEIAAVEFACKKALKIPGPVLVITDSFYVAESANKELPYWKSNGFVNNKKKPLKHISKWKSIAECLSMKPDITIQHEKGISLQIPVFILKGNALADKLATQGSYVVNAGKRTADGSEFEKRTADGSEFESPKKKAKVE

SEQ ID NO: 1350 - protein, 2173 aa, synthetic construct
MPAAKRVKLDGGDKKYSIGLDIGTNSVGWAVITDEYKVPSKKFKVLGNTDRHSIKKNLIGALLFDSGETAEATRLKRTARRRYTRRKNRICYLQEIFSNEMAKVDDSFFHRLEESFLVEEDKKHERHPIFGNIVDEVAYHEKYPTIYHLRKKLVDSTDKADLRLIYLALAHMIKFRGHFLIEGDLNPDNSDVDKLFIQLVQTYNQLFEENPINASGVDAKAILSARLSKSRRLENLIAQLPGEKKNGLFGNLIALSLGLTPNFKSNFDLAEDAKLQLSKDTYDDDLDNLLAQIGDQYADLFLAAKNLSDAILLSDILRVNTEITKAPLSASMIKRYDEHHQDLTLLKALVRQQLPEKYKEIFFDQSKNGYAGYIDGGASQEEFYKFIKPILEKMDGTEELLVKLNREDLLRKQRTFDNGSIPHQIHLGELHAILRRQEDFYPFLKDNREKIEKILTFRIPYYVGPLARGNSRFAWMTRKSEETITPWNFEEVVDKGASAQSFIERMTNFDKNLPNEKVLPKHSLLYEYFTVYNELTKVKYVTEGMRKPAFLSGEQKKAIVDLLFKTNRKVTVKQLKEDYFKKIECFDSVEISGVEDRFNASLGTYHDLLKIIKDKDFLDNEENEDILEDIVLTLTLFEDREMIEERLKTYAHLFDDKVMKQLKRRRYTGWGRLSRKLINGIRDKQSGKTILDFLKSDGFANRNFMQLIHDDSLTFKEDIQKAQVSGQGDSLHEHIANLAGSPAIKKGILQTVKVVDELVKVMGRHKPENIVIEMARENQTTQKGQKNSRERMKRIEEGIKELGSQILKEHPVENTQLQNEKLYLYYLQNGRDMYVDQELDINRLSDYDVDHIVPQSFLKDDSIDNKVLTRSDKARGKSDNVPSEEVVKKMKNYWRQLLNAKLITQRKFDNLTKAERGGLSELDKAGFIKRQLVETRQITKHVAQILDSRMNTKYDENDKLIREVKVITLKSKLVSDFRKDFQFYKVREINNYHHAHDAYLNAVVGTALIKKYPKLESEFVYGDYKVYDVRKMIAKSEQEIGKATAKYFFYSNIMNFFKTEITLANGEIRKRPLIETNGETGEIVWDKGRDFATVRKVLSMPQVNIVKKTEVQTGGFSKESILPKRNSDKLIARKKDWDPKKYGGFDSPTVAYSVLVVAKVEKGKSKKLKSVKELLGITIMERSSFEKNPIDFLEAKGYKEVKKDLIIKLPKYSLFELENGRKRMLASAGELQKGNELALPSKYVNFLYLASHYEKLKGSPEDNEQKQLFVEQHKHYLDEIIEQISEFSKRVILADANLDKVLSAYNKHRDKPIREQAENIIHLFTLTNLGAPAAFKYFDTTIDRKRYTSTKEVLDATLIHQSITGLYETRIDLSQLGGDGGGGGEAAAKGGMNPLQLLQPLPAEIKGTKLLAHWNSGATITCIPESFLEDEQPIKKTLIKTIHGEKQQNVYYVTFKVKGRKVEAEVIASPYEYILLSPTDVPWLTQQPLQLTILVPLQEYQEKILSKTALPEDQKQQLKTLFVKYDNLWQHWENQVGHRKIRPHNIATGDYPPRPQKQYPINPKAKPSIQIVIDDLLKQGVLTPQNSTMNTPVYPVPKPDGRWRMVLDYREVNKTIPLTAAQNQHSAGILATIVRQKYKTTLDLANGFWAHPITPESYWLTAFTWQGKQYCWTRLPQGFLNSPALFNADVVDLLKEIPNVQVYVDDIYLSHDDPKEHVQQLEKVFQILLQAGYVVSLKKSEIGQKTVEFLGFNITKEGRGLTDTFKTKLLNITPPKDLKQLQSILGKLNFARNFIPNFAELVQPLYNLIAPAKGKYIEWSEENTKQLNMVIEALNTASNLEERLPEQRLVIKVNTSPSAGYVRYYNETGKKPIMYLNYVFSKAELKFSMLEKLLTTMHKALIKAMDLAMGQEILVYSPIVSMTKIQKTPLPERKALPIRWITWMTYLEDPRIQFHYDKTLPELKHIPDVYTSSQSPVKHPSQYEGVFYTDGSAIKSPDPTKSNNAGMGIVHATYKPEYQVLNQWSIPLGNHTAQMAEIAAVEFACKKALKIPGPVLVITDSFYVAESANKELPYWKSNGFVNNKKKPLKHISKWKSIAECLSMKPDITIQHEKGISLQIPVFILKGNALADKLATQGSYVVNAGKRTADGSEFEKRTADGSEFESPKKKAKVE

SEQ ID NO: 1351 - protein, 2176 aa, synthetic construct
MPAAKRVKLDGGDKKYSIGLDIGTNSVGWAVITDEYKVPSKKFKVLGNTDRHSIKKNLIGALLFDSGETAEATRLKRTARRRYTRRKNRICYLQEIFSNEMAKVDDSFFHRLEESFLVEEDKKHERHPIFGNIVDEVAYHEKYPTIYHLRKKLVDSTDKADLRLIYLALAHMIKFRGHFLIEGDLNPDNSDVDKLFIQLVQTYNQLFEENPINASGVDAKAILSARLSKSRRLENLIAQLPGEKKNGLFGNLIALSLGLTPNFKSNFDLAEDAKLQLSKDTYDDDLDNLLAQIGDQYADLFLAAKNLSDAILLSDILRVNTEITKAPLSASMIKRYDEHHQDLTLLKALVRQQLPEKYKEIFFDQSKNGYAGYIDGGASQEEFYKFIKPILEKMDGTEELLVKLNREDLLRKQRTFDNGSIPHQIHLGELHAILRRQEDFYPFLKDNREKIEKILTFRIPYYVGPLARGNSRFAWMTRKSEETITPWNFEEVVDKGASAQSFIERMTNFDKNLPNEKVLPKHSLLYEYFTVYNELTKVKYVTEGMRKPAFLSGEQKKAIVDLLFKTNRKVTVKQLKEDYFKKIECFDSVEISGVEDRFNASLGTYHDLLKIIKDKDFLDNEENEDILEDIVLTLTLFEDREMIEERLKTYAHLFDDKVMKQLKRRRYTGWGRLSRKLINGIRDKQSGKTILDFLKSDGFANRNFMQLIHDDSLTFKEDIQKAQVSGQGDSLHEHIANLAGSPAIKKGILQTVKVVDELVKVMGRHKPENIVIEMARENQTTQKGQKNSRERMKRIEEGIKELGSQILKEHPVENTQLQNEKLYLYYLQNGRDMYVDQELDINRLSDYDVDHIVPQSFLKDDSIDNKVLTRSDKARGKSDNVPSEEVVKKMKNYWRQLLNAKLITQRKFDNLTKAERGGLSELDKAGFIKRQLVETRQITKHVAQILDSRMNTKYDENDKLIREVKVITLKSKLVSDFRKDFQFYKVREINNYHHAHDAYLNAVVGTALIKKYPKLESEFVYGDYKVYDVRKMIAKSEQEIGKATAKYFFYSNIMNFFKTEITLANGEIRKRPLIETNGETGEIVWDKGRDFATVRKVLSMPQVNIVKKTEVQTGGFSKESILPKRNSDKLIARKKDWDPKKYGGFDSPTVAYSVLVVAKVEKGKSKKLKSVKELLGITIMERSSFEKNPIDFLEAKGYKEVKKDLIIKLPKYSLFELENGRKRMLASAGELQKGNELALPSKYVNFLYLASHYEKLKGSPEDNEQKQLFVEQHKHYLDEIIEQISEFSKRVILADANLDKVLSAYNKHRDKPIREQAENIIHLFTLTNLGAPAAFKYFDTTIDRKRYTSTKEVLDATLIHQSITGLYETRIDLSQLGGDGGGSSGGSEAAAKGGMNPLQLLQPLPAEIKGTKLLAHWNSGATITCIPESFLEDEQPIKKTLIKTIHGEKQQNVYYVTFKVKGRKVEAEVIASPYEYILLSPTDVPWLTQQPLQLTILVPLQEYQEKILSKTALPEDQKQQLKTLFVKYDNLWQHWENQVGHRKIRPHNIATGDYPPRPQKQYPINPKAKPSIQIVIDDLLKQGVLTPQNSTMNTPVYPVPKPDGRWRMVLDYREVNKTIPLTAAQNQHSAGILATIVRQKYKTTLDLANGFWAHPITPESYWLTAFTWQGKQYCWTRLPQGFLNSPALFNADVVDLLKEIPNVQVYVDDIYLSHDDPKEHVQQLEKVFQILLQAGYVVSLKKSEIGQKTVEFLGFNITKEGRGLTDTFKTKLLNITPPKDLKQLQSILGKLNFARNFIPNFAELVQPLYNLIAPAKGKYIEWSEENTKQLNMVIEALNTASNLEERLPEQRLVIKVNTSPSAGYVRYYNETGKKPIMYLNYVFSKAELKFSMLEKLLTTMHKALIKAMDLAMGQEILVYSPIVSMTKIQKTPLPERKALPIRWITWMTYLEDPRIQFHYDKTLPELKHIPDVYTSSQSPVKHPSQYEGVFYTDGSAIKSPDPTKSNNAGMGIVHATYKPEYQVLNQWSIPLGNHTAQMAEIAAVEFACKKALKIPGPVLVITDSFYVAESANKELPYWKSNGFVNNKKKPLKHISKWKSIAECLSMKPDITIQHEKGISLQIPVFILKGNALADKLATQGSYVVNAGKRTADGSEFEKRTADGSEFESPKKKAKVE

SEQ ID NO: 1352 - protein, 2174 aa, synthetic construct
MPAAKRVKLDGGDKKYSIGLDIGTNSVGWAVITDEYKVPSKKFKVLGNTDRHSIKKNLIGALLFDSGETAEATRLKRTARRRYTRRKNRICYLQEIFSNEMAKVDDSFFHRLEESFLVEEDKKHERHPIFGNIVDEVAYHEKYPTIYHLRKKLVDSTDKADLRLIYLALAHMIKFRGHFLIEGDLNPDNSDVDKLFIQLVQTYNQLFEENPINASGVDAKAILSARLSKSRRLENLIAQLPGEKKNGLFGNLIALSLGLTPNFKSNFDLAEDAKLQLSKDTYDDDLDNLLAQIGDQYADLFLAAKNLSDAILLSDILRVNTEITKAPLSASMIKRYDEHHQDLTLLKALVRQQLPEKYKEIFFDQSKNGYAGYIDGGASQEEFYKFIKPILEKMDGTEELLVKLNREDLLRKQRTFDNGSIPHQIHLGELHAILRRQEDFYPFLKDNREKIEKILTFRIPYYVGPLARGNSRFAWMTRKSEETITPWNFEEVVDKGASAQSFIERMTNFDKNLPNEKVLPKHSLLYEYFTVYNELTKVKYVTEGMRKPAFLSGEQKKAIVDLLFKTNRKVTVKQLKEDYFKKIECFDSVEISGVEDRFNASLGTYHDLLKIIKDKDFLDNEENEDILEDIVLTLTLFEDREMIEERLKTYAHLFDDKVMKQLKRRRYTGWGRLSRKLINGIRDKQSGKTILDFLKSDGFANRNFMQLIHDDSLTFKEDIQKAQVSGQGDSLHEHIANLAGSPAIKKGILQTVKVVDELVKVMGRHKPENIVIEMARENQTTQKGQKNSRERMKRIEEGIKELGSQILKEHPVENTQLQNEKLYLYYLQNGRDMYVDQELDINRLSDYDVDHIVPQSFLKDDSIDNKVLTRSDKARGKSDNVPSEEVVKKMKNYWRQLLNAKLITQRKFDNLTKAERGGLSELDKAGFIKRQLVETRQITKHVAQILDSRMNTKYDENDKLIREVKVITLKSKLVSDFRKDFQFYKVREINNYHHAHDAYLNAVVGTALIKKYPKLESEFVYGDYKVYDVRKMIAKSEQEIGKATAKYFFYSNIMNFFKTEITLANGEIRKRPLIETNGETGEIVWDKGRDFATVRKVLSMPQVNIVKKTEVQTGGFSKESILPKRNSDKLIARKKDWDPKKYGGFDSPTVAYSVLVVAKVEKGKSKKLKSVKELLGITIMERSSFEKNPIDFLEAKGYKEVKKDLIIKLPKYSLFELENGRKRMLASAGELQKGNELALPSKYVNFLYLASHYEKLKGSPEDNEQKQLFVEQHKHYLDEIIEQISEFSKRVILADANLDKVLSAYNKHRDKPIREQAENIIHLFTLTNLGAPAAFKYFDTTIDRKRYTSTKEVLDATLIHQSITGLYETRIDLSQLGGDGGGSSPAPGGSGGMNPLQLLQPLPAEIKGTKLLAHWNSGATITCIPESFLEDEQPIKKTLIKTIHGEKQQNVYYVTFKVKGRKVEAEVIASPYEYILLSPTDVPWLTQQPLQLTILVPLQEYQEKILSKTALPEDQKQQLKTLFVKYDNLWQHWENQVGHRKIRPHNIATGDYPPRPQKQYPINPKAKPSIQIVIDDLLKQGVLTPQNSTMNTPVYPVPKPDGRWRMVLDYREVNKTIPLTAAQNQHSAGILATIVRQKYKTTLDLANGFWAHPITPESYWLTAFTWQGKQYCWTRLPQGFLNSPALFNADVVDLLKEIPNVQVYVDDIYLSHDDPKEHVQQLEKVFQILLQAGYVVSLKKSEIGQKTVEFLGFNITKEGRGLTDTFKTKLLNITPPKDLKQLQSILGKLNFARNFIPNFAELVQPLYNLIAPAKGKYIEWSEENTKQLNMVIEALNTASNLEERLPEQRLVIKVNTSPSAGYVRYYNETGKKPIMYLNYVFSKAELKFSMLEKLLTTMHKALIKAMDLAMGQEILVYSPIVSMTKIQKTPLPERKALPIRWITWMTYLEDPRIQFHYDKTLPELKHIPDVYTSSQSPVKHPSQYEGVFYTDGSAIKSPDPTKSNNAGMGIVHATYKPEYQVLNQWSIPLGNHTAQMAEIAAVEFACKKALKIPGPVLVITDSFYVAESANKELPYWKSNGFVNNKKKPLKHISKWKSIAECLSMKPDITIQHEKGISLQIPVFILKGNALADKLATQGSYVVNAGKRTADGSEFEKRTADGSEFESPKKKAKVE

SEQ ID NO: 1353 - protein, 2176 aa, synthetic construct
MPAAKRVKLDGGDKKYSIGLDIGTNSVGWAVITDEYKVPSKKFKVLGNTDRHSIKKNLIGALLFDSGETAEATRLKRTARRRYTRRKNRICYLQEIFSNEMAKVDDSFFHRLEESFLVEEDKKHERHPIFGNIVDEVAYHEKYPTIYHLRKKLVDSTDKADLRLIYLALAHMIKFRGHFLIEGDLNPDNSDVDKLFIQLVQTYNQLFEENPINASGVDAKAILSARLSKSRRLENLIAQLPGEKKNGLFGNLIALSLGLTPNFKSNFDLAEDAKLQLSKDTYDDDLDNLLAQIGDQYADLFLAAKNLSDAILLSDILRVNTEITKAPLSASMIKRYDEHHQDLTLLKALVRQQLPEKYKEIFFDQSKNGYAGYIDGGASQEEFYKFIKPILEKMDGTEELLVKLNREDLLRKQRTFDNGSIPHQIHLGELHAILRRQEDFYPFLKDNREKIEKILTFRIPYYVGPLARGNSRFAWMTRKSEETITPWNFEEVVDKGASAQSFIERMTNFDKNLPNEKVLPKHSLLYEYFTVYNELTKVKYVTEGMRKPAFLSGEQKKAIVDLLFKTNRKVTVKQLKEDYFKKIECFDSVEISGVEDRFNASLGTYHDLLKIIKDKDFLDNEENEDILEDIVLTLTLFEDREMIEERLKTYAHLFDDKVMKQLKRRRYTGWGRLSRKLINGIRDKQSGKTILDFLKSDGFANRNFMQLIHDDSLTFKEDIQKAQVSGQGDSLHEHIANLAGSPAIKKGILQTVKVVDELVKVMGRHKPENIVIEMARENQTTQKGQKNSRERMKRIEEGIKELGSQILKEHPVENTQLQNEKLYLYYLQNGRDMYVDQELDINRLSDYDVDHIVPQSFLKDDSIDNKVLTRSDKARGKSDNVPSEEVVKKMKNYWRQLLNAKLITQRKFDNLTKAERGGLSELDKAGFIKRQLVETRQITKHVAQILDSRMNTKYDENDKLIREVKVITLKSKLVSDFRKDFQFYKVREINNYHHAHDAYLNAVVGTALIKKYPKLESEFVYGDYKVYDVRKMIAKSEQEIGKATAKYFFYSNIMNFFKTEITLANGEIRKRPLIETNGETGEIVWDKGRDFATVRKVLSMPQVNIVKKTEVQTGGFSKESILPKRNSDKLIARKKDWDPKKYGGFDSPTVAYSVLVVAKVEKGKSKKLKSVKELLGITIMERSSFEKNPIDFLEAKGYKEVKKDLIIKLPKYSLFELENGRKRMLASAGELQKGNELALPSKYVNFLYLASHYEKLKGSPEDNEQKQLFVEQHKHYLDEIIEQISEFSKRVILADANLDKVLSAYNKHRDKPIREQAENIIHLFTLTNLGAPAAFKYFDTTIDRKRYTSTKEVLDATLIHQSITGLYETRIDLSQLGGDGGGSSPAPEAAAKGGMNPLQLLQPLPAEIKGTKLLAHWNSGATITCIPESFLEDEQPIKKTLIKTIHGEKQQNVYYVTFKVKGRKVEAEVIASPYEYILLSPTDVPWLTQQPLQLTILVPLQEYQEKILSKTALPEDQKQQLKTLFVKYDNLWQHWENQVGHRKIRPHNIATGDYPPRPQKQYPINPKAKPSIQIVIDDLLKQGVLTPQNSTMNTPVYPVPKPDGRWRMVLDYREVNKTIPLTAAQNQHSAGILATIVRQKYKTTLDLANGFWAHPITPESYWLTAFTWQGKQYCWTRLPQGFLNSPALFNADVVDLLKEIPNVQVYVDDIYLSHDDPKEHVQQLEKVFQILLQAGYVVSLKKSEIGQKTVEFLGFNITKEGRGLTDTFKTKLLNITPPKDLKQLQSILGKLNFARNFIPNFAELVQPLYNLIAPAKGKYIEWSEENTKQLNMVIEALNTASNLEERLPEQRLVIKVNTSPSAGYVRYYNETGKKPIMYLNYVFSKAELKFSMLEKLLTTMHKALIKAMDLAMGQEILVYSPIVSMTKIQKTPLPERKALPIRWITWMTYLEDPRIQFHYDKTLPELKHIPDVYTSSQSPVKHPSQYEGVFYTDGSAIKSPDPTKSNNAGMGIVHATYKPEYQVLNQWSIPLGNHTAQMAEIAAVEFACKKALKIPGPVLVITDSFYVAESANKELPYWKSNGFVNNKKKPLKHISKWKSIAECLSMKPDITIQHEKGISLQIPVFILKGNALADKLATQGSYVVNAGKRTADGSEFEKRTADGSEFESPKKKAKVE

SEQ ID NO: 1354 - protein, 2174 aa, synthetic construct
MPAAKRVKLDGGDKKYSIGLDIGTNSVGWAVITDEYKVPSKKFKVLGNTDRHSIKKNLIGALLFDSGETAEATRLKRTARRRYTRRKNRICYLQEIFSNEMAKVDDSFFHRLEESFLVEEDKKHERHPIFGNIVDEVAYHEKYPTIYHLRKKLVDSTDKADLRLIYLALAHMIKFRGHFLIEGDLNPDNSDVDKLFIQLVQTYNQLFEENPINASGVDAKAILSARLSKSRRLENLIAQLPGEKKNGLFGNLIALSLGLTPNFKSNFDLAEDAKLQLSKDTYDDDLDNLLAQIGDQYADLFLAAKNLSDAILLSDILRVNTEITKAPLSASMIKRYDEHHQDLTLLKALVRQQLPEKYKEIFFDQSKNGYAGYIDGGASQEEFYKFIKPILEKMDGTEELLVKLNREDLLRKQRTFDNGSIPHQIHLGELHAILRRQEDFYPFLKDNREKIEKILTFRIPYYVGPLARGNSRFAWMTRKSEETITPWNFEEVVDKGASAQSFIERMTNFDKNLPNEKVLPKHSLLYEYFTVYNELTKVKYVTEGMRKPAFLSGEQKKAIVDLLFKTNRKVTVKQLKEDYFKKIECFDSVEISGVEDRFNASLGTYHDLLKIIKDKDFLDNEENEDILEDIVLTLTLFEDREMIEERLKTYAHLFDDKVMKQLKRRRYTGWGRLSRKLINGIRDKQSGKTILDFLKSDGFANRNFMQLIHDDSLTFKEDIQKAQVSGQGDSLHEHIANLAGSPAIKKGILQTVKVVDELVKVMGRHKPENIVIEMARENQTTQKGQKNSRERMKRIEEGIKELGSQILKEHPVENTQLQNEKLYLYYLQNGRDMYVDQELDINRLSDYDVDHIVPQSFLKDDSIDNKVLTRSDKARGKSDNVPSEEVVKKMKNYWRQLLNAKLITQRKFDNLTKAERGGLSELDKAGFIKRQLVETRQITKHVAQILDSRMNTKYDENDKLIREVKVITLKSKLVSDFRKDFQFYKVREINNYHHAHDAYLNAVVGTALIKKYPKLESEFVYGDYKVYDVRKMIAKSEQEIGKATAKYFFYSNIMNFFKTEITLANGEIRKRPLIETNGETGEIVWDKGRDFATVRKVLSMPQVNIVKKTEVQTGGFSKESILPKRNSDKLIARKKDWDPKKYGGFDSPTVAYSVLVVAKVEKGKSKKLKSVKELLGITIMERSSFEKNPIDFLEAKGYKEVKKDLIIKLPKYSLFELENGRKRMLASAGELQKGNELALPSKYVNFLYLASHYEKLKGSPEDNEQKQLFVEQHKHYLDEIIEQISEFSKRVILADANLDKVLSAYNKHRDKPIREQAENIIHLFTLTNLGAPAAFKYFDTTIDRKRYTSTKEVLDATLIHQSITGLYETRIDLSQLGGDGGGGSGGGPAPGGMNPLQLLQPLPAEIKGTKLLAHWNSGATITCIPESFLEDEQPIKKTLIKTIHGEKQQNVYYVTFKVKGRKVEAEVIASPYEYILLSPTDVPWLTQQPLQLTILVPLQEYQEKILSKTALPEDQKQQLKTLFVKYDNLWQHWENQVGHRKIRPHNIATGDYPPRPQKQYPINPKAKPSIQIVIDDLLKQGVLTPQNSTMNTPVYPVPKPDGRWRMVLDYREVNKTIPLTAAQNQHSAGILATIVRQKYKTTLDLANGFWAHPITPESYWLTAFTWQGKQYCWTRLPQGFLNSPALFNADVVDLLKEIPNVQVYVDDIYLSHDDPKEHVQQLEKVFQILLQAGYVVSLKKSEIGQKTVEFLGFNITKEGRGLTDTFKTKLLNITPPKDLKQLQSILGKLNFARNFIPNFAELVQPLYNLIAPAKGKYIEWSEENTKQLNMVIEALNTASNLEERLPEQRLVIKVNTSPSAGYVRYYNETGKKPIMYLNYVFSKAELKFSMLEKLLTTMHKALIKAMDLAMGQEILVYSPIVSMTKIQKTPLPERKALPIRWITWMTYLEDPRIQFHYDKTLPELKHIPDVYTSSQSPVKHPSQYEGVFYTDGSAIKSPDPTKSNNAGMGIVHATYKPEYQVLNQWSIPLGNHTAQMAEIAAVEFACKKALKIPGPVLVITDSFYVAESANKELPYWKSNGFVNNKKKPLKHISKWKSIAECLSMKPDITIQHEKGISLQIPVFILKGNALADKLATQGSYVVNAGKRTADGSEFEKRTADGSEFESPKKKAKVE

SEQ ID NO: 1355 - protein, 2176 aa, synthetic construct
MPAAKRVKLDGGDKKYSIGLDIGTNSVGWAVITDEYKVPSKKFKVLGNTDRHSIKKNLIGALLFDSGETAEATRLKRTARRRYTRRKNRICYLQEIFSNEMAKVDDSFFHRLEESFLVEEDKKHERHPIFGNIVDEVAYHEKYPTIYHLRKKLVDSTDKADLRLIYLALAHMIKFRGHFLIEGDLNPDNSDVDKLFIQLVQTYNQLFEENPINASGVDAKAILSARLSKSRRLENLIAQLPGEKKNGLFGNLIALSLGLTPNFKSNFDLAEDAKLQLSKDTYDDDLDNLLAQIGDQYADLFLAAKNLSDAILLSDILRVNTEITKAPLSASMIKRYDEHHQDLTLLKALVRQQLPEKYKEIFFDQSKNGYAGYIDGGASQEEFYKFIKPILEKMDGTEELLVKLNREDLLRKQRTFDNGSIPHQIHLGELHAILRRQEDFYPFLKDNREKIEKILTFRIPYYVGPLARGNSRFAWMTRKSEETITPWNFEEVVDKGASAQSFIERMTNFDKNLPNEKVLPKHSLLYEYFTVYNELTKVKYVTEGMRKPAFLSGEQKKAIVDLLFKTNRKVTVKQLKEDYFKKIECFDSVEISGVEDRFNASLGTYHDLLKIIKDKDFLDNEENEDILEDIVLTLTLFEDREMIEERLKTYAHLFDDKVMKQLKRRRYTGWGRLSRKLINGIRDKQSGKTILDFLKSDGFANRNFMQLIHDDSLTFKEDIQKAQVSGQGDSLHEHIANLAGSPAIKKGILQTVKVVDELVKVMGRHKPENIVIEMARENQTTQKGQKNSRERMKRIEEGIKELGSQILKEHPVENTQLQNEKLYLYYLQNGRDMYVDQELDINRLSDYDVDHIVPQSFLKDDSIDNKVLTRSDKARGKSDNVPSEEVVKKMKNYWRQLLNAKLITQRKFDNLTKAERGGLSELDKAGFIKRQLVETRQITKHVAQILDSRMNTKYDENDKLIREVKVITLKSKLVSDFRKDFQFYKVREINNYHHAHDAYLNAVVGTALIKKYPKLESEFVYGDYKVYDVRKMIAKSEQEIGKATAKYFFYSNIMNFFKTEITLANGEIRKRPLIETNGETGEIVWDKGRDFATVRKVLSMPQVNIVKKTEVQTGGFSKESILPKRNSDKLIARKKDWDPKKYGGFDSPTVAYSVLVVAKVEKGKSKKLKSVKELLGITIMERSSFEKNPIDFLEAKGYKEVKKDLIIKLPKYSLFELENGRKRMLASAGELQKGNELALPSKYVNFLYLASHYEKLKGSPEDNEQKQLFVEQHKHYLDEIIEQISEFSKRVILADANLDKVLSAYNKHRDKPIREQAENIIHLFTLTNLGAPAAFKYFDTTIDRKRYTSTKEVLDATLIHQSITGLYETRIDLSQLGGDGGEAAAKGSSGGSGGMNPLQLLQPLPAEIKGTKLLAHWNSGATITCIPESFLEDEQPIKKTLIKTIHGEKQQNVYYVTFKVKGRKVEAEVIASPYEYILLSPTDVPWLTQQPLQLTILVPLQEYQEKILSKTALPEDQKQQLKTLFVKYDNLWQHWENQVGHRKIRPHNIATGDYPPRPQKQYPINPKAKPSIQIVIDDLLKQGVLTPQNSTMNTPVYPVPKPDGRWRMVLDYREVNKTIPLTAAQNQHSAGILATIVRQKYKTTLDLANGFWAHPITPESYWLTAFTWQGKQYCWTRLPQGFLNSPALFNADVVDLLKEIPNVQVYVDDIYLSHDDPKEHVQQLEKVFQILLQAGYVVSLKKSEIGQKTVEFLGFNITKEGRGLTDTFKTKLLNITPPKDLKQLQSILGKLNFARNFIPNFAELVQPLYNLIAPAKGKYIEWSEENTKQLNMVIEALNTASNLEERLPEQRLVIKVNTSPSAGYVRYYNETGKKPIMYLNYVFSKAELKFSMLEKLLTTMHKALIKAMDLAMGQEILVYSPIVSMTKIQKTPLPERKALPIRWITWMTYLEDPRIQFHYDKTLPELKHIPDVYTSSQSPVKHPSQYEGVFYTDGSAIKSPDPTKSNNAGMGIVHATYKPEYQVLNQWSIPLGNHTAQMAEIAAVEFACKKALKIPGPVLVITDSFYVAESANKELPYWKSNGFVNNKKKPLKHISKWKSIAECLSMKPDITIQHEKGISLQIPVFILKGNALADKLATQGSYVVNAGKRTADGSEFEKRTADGSEFESPKKKAKVE

SEQ ID NO: 1356 - protein, 2172 aa, synthetic construct
MPAAKRVKLDGGDKKYSIGLDIGTNSVGWAVITDEYKVPSKKFKVLGNTDRHSIKKNLIGALLFDSGETAEATRLKRTARRRYTRRKNRICYLQEIFSNEMAKVDDSFFHRLEESFLVEEDKKHERHPIFGNIVDEVAYHEKYPTIYHLRKKLVDSTDKADLRLIYLALAHMIKFRGHFLIEGDLNPDNSDVDKLFIQLVQTYNQLFEENPINASGVDAKAILSARLSKSRRLENLIAQLPGEKKNGLFGNLIALSLGLTPNFKSNFDLAEDAKLQLSKDTYDDDLDNLLAQIGDQYADLFLAAKNLSDAILLSDILRVNTEITKAPLSASMIKRYDEHHQDLTLLKALVRQQLPEKYKEIFFDQSKNGYAGYIDGGASQEEFYKFIKPILEKMDGTEELLVKLNREDLLRKQRTFDNGSIPHQIHLGELHAILRRQEDFYPFLKDNREKIEKILTFRIPYYVGPLARGNSRFAWMTRKSEETITPWNFEEVVDKGASAQSFIERMTNFDKNLPNEKVLPKHSLLYEYFTVYNELTKVKYVTEGMRKPAFLSGEQKKAIVDLLFKTNRKVTVKQLKEDYFKKIECFDSVEISGVEDRFNASLGTYHDLLKIIKDKDFLDNEENEDILEDIVLTLTLFEDREMIEERLKTYAHLFDDKVMKQLKRRRYTGWGRLSRKLINGIRDKQSGKTILDFLKSDGFANRNFMQLIHDDSLTFKEDIQKAQVSGQGDSLHEHIANLAGSPAIKKGILQTVKVVDELVKVMGRHKPENIVIEMARENQTTQKGQKNSRERMKRIEEGIKELGSQILKEHPVENTQLQNEKLYLYYLQNGRDMYVDQELDINRLSDYDVDHIVPQSFLKDDSIDNKVLTRSDKARGKSDNVPSEEVVKKMKNYWRQLLNAKLITQRKFDNLTKAERGGLSELDKAGFIKRQLVETRQITKHVAQILDSRMNTKYDENDKLIREVKVITLKSKLVSDFRKDFQFYKVREINNYHHAHDAYLNAVVGTALIKKYPKLESEFVYGDYKVYDVRKMIAKSEQEIGKATAKYFFYSNIMNFFKTEITLANGEIRKRPLIETNGETGEIVWDKGRDFATVRKVLSMPQVNIVKKTEVQTGGFSKESILPKRNSDKLIARKKDWDPKKYGGFDSPTVAYSVLVVAKVEKGKSKKLKSVKELLGITIMERSSFEKNPIDFLEAKGYKEVKKDLIIKLPKYSLFELENGRKRMLASAGELQKGNELALPSKYVNFLYLASHYEKLKGSPEDNEQKQLFVEQHKHYLDEIIEQISEFSKRVILADANLDKVLSAYNKHRDKPIREQAENIIHLFTLTNLGAPAAFKYFDTTIDRKRYTSTKEVLDATLIHQSITGLYETRIDLSQLGGDGGGGGGGGGGGMNPLQLLQPLPAEIKGTKLLAHWNSGATITCIPESFLEDEQPIKKTLIKTIHGEKQQNVYYVTFKVKGRKVEAEVIASPYEYILLSPTDVPWLTQQPLQLTILVPLQEYQEKILSKTALPEDQKQQLKTLFVKYDNLWQHWENQVGHRKIRPHNIATGDYPPRPQKQYPINPKAKPSIQIVIDDLLKQGVLTPQNSTMNTPVYPVPKPDGRWRMVLDYREVNKTIPLTAAQNQHSAGILATIVRQKYKTTLDLANGFWAHPITPESYWLTAFTWQGKQYCWTRLPQGFLNSPALFNADVVDLLKEIPNVQVYVDDIYLSHDDPKEHVQQLEKVFQILLQAGYVVSLKKSEIGQKTVEFLGFNITKEGRGLTDTFKTKLLNITPPKDLKQLQSILGKLNFARNFIPNFAELVQPLYNLIAPAKGKYIEWSEENTKQLNMVIEALNTASNLEERLPEQRLVIKVNTSPSAGYVRYYNETGKKPIMYLNYVFSKAELKFSMLEKLLTTMHKALIKAMDLAMGQEILVYSPIVSMTKIQKTPLPERKALPIRWITWMTYLEDPRIQFHYDKTLPELKHIPDVYTSSQSPVKHPSQYEGVFYTDGSAIKSPDPTKSNNAGMGIVHATYKPEYQVLNQWSIPLGNHTAQMAEIAAVEFACKKALKIPGPVLVITDSFYVAESANKELPYWKSNGFVNNKKKPLKHISKWKSIAECLSMKPDITIQHEKGISLQIPVFILKGNALADKLATQGSYVVNAGKRTADGSEFEKRTADGSEFESPKKKAKVE

SEQ ID NO: 1357 - protein, 2176 aa, synthetic construct
MPAAKRVKLDGGDKKYSIGLDIGTNSVGWAVITDEYKVPSKKFKVLGNTDRHSIKKNLIGALLFDSGETAEATRLKRTARRRYTRRKNRICYLQEIFSNEMAKVDDSFFHRLEESFLVEEDKKHERHPIFGNIVDEVAYHEKYPTIYHLRKKLVDSTDKADLRLIYLALAHMIKFRGHFLIEGDLNPDNSDVDKLFIQLVQTYNQLFEENPINASGVDAKAILSARLSKSRRLENLIAQLPGEKKNGLFGNLIALSLGLTPNFKSNFDLAEDAKLQLSKDTYDDDLDNLLAQIGDQYADLFLAAKNLSDAILLSDILRVNTEITKAPLSASMIKRYDEHHQDLTLLKALVRQQLPEKYKEIFFDQSKNGYAGYIDGGASQEEFYKFIKPILEKMDGTEELLVKLNREDLLRKQRTFDNGSIPHQIHLGELHAILRRQEDFYPFLKDNREKIEKILTFRIPYYVGPLARGNSRFAWMTRKSEETITPWNFEEVVDKGASAQSFIERMTNFDKNLPNEKVLPKHSLLYEYFTVYNELTKVKYVTEGMRKPAFLSGEQKKAIVDLLFKTNRKVTVKQLKEDYFKKIECFDSVEISGVEDRFNASLGTYHDLLKIIKDKDFLDNEENEDILEDIVLTLTLFEDREMIEERLKTYAHLFDDKVMKQLKRRRYTGWGRLSRKLINGIRDKQSGKTILDFLKSDGFANRNFMQLIHDDSLTFKEDIQKAQVSGQGDSLHEHIANLAGSPAIKKGILQTVKVVDELVKVMGRHKPENIVIEMARENQTTQKGQKNSRERMKRIEEGIKELGSQILKEHPVENTQLQNEKLYLYYLQNGRDMYVDQELDINRLSDYDVDHIVPQSFLKDDSIDNKVLTRSDKARGKSDNVPSEEVVKKMKNYWRQLLNAKLITQRKFDNLTKAERGGLSELDKAGFIKRQLVETRQITKHVAQILDSRMNTKYDENDKLIREVKVITLKSKLVSDFRKDFQFYKVREINNYHHAHDAYLNAVVGTALIKKYPKLESEFVYGDYKVYDVRKMIAKSEQEIGKATAKYFFYSNIMNFFKTEITLANGEIRKRPLIETNGETGEIVWDKGRDFATVRKVLSMPQVNIVKKTEVQTGGFSKESILPKRNSDKLIARKKDWDPKKYGGFDSPTVAYSVLVVAKVEKGKSKKLKSVKELLGITIMERSSFEKNPIDFLEAKGYKEVKKDLIIKLPKYSLFELENGRKRMLASAGELQKGNELALPSKYVNFLYLASHYEKLKGSPEDNEQKQLFVEQHKHYLDEIIEQISEFSKRVILADANLDKVLSAYNKHRDKPIREQAENIIHLFTLTNLGAPAAFKYFDTTIDRKRYTSTKEVLDATLIHQSITGLYETRIDLSQLGGDGGGSSEAAAKGGSGGMNPLQLLQPLPAEIKGTKLLAHWNSGATITCIPESFLEDEQPIKKTLIKTIHGEKQQNVYYVTFKVKGRKVEAEVIASPYEYILLSPTDVPWLTQQPLQLTILVPLQEYQEKILSKTALPEDQKQQLKTLFVKYDNLWQHWENQVGHRKIRPHNIATGDYPPRPQKQYPINPKAKPSIQIVIDDLLKQGVLTPQNSTMNTPVYPVPKPDGRWRMVLDYREVNKTIPLTAAQNQHSAGILATIVRQKYKTTLDLANGFWAHPITPESYWLTAFTWQGKQYCWTRLPQGFLNSPALFNADVVDLLKEIPNVQVYVDDIYLSHDDPKEHVQQLEKVFQILLQAGYVVSLKKSEIGQKTVEFLGFNITKEGRGLTDTFKTKLLNITPPKDLKQLQSILGKLNFARNFIPNFAELVQPLYNLIAPAKGKYIEWSEENTKQLNMVIEALNTASNLEERLPEQRLVIKVNTSPSAGYVRYYNETGKKPIMYLNYVFSKAELKFSMLEKLLTTMHKALIKAMDLAMGQEILVYSPIVSMTKIQKTPLPERKALPIRWITWMTYLEDPRIQFHYDKTLPELKHIPDVYTSSQSPVKHPSQYEGVFYTDGSAIKSPDPTKSNNAGMGIVHATYKPEYQVLNQWSIPLGNHTAQMAEIAAVEFACKKALKIPGPVLVITDSFYVAESANKELPYWKSNGFVNNKKKPLKHISKWKSIAECLSMKPDITIQHEKGISLQIPVFILKGNALADKLATQGSYVVNAGKRTADGSEFEKRTADGSEFESPKKKAKVE

SEQ ID NO: 1358 - protein, 2171 aa, synthetic construct
MPAAKRVKLDGGDKKYSIGLDIGTNSVGWAVITDEYKVPSKKFKVLGNTDRHSIKKNLIGALLFDSGETAEATRLKRTARRRYTRRKNRICYLQEIFSNEMAKVDDSFFHRLEESFLVEEDKKHERHPIFGNIVDEVAYHEKYPTIYHLRKKLVDSTDKADLRLIYLALAHMIKFRGHFLIEGDLNPDNSDVDKLFIQLVQTYNQLFEENPINASGVDAKAILSARLSKSRRLENLIAQLPGEKKNGLFGNLIALSLGLTPNFKSNFDLAEDAKLQLSKDTYDDDLDNLLAQIGDQYADLFLAAKNLSDAILLSDILRVNTEITKAPLSASMIKRYDEHHQDLTLLKALVRQQLPEKYKEIFFDQSKNGYAGYIDGGASQEEFYKFIKPILEKMDGTEELLVKLNREDLLRKQRTFDNGSIPHQIHLGELHAILRRQEDFYPFLKDNREKIEKILTFRIPYYVGPLARGNSRFAWMTRKSEETITPWNFEEVVDKGASAQSFIERMTNFDKNLPNEKVLPKHSLLYEYFTVYNELTKVKYVTEGMRKPAFLSGEQKKAIVDLLFKTNRKVTVKQLKEDYFKKIECFDSVEISGVEDRFNASLGTYHDLLKIIKDKDFLDNEENEDILEDIVLTLTLFEDREMIEERLKTYAHLFDDKVMKQLKRRRYTGWGRLSRKLINGIRDKQSGKTILDFLKSDGFANRNFMQLIHDDSLTFKEDIQKAQVSGQGDSLHEHIANLAGSPAIKKGILQTVKVVDELVKVMGRHKPENIVIEMARENQTTQKGQKNSRERMKRIEEGIKELGSQILKEHPVENTQLQNEKLYLYYLQNGRDMYVDQELDINRLSDYDVDHIVPQSFLKDDSIDNKVLTRSDKARGKSDNVPSEEVVKKMKNYWRQLLNAKLITQRKFDNLTKAERGGLSELDKAGFIKRQLVETRQITKHVAQILDSRMNTKYDENDKLIREVKVITLKSKLVSDFRKDFQFYKVREINNYHHAHDAYLNAVVGTALIKKYPKLESEFVYGDYKVYDVRKMIAKSEQEIGKATAKYFFYSNIMNFFKTEITLANGEIRKRPLIETNGETGEIVWDKGRDFATVRKVLSMPQVNIVKKTEVQTGGFSKESILPKRNSDKLIARKKDWDPKKYGGFDSPTVAYSVLVVAKVEKGKSKKLKSVKELLGITIMERSSFEKNPIDFLEAKGYKEVKKDLIIKLPKYSLFELENGRKRMLASAGELQKGNELALPSKYVNFLYLASHYEKLKGSPEDNEQKQLFVEQHKHYLDEIIEQISEFSKRVILADANLDKVLSAYNKHRDKPIREQAENIIHLFTLTNLGAPAAFKYFDTTIDRKRYTSTKEVLDATLIHQSITGLYETRIDLSQLGGDGGPAPGSSGGMNPLQLLQPLPAEIKGTKLLAHWNSGATITCIPESFLEDEQPIKKTLIKTIHGEKQQNVYYVTFKVKGRKVEAEVIASPYEYILLSPTDVPWLTQQPLQLTILVPLQEYQEKILSKTALPEDQKQQLKTLFVKYDNLWQHWENQVGHRKIRPHNIATGDYPPRPQKQYPINPKAKPSIQIVIDDLLKQGVLTPQNSTMNTPVYPVPKPDGRWRMVLDYREVNKTIPLTAAQNQHSAGILATIVRQKYKTTLDLANGFWAHPITPESYWLTAFTWQGKQYCWTRLPQGFLNSPALFNADVVDLLKEIPNVQVYVDDIYLSHDDPKEHVQQLEKVFQILLQAGYVVSLKKSEIGQKTVEFLGFNITKEGRGLTDTFKTKLLNITPPKDLKQLQSILGKLNFARNFIPNFAELVQPLYNLIAPAKGKYIEWSEENTKQLNMVIEALNTASNLEERLPEQRLVIKVNTSPSAGYVRYYNETGKKPIMYLNYVFSKAELKFSMLEKLLTTMHKALIKAMDLAMGQEILVYSPIVSMTKIQKTPLPERKALPIRWITWMTYLEDPRIQFHYDKTLPELKHIPDVYTSSQSPVKHPSQYEGVFYTDGSAIKSPDPTKSNNAGMGIVHATYKPEYQVLNQWSIPLGNHTAQMAEIAAVEFACKKALKIPGPVLVITDSFYVAESANKELPYWKSNGFVNNKKKPLKHISKWKSIAECLSMKPDITIQHEKGISLQIPVFILKGNALADKLATQGSYVVNAGKRTADGSEFEKRTADGSEFESPKKKAKVE

SEQ ID NO: 1359 - protein, 2176 aa, synthetic construct
MPAAKRVKLDGGDKKYSIGLDIGTNSVGWAVITDEYKVPSKKFKVLGNTDRHSIKKNLIGALLFDSGETAEATRLKRTARRRYTRRKNRICYLQEIFSNEMAKVDDSFFHRLEESFLVEEDKKHERHPIFGNIVDEVAYHEKYPTIYHLRKKLVDSTDKADLRLIYLALAHMIKFRGHFLIEGDLNPDNSDVDKLFIQLVQTYNQLFEENPINASGVDAKAILSARLSKSRRLENLIAQLPGEKKNGLFGNLIALSLGLTPNFKSNFDLAEDAKLQLSKDTYDDDLDNLLAQIGDQYADLFLAAKNLSDAILLSDILRVNTEITKAPLSASMIKRYDEHHQDLTLLKALVRQQLPEKYKEIFFDQSKNGYAGYIDGGASQEEFYKFIKPILEKMDGTEELLVKLNREDLLRKQRTFDNGSIPHQIHLGELHAILRRQEDFYPFLKDNREKIEKILTFRIPYYVGPLARGNSRFAWMTRKSEETITPWNFEEVVDKGASAQSFIERMTNFDKNLPNEKVLPKHSLLYEYFTVYNELTKVKYVTEGMRKPAFLSGEQKKAIVDLLFKTNRKVTVKQLKEDYFKKIECFDSVEISGVEDRFNASLGTYHDLLKIIKDKDFLDNEENEDILEDIVLTLTLFEDREMIEERLKTYAHLFDDKVMKQLKRRRYTGWGRLSRKLINGIRDKQSGKTILDFLKSDGFANRNFMQLIHDDSLTFKEDIQKAQVSGQGDSLHEHIANLAGSPAIKKGILQTVKVVDELVKVMGRHKPENIVIEMARENQTTQKGQKNSRERMKRIEEGIKELGSQILKEHPVENTQLQNEKLYLYYLQNGRDMYVDQELDINRLSDYDVDHIVPQSFLKDDSIDNKVLTRSDKARGKSDNVPSEEVVKKMKNYWRQLLNAKLITQRKFDNLTKAERGGLSELDKAGFIKRQLVETRQITKHVAQILDSRMNTKYDENDKLIREVKVITLKSKLVSDFRKDFQFYKVREINNYHHAHDAYLNAVVGTALIKKYPKLESEFVYGDYKVYDVRKMIAKSEQEIGKATAKYFFYSNIMNFFKTEITLANGEIRKRPLIETNGETGEIVWDKGRDFATVRKVLSMPQVNIVKKTEVQTGGFSKESILPKRNSDKLIARKKDWDPKKYGGFDSPTVAYSVLVVAKVEKGKSKKLKSVKELLGITIMERSSFEKNPIDFLEAKGYKEVKKDLIIKLPKYSLFELENGRKRMLASAGELQKGNELALPSKYVNFLYLASHYEKLKGSPEDNEQKQLFVEQHKHYLDEIIEQISEFSKRVILADANLDKVLSAYNKHRDKPIREQAENIIHLFTLTNLGAPAAFKYFDTTIDRKRYTSTKEVLDATLIHQSITGLYETRIDLSQLGGDGGPAPEAAAKGGSGGMNPLQLLQPLPAEIKGTKLLAHWNSGATITCIPESFLEDEQPIKKTLIKTIHGEKQQNVYYVTFKVKGRKVEAEVIASPYEYILLSPTDVPWLTQQPLQLTILVPLQEYQEKILSKTALPEDQKQQLKTLFVKYDNLWQHWENQVGHRKIRPHNIATGDYPPRPQKQYPINPKAKPSIQIVIDDLLKQGVLTPQNSTMNTPVYPVPKPDGRWRMVLDYREVNKTIPLTAAQNQHSAGILATIVRQKYKTTLDLANGFWAHPITPESYWLTAFTWQGKQYCWTRLPQGFLNSPALFNADVVDLLKEIPNVQVYVDDIYLSHDDPKEHVQQLEKVFQILLQAGYVVSLKKSEIGQKTVEFLGFNITKEGRGLTDTFKTKLLNITPPKDLKQLQSILGKLNFARNFIPNFAELVQPLYNLIAPAKGKYIEWSEENTKQLNMVIEALNTASNLEERLPEQRLVIKVNTSPSAGYVRYYNETGKKPIMYLNYVFSKAELKFSMLEKLLTTMHKALIKAMDLAMGQEILVYSPIVSMTKIQKTPLPERKALPIRWITWMTYLEDPRIQFHYDKTLPELKHIPDVYTSSQSPVKHPSQYEGVFYTDGSAIKSPDPTKSNNAGMGIVHATYKPEYQVLNQWSIPLGNHTAQMAEIAAVEFACKKALKIPGPVLVITDSFYVAESANKELPYWKSNGFVNNKKKPLKHISKWKSIAECLSMKPDITIQHEKGISLQIPVFILKGNALADKLATQGSYVVNAGKRTADGSEFEKRTADGSEFESPKKKAKVE

SEQ ID NO: 1360 - protein, 2176 aa, synthetic construct
MPAAKRVKLDGGDKKYSIGLDIGTNSVGWAVITDEYKVPSKKFKVLGNTDRHSIKKNLIGALLFDSGETAEATRLKRTARRRYTRRKNRICYLQEIFSNEMAKVDDSFFHRLEESFLVEEDKKHERHPIFGNIVDEVAYHEKYPTIYHLRKKLVDSTDKADLRLIYLALAHMIKFRGHFLIEGDLNPDNSDVDKLFIQLVQTYNQLFEENPINASGVDAKAILSARLSKSRRLENLIAQLPGEKKNGLFGNLIALSLGLTPNFKSNFDLAEDAKLQLSKDTYDDDLDNLLAQIGDQYADLFLAAKNLSDAILLSDILRVNTEITKAPLSASMIKRYDEHHQDLTLLKALVRQQLPEKYKEIFFDQSKNGYAGYIDGGASQEEFYKFIKPILEKMDGTEELLVKLNREDLLRKQRTFDNGSIPHQIHLGELHAILRRQEDFYPFLKDNREKIEKILTFRIPYYVGPLARGNSRFAWMTRKSEETITPWNFEEVVDKGASAQSFIERMTNFDKNLPNEKVLPKHSLLYEYFTVYNELTKVKYVTEGMRKPAFLSGEQKKAIVDLLFKTNRKVTVKQLKEDYFKKIECFDSVEISGVEDRFNASLGTYHDLLKIIKDKDFLDNEENEDILEDIVLTLTLFEDREMIEERLKTYAHLFDDKVMKQLKRRRYTGWGRLSRKLINGIRDKQSGKTILDFLKSDGFANRNFMQLIHDDSLTFKEDIQKAQVSGQGDSLHEHIANLAGSPAIKKGILQTVKVVDELVKVMGRHKPENIVIEMARENQTTQKGQKNSRERMKRIEEGIKELGSQILKEHPVENTQLQNEKLYLYYLQNGRDMYVDQELDINRLSDYDVDHIVPQSFLKDDSIDNKVLTRSDKARGKSDNVPSEEVVKKMKNYWRQLLNAKLITQRKFDNLTKAERGGLSELDKAGFIKRQLVETRQITKHVAQILDSRMNTKYDENDKLIREVKVITLKSKLVSDFRKDFQFYKVREINNYHHAHDAYLNAVVGTALIKKYPKLESEFVYGDYKVYDVRKMIAKSEQEIGKATAKYFFYSNIMNFFKTEITLANGEIRKRPLIETNGETGEIVWDKGRDFATVRKVLSMPQVNIVKKTEVQTGGFSKESILPKRNSDKLIARKKDWDPKKYGGFDSPTVAYSVLVVAKVEKGKSKKLKSVKELLGITIMERSSFEKNPIDFLEAKGYKEVKKDLIIKLPKYSLFELENGRKRMLASAGELQKGNELALPSKYVNFLYLASHYEKLKGSPEDNEQKQLFVEQHKHYLDEIIEQISEFSKRVILADANLDKVLSAYNKHRDKPIREQAENIIHLFTLTNLGAPAAFKYFDTTIDRKRYTSTKEVLDATLIHQSITGLYETRIDLSQLGGDGGEAAAKGGGPAPGGMNPLQLLQPLPAEIKGTKLLAHWNSGATITCIPESFLEDEQPIKKTLIKTIHGEKQQNVYYVTFKVKGRKVEAEVIASPYEYILLSPTDVPWLTQQPLQLTILVPLQEYQEKILSKTALPEDQKQQLKTLFVKYDNLWQHWENQVGHRKIRPHNIATGDYPPRPQKQYPINPKAKPSIQIVIDDLLKQGVLTPQNSTMNTPVYPVPKPDGRWRMVLDYREVNKTIPLTAAQNQHSAGILATIVRQKYKTTLDLANGFWAHPITPESYWLTAFTWQGKQYCWTRLPQGFLNSPALFNADVVDLLKEIPNVQVYVDDIYLSHDDPKEHVQQLEKVFQILLQAGYVVSLKKSEIGQKTVEFLGFNITKEGRGLTDTFKTKLLNITPPKDLKQLQSILGKLNFARNFIPNFAELVQPLYNLIAPAKGKYIEWSEENTKQLNMVIEALNTASNLEERLPEQRLVIKVNTSPSAGYVRYYNETGKKPIMYLNYVFSKAELKFSMLEKLLTTMHKALIKAMDLAMGQEILVYSPIVSMTKIQKTPLPERKALPIRWITWMTYLEDPRIQFHYDKTLPELKHIPDVYTSSQSPVKHPSQYEGVFYTDGSAIKSPDPTKSNNAGMGIVHATYKPEYQVLNQWSIPLGNHTAQMAEIAAVEFACKKALKIPGPVLVITDSFYVAESANKELPYWKSNGFVNNKKKPLKHISKWKSIAECLSMKPDITIQHEKGISLQIPVFILKGNALADKLATQGSYVVNAGKRTADGSEFEKRTADGSEFESPKKKAKVE

SEQ ID NO: 1361 - protein, 2176 aa, synthetic construct
MPAAKRVKLDGGDKKYSIGLDIGTNSVGWAVITDEYKVPSKKFKVLGNTDRHSIKKNLIGALLFDSGETAEATRLKRTARRRYTRRKNRICYLQEIFSNEMAKVDDSFFHRLEESFLVEEDKKHERHPIFGNIVDEVAYHEKYPTIYHLRKKLVDSTDKADLRLIYLALAHMIKFRGHFLIEGDLNPDNSDVDKLFIQLVQTYNQLFEENPINASGVDAKAILSARLSKSRRLENLIAQLPGEKKNGLFGNLIALSLGLTPNFKSNFDLAEDAKLQLSKDTYDDDLDNLLAQIGDQYADLFLAAKNLSDAILLSDILRVNTEITKAPLSASMIKRYDEHHQDLTLLKALVRQQLPEKYKEIFFDQSKNGYAGYIDGGASQEEFYKFIKPILEKMDGTEELLVKLNREDLLRKQRTFDNGSIPHQIHLGELHAILRRQEDFYPFLKDNREKIEKILTFRIPYYVGPLARGNSRFAWMTRKSEETITPWNFEEVVDKGASAQSFIERMTNFDKNLPNEKVLPKHSLLYEYFTVYNELTKVKYVTEGMRKPAFLSGEQKKAIVDLLFKTNRKVTVKQLKEDYFKKIECFDSVEISGVEDRFNASLGTYHDLLKIIKDKDFLDNEENEDILEDIVLTLTLFEDREMIEERLKTYAHLFDDKVMKQLKRRRYTGWGRLSRKLINGIRDKQSGKTILDFLKSDGFANRNFMQLIHDDSLTFKEDIQKAQVSGQGDSLHEHIANLAGSPAIKKGILQTVKVVDELVKVMGRHKPENIVIEMARENQTTQKGQKNSRERMKRIEEGIKELGSQILKEHPVENTQLQNEKLYLYYLQNGRDMYVDQELDINRLSDYDVDHIVPQSFLKDDSIDNKVLTRSDKARGKSDNVPSEEVVKKMKNYWRQLLNAKLITQRKFDNLTKAERGGLSELDKAGFIKRQLVETRQITKHVAQILDSRMNTKYDENDKLIREVKVITLKSKLVSDFRKDFQFYKVREINNYHHAHDAYLNAVVGTALIKKYPKLESEFVYGDYKVYDVRKMIAKSEQEIGKATAKYFFYSNIMNFFKTEITLANGEIRKRPLIETNGETGEIVWDKGRDFATVRKVLSMPQVNIVKKTEVQTGGFSKESILPKRNSDKLIARKKDWDPKKYGGFDSPTVAYSVLVVAKVEKGKSKKLKSVKELLGITIMERSSFEKNPIDFLEAKGYKEVKKDLIIKLPKYSLFELENGRKRMLASAGELQKGNELALPSKYVNFLYLASHYEKLKGSPEDNEQKQLFVEQHKHYLDEIIEQISEFSKRVILADANLDKVLSAYNKHRDKPIREQAENIIHLFTLTNLGAPAAFKYFDTTIDRKRYTSTKEVLDATLIHQSITGLYETRIDLSQLGGDGGGSSEAAAKGGGGGMNPLQLLQPLPAEIKGTKLLAHWNSGATITCIPESFLEDEQPIKKTLIKTIHGEKQQNVYYVTFKVKGRKVEAEVIASPYEYILLSPTDVPWLTQQPLQLTILVPLQEYQEKILSKTALPEDQKQQLKTLFVKYDNLWQHWENQVGHRKIRPHNIATGDYPPRPQKQYPINPKAKPSIQIVIDDLLKQGVLTPQNSTMNTPVYPVPKPDGRWRMVLDYREVNKTIPLTAAQNQHSAGILATIVRQKYKTTLDLANGFWAHPITPESYWLTAFTWQGKQYCWTRLPQGFLNSPALFNADVVDLLKEIPNVQVYVDDIYLSHDDPKEHVQQLEKVFQILLQAGYVVSLKKSEIGQKTVEFLGFNITKEGRGLTDTFKTKLLNITPPKDLKQLQSILGKLNFARNFIPNFAELVQPLYNLIAPAKGKYIEWSEENTKQLNMVIEALNTASNLEERLPEQRLVIKVNTSPSAGYVRYYNETGKKPIMYLNYVFSKAELKFSMLEKLLTTMHKALIKAMDLAMGQEILVYSPIVSMTKIQKTPLPERKALPIRWITWMTYLEDPRIQFHYDKTLPELKHIPDVYTSSQSPVKHPSQYEGVFYTDGSAIKSPDPTKSNNAGMGIVHATYKPEYQVLNQWSIPLGNHTAQMAEIAAVEFACKKALKIPGPVLVITDSFYVAESANKELPYWKSNGFVNNKKKPLKHISKWKSIAECLSMKPDITIQHEKGISLQIPVFILKGNALADKLATQGSYVVNAGKRTADGSEFEKRTADGSEFESPKKKAKVE

SEQ ID NO: 1362 - protein, 2176 aa, synthetic construct
MPAAKRVKLDGGDKKYSIGLDIGTNSVGWAVITDEYKVPSKKFKVLGNTDRHSIKKNLIGALLFDSGETAEATRLKRTARRRYTRRKNRICYLQEIFSNEMAKVDDSFFHRLEESFLVEEDKKHERHPIFGNIVDEVAYHEKYPTIYHLRKKLVDSTDKADLRLIYLALAHMIKFRGHFLIEGDLNPDNSDVDKLFIQLVQTYNQLFEENPINASGVDAKAILSARLSKSRRLENLIAQLPGEKKNGLFGNLIALSLGLTPNFKSNFDLAEDAKLQLSKDTYDDDLDNLLAQIGDQYADLFLAAKNLSDAILLSDILRVNTEITKAPLSASMIKRYDEHHQDLTLLKALVRQQLPEKYKEIFFDQSKNGYAGYIDGGASQEEFYKFIKPILEKMDGTEELLVKLNREDLLRKQRTFDNGSIPHQIHLGELHAILRRQEDFYPFLKDNREKIEKILTFRIPYYVGPLARGNSRFAWMTRKSEETITPWNFEEVVDKGASAQSFIERMTNFDKNLPNEKVLPKHSLLYEYFTVYNELTKVKYVTEGMRKPAFLSGEQKKAIVDLLFKTNRKVTVKQLKEDYFKKIECFDSVEISGVEDRFNASLGTYHDLLKIIKDKDFLDNEENEDILEDIVLTLTLFEDREMIEERLKTYAHLFDDKVMKQLKRRRYTGWGRLSRKLINGIRDKQSGKTILDFLKSDGFANRNFMQLIHDDSLTFKEDIQKAQVSGQGDSLHEHIANLAGSPAIKKGILQTVKVVDELVKVMGRHKPENIVIEMARENQTTQKGQKNSRERMKRIEEGIKELGSQILKEHPVENTQLQNEKLYLYYLQNGRDMYVDQELDINRLSDYDVDHIVPQSFLKDDSIDNKVLTRSDKARGKSDNVPSEEVVKKMKNYWRQLLNAKLITQRKFDNLTKAERGGLSELDKAGFIKRQLVETRQITKHVAQILDSRMNTKYDENDKLIREVKVITLKSKLVSDFRKDFQFYKVREINNYHHAHDAYLNAVVGTALIKKYPKLESEFVYGDYKVYDVRKMIAKSEQEIGKATAKYFFYSNIMNFFKTEITLANGEIRKRPLIETNGETGEIVWDKGRDFATVRKVLSMPQVNIVKKTEVQTGGFSKESILPKRNSDKLIARKKDWDPKKYGGFDSPTVAYSVLVVAKVEKGKSKKLKSVKELLGITIMERSSFEKNPIDFLEAKGYKEVKKDLIIKLPKYSLFELENGRKRMLASAGELQKGNELALPSKYVNFLYLASHYEKLKGSPEDNEQKQLFVEQHKHYLDEIIEQISEFSKRVILADANLDKVLSAYNKHRDKPIREQAENIIHLFTLTNLGAPAAFKYFDTTIDRKRYTSTKEVLDATLIHQSITGLYETRIDLSQLGGDGGEAAAKGGGGSSGGMNPLQLLQPLPAEIKGTKLLAHWNSGATITCIPESFLEDEQPIKKTLIKTIHGEKQQNVYYVTFKVKGRKVEAEVIASPYEYILLSPTDVPWLTQQPLQLTILVPLQEYQEKILSKTALPEDQKQQLKTLFVKYDNLWQHWENQVGHRKIRPHNIATGDYPPRPQKQYPINPKAKPSIQIVIDDLLKQGVLTPQNSTMNTPVYPVPKPDGRWRMVLDYREVNKTIPLTAAQNQHSAGILATIVRQKYKTTLDLANGFWAHPITPESYWLTAFTWQGKQYCWTRLPQGFLNSPALFNADVVDLLKEIPNVQVYVDDIYLSHDDPKEHVQQLEKVFQILLQAGYVVSLKKSEIGQKTVEFLGFNITKEGRGLTDTFKTKLLNITPPKDLKQLQSILGKLNFARNFIPNFAELVQPLYNLIAPAKGKYIEWSEENTKQLNMVIEALNTASNLEERLPEQRLVIKVNTSPSAGYVRYYNETGKKPIMYLNYVFSKAELKFSMLEKLLTTMHKALIKAMDLAMGQEILVYSPIVSMTKIQKTPLPERKALPIRWITWMTYLEDPRIQFHYDKTLPELKHIPDVYTSSQSPVKHPSQYEGVFYTDGSAIKSPDPTKSNNAGMGIVHATYKPEYQVLNQWSIPLGNHTAQMAEIAAVEFACKKALKIPGPVLVITDSFYVAESANKELPYWKSNGFVNNKKKPLKHISKWKSIAECLSMKPDITIQHEKGISLQIPVFILKGNALADKLATQGSYVVNAGKRTADGSEFEKRTADGSEFESPKKKAKVE

SEQ ID NO: 1363 - protein, 2172 aa, synthetic construct
MPAAKRVKLDGGDKKYSIGLDIGTNSVGWAVITDEYKVPSKKFKVLGNTDRHSIKKNLIGALLFDSGETAEATRLKRTARRRYTRRKNRICYLQEIFSNEMAKVDDSFFHRLEESFLVEEDKKHERHPIFGNIVDEVAYHEKYPTIYHLRKKLVDSTDKADLRLIYLALAHMIKFRGHFLIEGDLNPDNSDVDKLFIQLVQTYNQLFEENPINASGVDAKAILSARLSKSRRLENLIAQLPGEKKNGLFGNLIALSLGLTPNFKSNFDLAEDAKLQLSKDTYDDDLDNLLAQIGDQYADLFLAAKNLSDAILLSDILRVNTEITKAPLSASMIKRYDEHHQDLTLLKALVRQQLPEKYKEIFFDQSKNGYAGYIDGGASQEEFYKFIKPILEKMDGTEELLVKLNREDLLRKQRTFDNGSIPHQIHLGELHAILRRQEDFYPFLKDNREKIEKILTFRIPYYVGPLARGNSRFAWMTRKSEETITPWNFEEVVDKGASAQSFIERMTNFDKNLPNEKVLPKHSLLYEYFTVYNELTKVKYVTEGMRKPAFLSGEQKKAIVDLLFKTNRKVTVKQLKEDYFKKIECFDSVEISGVEDRFNASLGTYHDLLKIIKDKDFLDNEENEDILEDIVLTLTLFEDREMIEERLKTYAHLFDDKVMKQLKRRRYTGWGRLSRKLINGIRDKQSGKTILDFLKSDGFANRNFMQLIHDDSLTFKEDIQKAQVSGQGDSLHEHIANLAGSPAIKKGILQTVKVVDELVKVMGRHKPENIVIEMARENQTTQKGQKNSRERMKRIEEGIKELGSQILKEHPVENTQLQNEKLYLYYLQNGRDMYVDQELDINRLSDYDVDHIVPQSFLKDDSIDNKVLTRSDKARGKSDNVPSEEVVKKMKNYWRQLLNAKLITQRKFDNLTKAERGGLSELDKAGFIKRQLVETRQITKHVAQILDSRMNTKYDENDKLIREVKVITLKSKLVSDFRKDFQFYKVREINNYHHAHDAYLNAVVGTALIKKYPKLESEFVYGDYKVYDVRKMIAKSEQEIGKATAKYFFYSNIMNFFKTEITLANGEIRKRPLIETNGETGEIVWDKGRDFATVRKVLSMPQVNIVKKTEVQTGGFSKESILPKRNSDKLIARKKDWDPKKYGGFDSPTVAYSVLVVAKVEKGKSKKLKSVKELLGITIMERSSFEKNPIDFLEAKGYKEVKKDLIIKLPKYSLFELENGRKRMLASAGELQKGNELALPSKYVNFLYLASHYEKLKGSPEDNEQKQLFVEQHKHYLDEIIEQISEFSKRVILADANLDKVLSAYNKHRDKPIREQAENIIHLFTLTNLGAPAAFKYFDTTIDRKRYTSTKEVLDATLIHQSITGLYETRIDLSQLGGDGGPAPAPAPGGMNPLQLLQPLPAEIKGTKLLAHWNSGATITCIPESFLEDEQPIKKTLIKTIHGEKQQNVYYVTFKVKGRKVEAEVIASPYEYILLSPTDVPWLTQQPLQLTILVPLQEYQEKILSKTALPEDQKQQLKTLFVKYDNLWQHWENQVGHRKIRPHNIATGDYPPRPQKQYPINPKAKPSIQIVIDDLLKQGVLTPQNSTMNTPVYPVPKPDGRWRMVLDYREVNKTIPLTAAQNQHSAGILATIVRQKYKTTLDLANGFWAHPITPESYWLTAFTWQGKQYCWTRLPQGFLNSPALFNADVVDLLKEIPNVQVYVDDIYLSHDDPKEHVQQLEKVFQILLQAGYVVSLKKSEIGQKTVEFLGFNITKEGRGLTDTFKTKLLNITPPKDLKQLQSILGKLNFARNFIPNFAELVQPLYNLIAPAKGKYIEWSEENTKQLNMVIEALNTASNLEERLPEQRLVIKVNTSPSAGYVRYYNETGKKPIMYLNYVFSKAELKFSMLEKLLTTMHKALIKAMDLAMGQEILVYSPIVSMTKIQKTPLPERKALPIRWITWMTYLEDPRIQFHYDKTLPELKHIPDVYTSSQSPVKHPSQYEGVFYTDGSAIKSPDPTKSNNAGMGIVHATYKPEYQVLNQWSIPLGNHTAQMAEIAAVEFACKKALKIPGPVLVITDSFYVAESANKELPYWKSNGFVNNKKKPLKHISKWKSIAECLSMKPDITIQHEKGISLQIPVFILKGNALADKLATQGSYVVNAGKRTADGSEFEKRTADGSEFESPKKKAKVE

SEQ ID NO: 1364 - protein, 2174 aa, synthetic construct
MPAAKRVKLDGGDKKYSIGLDIGTNSVGWAVITDEYKVPSKKFKVLGNTDRHSIKKNLIGALLFDSGETAEATRLKRTARRRYTRRKNRICYLQEIFSNEMAKVDDSFFHRLEESFLVEEDKKHERHPIFGNIVDEVAYHEKYPTIYHLRKKLVDSTDKADLRLIYLALAHMIKFRGHFLIEGDLNPDNSDVDKLFIQLVQTYNQLFEENPINASGVDAKAILSARLSKSRRLENLIAQLPGEKKNGLFGNLIALSLGLTPNFKSNFDLAEDAKLQLSKDTYDDDLDNLLAQIGDQYADLFLAAKNLSDAILLSDILRVNTEITKAPLSASMIKRYDEHHQDLTLLKALVRQQLPEKYKEIFFDQSKNGYAGYIDGGASQEEFYKFIKPILEKMDGTEELLVKLNREDLLRKQRTFDNGSIPHQIHLGELHAILRRQEDFYPFLKDNREKIEKILTFRIPYYVGPLARGNSRFAWMTRKSEETITPWNFEEVVDKGASAQSFIERMTNFDKNLPNEKVLPKHSLLYEYFTVYNELTKVKYVTEGMRKPAFLSGEQKKAIVDLLFKTNRKVTVKQLKEDYFKKIECFDSVEISGVEDRFNASLGTYHDLLKIIKDKDFLDNEENEDILEDIVLTLTLFEDREMIEERLKTYAHLFDDKVMKQLKRRRYTGWGRLSRKLINGIRDKQSGKTILDFLKSDGFANRNFMQLIHDDSLTFKEDIQKAQVSGQGDSLHEHIANLAGSPAIKKGILQTVKVVDELVKVMGRHKPENIVIEMARENQTTQKGQKNSRERMKRIEEGIKELGSQILKEHPVENTQLQNEKLYLYYLQNGRDMYVDQELDINRLSDYDVDHIVPQSFLKDDSIDNKVLTRSDKARGKSDNVPSEEVVKKMKNYWRQLLNAKLITQRKFDNLTKAERGGLSELDKAGFIKRQLVETRQITKHVAQILDSRMNTKYDENDKLIREVKVITLKSKLVSDFRKDFQFYKVREINNYHHAHDAYLNAVVGTALIKKYPKLESEFVYGDYKVYDVRKMIAKSEQEIGKATAKYFFYSNIMNFFKTEITLANGEIRKRPLIETNGETGEIVWDKGRDFATVRKVLSMPQVNIVKKTEVQTGGFSKESILPKRNSDKLIARKKDWDPKKYGGFDSPTVAYSVLVVAKVEKGKSKKLKSVKELLGITIMERSSFEKNPIDFLEAKGYKEVKKDLIIKLPKYSLFELENGRKRMLASAGELQKGNELALPSKYVNFLYLASHYEKLKGSPEDNEQKQLFVEQHKHYLDEIIEQISEFSKRVILADANLDKVLSAYNKHRDKPIREQAENIIHLFTLTNLGAPAAFKYFDTTIDRKRYTSTKEVLDATLIHQSITGLYETRIDLSQLGGDGGPAPAPAPAPGGMNPLQLLQPLPAEIKGTKLLAHWNSGATITCIPESFLEDEQPIKKTLIKTIHGEKQQNVYYVTFKVKGRKVEAEVIASPYEYILLSPTDVPWLTQQPLQLTILVPLQEYQEKILSKTALPEDQKQQLKTLFVKYDNLWQHWENQVGHRKIRPHNIATGDYPPRPQKQYPINPKAKPSIQIVIDDLLKQGVLTPQNSTMNTPVYPVPKPDGRWRMVLDYREVNKTIPLTAAQNQHSAGILATIVRQKYKTTLDLANGFWAHPITPESYWLTAFTWQGKQYCWTRLPQGFLNSPALFNADVVDLLKEIPNVQVYVDDIYLSHDDPKEHVQQLEKVFQILLQAGYVVSLKKSEIGQKTVEFLGFNITKEGRGLTDTFKTKLLNITPPKDLKQLQSILGKLNFARNFIPNFAELVQPLYNLIAPAKGKYIEWSEENTKQLNMVIEALNTASNLEERLPEQRLVIKVNTSPSAGYVRYYNETGKKPIMYLNYVFSKAELKFSMLEKLLTTMHKALIKAMDLAMGQEILVYSPIVSMTKIQKTPLPERKALPIRWITWMTYLEDPRIQFHYDKTLPELKHIPDVYTSSQSPVKHPSQYEGVFYTDGSAIKSPDPTKSNNAGMGIVHATYKPEYQVLNQWSIPLGNHTAQMAEIAAVEFACKKALKIPGPVLVITDSFYVAESANKELPYWKSNGFVNNKKKPLKHISKWKSIAECLSMKPDITIQHEKGISLQIPVFILKGNALADKLATQGSYVVNAGKRTADGSEFEKRTADGSEFESPKKKAKVE

SEQ ID NO: 1365 - protein, 2094 aa, synthetic construct
MPAAKRVKLDGGDKKYSIGLDIGTNSVGWAVITDEYKVPSKKFKVLGNTDRHSIKKNLIGALLFDSGETAEATRLKRTARRRYTRRKNRICYLQEIFSNEMAKVDDSFFHRLEESFLVEEDKKHERHPIFGNIVDEVAYHEKYPTIYHLRKKLVDSTDKADLRLIYLALAHMIKFRGHFLIEGDLNPDNSDVDKLFIQLVQTYNQLFEENPINASGVDAKAILSARLSKSRRLENLIAQLPGEKKNGLFGNLIALSLGLTPNFKSNFDLAEDAKLQLSKDTYDDDLDNLLAQIGDQYADLFLAAKNLSDAILLSDILRVNTEITKAPLSASMIKRYDEHHQDLTLLKALVRQQLPEKYKEIFFDQSKNGYAGYIDGGASQEEFYKFIKPILEKMDGTEELLVKLNREDLLRKQRTFDNGSIPHQIHLGELHAILRRQEDFYPFLKDNREKIEKILTFRIPYYVGPLARGNSRFAWMTRKSEETITPWNFEEVVDKGASAQSFIERMTNFDKNLPNEKVLPKHSLLYEYFTVYNELTKVKYVTEGMRKPAFLSGEQKKAIVDLLFKTNRKVTVKQLKEDYFKKIECFDSVEISGVEDRFNASLGTYHDLLKIIKDKDFLDNEENEDILEDIVLTLTLFEDREMIEERLKTYAHLFDDKVMKQLKRRRYTGWGRLSRKLINGIRDKQSGKTILDFLKSDGFANRNFMQLIHDDSLTFKEDIQKAQVSGQGDSLHEHIANLAGSPAIKKGILQTVKVVDELVKVMGRHKPENIVIEMARENQTTQKGQKNSRERMKRIEEGIKELGSQILKEHPVENTQLQNEKLYLYYLQNGRDMYVDQELDINRLSDYDVDHIVPQSFLKDDSIDNKVLTRSDKARGKSDNVPSEEVVKKMKNYWRQLLNAKLITQRKFDNLTKAERGGLSELDKAGFIKRQLVETRQITKHVAQILDSRMNTKYDENDKLIREVKVITLKSKLVSDFRKDFQFYKVREINNYHHAHDAYLNAVVGTALIKKYPKLESEFVYGDYKVYDVRKMIAKSEQEIGKATAKYFFYSNIMNFFKTEITLANGEIRKRPLIETNGETGEIVWDKGRDFATVRKVLSMPQVNIVKKTEVQTGGFSKESILPKRNSDKLIARKKDWDPKKYGGFDSPTVAYSVLVVAKVEKGKSKKLKSVKELLGITIMERSSFEKNPIDFLEAKGYKEVKKDLIIKLPKYSLFELENGRKRMLASAGELQKGNELALPSKYVNFLYLASHYEKLKGSPEDNEQKQLFVEQHKHYLDEIIEQISEFSKRVILADANLDKVLSAYNKHRDKPIREQAENIIHLFTLTNLGAPAAFKYFDTTIDRKRYTSTKEVLDATLIHQSITGLYETRIDLSQLGGDGGEAAAKGGSPAPGGVLNLEEEYRLHEKPVPSSIDPSWLQLFPTVWAERAGMGLANQVPPVVVELRSGASPVAVRQYPMSKEAREGIRPHIQKFLDLGVLVPCRSPWNTPLLPVKKPGTNDYRPVQDLREINKRVQDIHPTVPNPYNLLSSLPPSYTWYSVLDLKDAFFCLRLHPNSQPLFAFEWKDPEKGNTGQLTWTRLPQGFKNSPTLFDEALHRDLAPFRALNPQVVLLQYVDDLLVAAPTYEDCKKGTQKLLQELSKLGYRVSAKKAQLCQREVTYLGYLLKEGKRWLTPARKATVMKIPVPTTPRQVREFLGTAGFCRLWIPGFASLAAPLYPLTKESIPFIWTEEHQQAFDHIKKALLSAPALALPDLTKPFTLYIDERAGVARGVLTQTLGPWRRPVAYLSKKLDPVASGWPTCLKAVAAVALLLKDADKLTLGQNVTVIASHSLESIVRQPPDRWMTNARMTHYQSLLLNERVSFAPPAVLNPATLLPVESEATPVHRCSEILAEETGTRRDLEDQPLPGVPTWYTDGSSFITEGKRRAGAPIVDGKRTVWASSLPEGTSAQKAELVALTQALRLAEGKNINIYTDSRYAFATAHIHGAIYKQRGLLTSAGKDIKNKEEILALLEAIHLPRRVAIIHCPGHQRGSNPVATGNRRADEAAKQAALSTRVLAGTTKPAGKRTADGSEFEKRTADGSEFESPKKKAKVE

SEQ ID NO: 1366 - protein, 2101 aa, synthetic construct
MPAAKRVKLDGGDKKYSIGLDIGTNSVGWAVITDEYKVPSKKFKVLGNTDRHSIKKNLIGALLFDSGETAEATRLKRTARRRYTRRKNRICYLQEIFSNEMAKVDDSFFHRLEESFLVEEDKKHERHPIFGNIVDEVAYHEKYPTIYHLRKKLVDSTDKADLRLIYLALAHMIKFRGHFLIEGDLNPDNSDVDKLFIQLVQTYNQLFEENPINASGVDAKAILSARLSKSRRLENLIAQLPGEKKNGLFGNLIALSLGLTPNFKSNFDLAEDAKLQLSKDTYDDDLDNLLAQIGDQYADLFLAAKNLSDAILLSDILRVNTEITKAPLSASMIKRYDEHHQDLTLLKALVRQQLPEKYKEIFFDQSKNGYAGYIDGGASQEEFYKFIKPILEKMDGTEELLVKLNREDLLRKQRTFDNGSIPHQIHLGELHAILRRQEDFYPFLKDNREKIEKILTFRIPYYVGPLARGNSRFAWMTRKSEETITPWNFEEVVDKGASAQSFIERMTNFDKNLPNEKVLPKHSLLYEYFTVYNELTKVKYVTEGMRKPAFLSGEQKKAIVDLLFKTNRKVTVKQLKEDYFKKIECFDSVEISGVEDRFNASLGTYHDLLKIIKDKDFLDNEENEDILEDIVLTLTLFEDREMIEERLKTYAHLFDDKVMKQLKRRRYTGWGRLSRKLINGIRDKQSGKTILDFLKSDGFANRNFMQLIHDDSLTFKEDIQKAQVSGQGDSLHEHIANLAGSPAIKKGILQTVKVVDELVKVMGRHKPENIVIEMARENQTTQKGQKNSRERMKRIEEGIKELGSQILKEHPVENTQLQNEKLYLYYLQNGRDMYVDQELDINRLSDYDVDHIVPQSFLKDDSIDNKVLTRSDKARGKSDNVPSEEVVKKMKNYWRQLLNAKLITQRKFDNLTKAERGGLSELDKAGFIKRQLVETRQITKHVAQILDSRMNTKYDENDKLIREVKVITLKSKLVSDFRKDFQFYKVREINNYHHAHDAYLNAVVGTALIKKYPKLESEFVYGDYKVYDVRKMIAKSEQEIGKATAKYFFYSNIMNFFKTEITLANGEIRKRPLIETNGETGEIVWDKGRDFATVRKVLSMPQVNIVKKTEVQTGGFSKESILPKRNSDKLIARKKDWDPKKYGGFDSPTVAYSVLVVAKVEKGKSKKLKSVKELLGITIMERSSFEKNPIDFLEAKGYKEVKKDLIIKLPKYSLFELENGRKRMLASAGELQKGNELALPSKYVNFLYLASHYEKLKGSPEDNEQKQLFVEQHKHYLDEIIEQISEFSKRVILADANLDKVLSAYNKHRDKPIREQAENIIHLFTLTNLGAPAAFKYFDTTIDRKRYTSTKEVLDATLIHQSITGLYETRIDLSQLGGDGGGSSGSSGSSGSSGSSGSSGGVLNLEEEYRLHEKPVPSSIDPSWLQLFPTVWAERAGMGLANQVPPVVVELRSGASPVAVRQYPMSKEAREGIRPHIQKFLDLGVLVPCRSPWNTPLLPVKKPGTNDYRPVQDLREINKRVQDIHPTVPNPYNLLSSLPPSYTWYSVLDLKDAFFCLRLHPNSQPLFAFEWKDPEKGNTGQLTWTRLPQGFKNSPTLFDEALHRDLAPFRALNPQVVLLQYVDDLLVAAPTYEDCKKGTQKLLQELSKLGYRVSAKKAQLCQREVTYLGYLLKEGKRWLTPARKATVMKIPVPTTPRQVREFLGTAGFCRLWIPGFASLAAPLYPLTKESIPFIWTEEHQQAFDHIKKALLSAPALALPDLTKPFTLYIDERAGVARGVLTQTLGPWRRPVAYLSKKLDPVASGWPTCLKAVAAVALLLKDADKLTLGQNVTVIASHSLESIVRQPPDRWMTNARMTHYQSLLLNERVSFAPPAVLNPATLLPVESEATPVHRCSEILAEETGTRRDLEDQPLPGVPTWYTDGSSFITEGKRRAGAPIVDGKRTVWASSLPEGTSAQKAELVALTQALRLAEGKNINIYTDSRYAFATAHIHGAIYKQRGLLTSAGKDIKNKEEILALLEAIHLPRRVAIIHCPGHQRGSNPVATGNRRADEAAKQAALSTRVLAGTTKPAGKRTADGSEFEKRTADGSEFESPKKKAKVE

SEQ ID NO: 1367 - protein, 2103 aa, synthetic construct
MPAAKRVKLDGGDKKYSIGLDIGTNSVGWAVITDEYKVPSKKFKVLGNTDRHSIKKNLIGALLFDSGETAEATRLKRTARRRYTRRKNRICYLQEIFSNEMAKVDDSFFHRLEESFLVEEDKKHERHPIFGNIVDEVAYHEKYPTIYHLRKKLVDSTDKADLRLIYLALAHMIKFRGHFLIEGDLNPDNSDVDKLFIQLVQTYNQLFEENPINASGVDAKAILSARLSKSRRLENLIAQLPGEKKNGLFGNLIALSLGLTPNFKSNFDLAEDAKLQLSKDTYDDDLDNLLAQIGDQYADLFLAAKNLSDAILLSDILRVNTEITKAPLSASMIKRYDEHHQDLTLLKALVRQQLPEKYKEIFFDQSKNGYAGYIDGGASQEEFYKFIKPILEKMDGTEELLVKLNREDLLRKQRTFDNGSIPHQIHLGELHAILRRQEDFYPFLKDNREKIEKILTFRIPYYVGPLARGNSRFAWMTRKSEETITPWNFEEVVDKGASAQSFIERMTNFDKNLPNEKVLPKHSLLYEYFTVYNELTKVKYVTEGMRKPAFLSGEQKKAIVDLLFKTNRKVTVKQLKEDYFKKIECFDSVEISGVEDRFNASLGTYHDLLKIIKDKDFLDNEENEDILEDIVLTLTLFEDREMIEERLKTYAHLFDDKVMKQLKRRRYTGWGRLSRKLINGIRDKQSGKTILDFLKSDGFANRNFMQLIHDDSLTFKEDIQKAQVSGQGDSLHEHIANLAGSPAIKKGILQTVKVVDELVKVMGRHKPENIVIEMARENQTTQKGQKNSRERMKRIEEGIKELGSQILKEHPVENTQLQNEKLYLYYLQNGRDMYVDQELDINRLSDYDVDHIVPQSFLKDDSIDNKVLTRSDKARGKSDNVPSEEVVKKMKNYWRQLLNAKLITQRKFDNLTKAERGGLSELDKAGFIKRQLVETRQITKHVAQILDSRMNTKYDENDKLIREVKVITLKSKLVSDFRKDFQFYKVREINNYHHAHDAYLNAVVGTALIKKYPKLESEFVYGDYKVYDVRKMIAKSEQEIGKATAKYFFYSNIMNFFKTEITLANGEIRKRPLIETNGETGEIVWDKGRDFATVRKVLSMPQVNIVKKTEVQTGGFSKESILPKRNSDKLIARKKDWDPKKYGGFDSPTVAYSVLVVAKVEKGKSKKLKSVKELLGITIMERSSFEKNPIDFLEAKGYKEVKKDLIIKLPKYSLFELENGRKRMLASAGELQKGNELALPSKYVNFLYLASHYEKLKGSPEDNEQKQLFVEQHKHYLDEIIEQISEFSKRVILADANLDKVLSAYNKHRDKPIREQAENIIHLFTLTNLGAPAAFKYFDTTIDRKRYTSTKEVLDATLIHQSITGLYETRIDLSQLGGDGGEAAAKEAAAKEAAAKEAAAKGGVLNLEEEYRLHEKPVPSSIDPSWLQLFPTVWAERAGMGLANQVPPVVVELRSGASPVAVRQYPMSKEAREGIRPHIQKFLDLGVLVPCRSPWNTPLLPVKKPGTNDYRPVQDLREINKRVQDIHPTVPNPYNLLSSLPPSYTWYSVLDLKDAFFCLRLHPNSQPLFAFEWKDPEKGNTGQLTWTRLPQGFKNSPTLFDEALHRDLAPFRALNPQVVLLQYVDDLLVAAPTYEDCKKGTQKLLQELSKLGYRVSAKKAQLCQREVTYLGYLLKEGKRWLTPARKATVMKIPVPTTPRQVREFLGTAGFCRLWIPGFASLAAPLYPLTKESIPFIWTEEHQQAFDHIKKALLSAPALALPDLTKPFTLYIDERAGVARGVLTQTLGPWRRPVAYLSKKLDPVASGWPTCLKAVAAVALLLKDADKLTLGQNVTVIASHSLESIVRQPPDRWMTNARMTHYQSLLLNERVSFAPPAVLNPATLLPVESEATPVHRCSEILAEETGTRRDLEDQPLPGVPTWYTDGSSFITEGKRRAGAPIVDGKRTVWASSLPEGTSAQKAELVALTQALRLAEGKNINIYTDSRYAFATAHIHGAIYKQRGLLTSAGKDIKNKEEILALLEAIHLPRRVAIIHCPGHQRGSNPVATGNRRADEAAKQAALSTRVLAGTTKPAGKRTADGSEFEKRTADGSEFESPKKKAKVE

SEQ ID NO: 1368 - protein, 2098 aa, synthetic construct
MPAAKRVKLDGGDKKYSIGLDIGTNSVGWAVITDEYKVPSKKFKVLGNTDRHSIKKNLIGALLFDSGETAEATRLKRTARRRYTRRKNRICYLQEIFSNEMAKVDDSFFHRLEESFLVEEDKKHERHPIFGNIVDEVAYHEKYPTIYHLRKKLVDSTDKADLRLIYLALAHMIKFRGHFLIEGDLNPDNSDVDKLFIQLVQTYNQLFEENPINASGVDAKAILSARLSKSRRLENLIAQLPGEKKNGLFGNLIALSLGLTPNFKSNFDLAEDAKLQLSKDTYDDDLDNLLAQIGDQYADLFLAAKNLSDAILLSDILRVNTEITKAPLSASMIKRYDEHHQDLTLLKALVRQQLPEKYKEIFFDQSKNGYAGYIDGGASQEEFYKFIKPILEKMDGTEELLVKLNREDLLRKQRTFDNGSIPHQIHLGELHAILRRQEDFYPFLKDNREKIEKILTFRIPYYVGPLARGNSRFAWMTRKSEETITPWNFEEVVDKGASAQSFIERMTNFDKNLPNEKVLPKHSLLYEYFTVYNELTKVKYVTEGMRKPAFLSGEQKKAIVDLLFKTNRKVTVKQLKEDYFKKIECFDSVEISGVEDRFNASLGTYHDLLKIIKDKDFLDNEENEDILEDIVLTLTLFEDREMIEERLKTYAHLFDDKVMKQLKRRRYTGWGRLSRKLINGIRDKQSGKTILDFLKSDGFANRNFMQLIHDDSLTFKEDIQKAQVSGQGDSLHEHIANLAGSPAIKKGILQTVKVVDELVKVMGRHKPENIVIEMARENQTTQKGQKNSRERMKRIEEGIKELGSQILKEHPVENTQLQNEKLYLYYLQNGRDMYVDQELDINRLSDYDVDHIVPQSFLKDDSIDNKVLTRSDKARGKSDNVPSEEVVKKMKNYWRQLLNAKLITQRKFDNLTKAERGGLSELDKAGFIKRQLVETRQITKHVAQILDSRMNTKYDENDKLIREVKVITLKSKLVSDFRKDFQFYKVREINNYHHAHDAYLNAVVGTALIKKYPKLESEFVYGDYKVYDVRKMIAKSEQEIGKATAKYFFYSNIMNFFKTEITLANGEIRKRPLIETNGETGEIVWDKGRDFATVRKVLSMPQVNIVKKTEVQTGGFSKESILPKRNSDKLIARKKDWDPKKYGGFDSPTVAYSVLVVAKVEKGKSKKLKSVKELLGITIMERSSFEKNPIDFLEAKGYKEVKKDLIIKLPKYSLFELENGRKRMLASAGELQKGNELALPSKYVNFLYLASHYEKLKGSPEDNEQKQLFVEQHKHYLDEIIEQISEFSKRVILADANLDKVLSAYNKHRDKPIREQAENIIHLFTLTNLGAPAAFKYFDTTIDRKRYTSTKEVLDATLIHQSITGLYETRIDLSQLGGDGGGSSGSSGSSGSSGSSGGVLNLEEEYRLHEKPVPSSIDPSWLQLFPTVWAERAGMGLANQVPPVVVELRSGASPVAVRQYPMSKEAREGIRPHIQKFLDLGVLVPCRSPWNTPLLPVKKPGTNDYRPVQDLREINKRVQDIHPTVPNPYNLLSSLPPSYTWYSVLDLKDAFFCLRLHPNSQPLFAFEWKDPEKGNTGQLTWTRLPQGFKNSPTLFDEALHRDLAPFRALNPQVVLLQYVDDLLVAAPTYEDCKKGTQKLLQELSKLGYRVSAKKAQLCQREVTYLGYLLKEGKRWLTPARKATVMKIPVPTTPRQVREFLGTAGFCRLWIPGFASLAAPLYPLTKESIPFIWTEEHQQAFDHIKKALLSAPALALPDLTKPFTLYIDERAGVARGVLTQTLGPWRRPVAYLSKKLDPVASGWPTCLKAVAAVALLLKDADKLTLGQNVTVIASHSLESIVRQPPDRWMTNARMTHYQSLLLNERVSFAPPAVLNPATLLPVESEATPVHRCSEILAEETGTRRDLEDQPLPGVPTWYTDGSSFITEGKRRAGAPIVDGKRTVWASSLPEGTSAQKAELVALTQALRLAEGKNINIYTDSRYAFATAHIHGAIYKQRGLLTSAGKDIKNKEEILALLEAIHLPRRVAIIHCPGHQRGSNPVATGNRRADEAAKQAALSTRVLAGTTKPAGKRTADGSEFEKRTADGSEFESPKKKAKVE

SEQ ID NO: 1369 - protein, 2094 aa, synthetic construct
MPAAKRVKLDGGDKKYSIGLDIGTNSVGWAVITDEYKVPSKKFKVLGNTDRHSIKKNLIGALLFDSGETAEATRLKRTARRRYTRRKNRICYLQEIFSNEMAKVDDSFFHRLEESFLVEEDKKHERHPIFGNIVDEVAYHEKYPTIYHLRKKLVDSTDKADLRLIYLALAHMIKFRGHFLIEGDLNPDNSDVDKLFIQLVQTYNQLFEENPINASGVDAKAILSARLSKSRRLENLIAQLPGEKKNGLFGNLIALSLGLTPNFKSNFDLAEDAKLQLSKDTYDDDLDNLLAQIGDQYADLFLAAKNLSDAILLSDILRVNTEITKAPLSASMIKRYDEHHQDLTLLKALVRQQLPEKYKEIFFDQSKNGYAGYIDGGASQEEFYKFIKPILEKMDGTEELLVKLNREDLLRKQRTFDNGSIPHQIHLGELHAILRRQEDFYPFLKDNREKIEKILTFRIPYYVGPLARGNSRFAWMTRKSEETITPWNFEEVVDKGASAQSFIERMTNFDKNLPNEKVLPKHSLLYEYFTVYNELTKVKYVTEGMRKPAFLSGEQKKAIVDLLFKTNRKVTVKQLKEDYFKKIECFDSVEISGVEDRFNASLGTYHDLLKIIKDKDFLDNEENEDILEDIVLTLTLFEDREMIEERLKTYAHLFDDKVMKQLKRRRYTGWGRLSRKLINGIRDKQSGKTILDFLKSDGFANRNFMQLIHDDSLTFKEDIQKAQVSGQGDSLHEHIANLAGSPAIKKGILQTVKVVDELVKVMGRHKPENIVIEMARENQTTQKGQKNSRERMKRIEEGIKELGSQILKEHPVENTQLQNEKLYLYYLQNGRDMYVDQELDINRLSDYDVDHIVPQSFLKDDSIDNKVLTRSDKARGKSDNVPSEEVVKKMKNYWRQLLNAKLITQRKFDNLTKAERGGLSELDKAGFIKRQLVETRQITKHVAQILDSRMNTKYDENDKLIREVKVITLKSKLVSDFRKDFQFYKVREINNYHHAHDAYLNAVVGTALIKKYPKLESEFVYGDYKVYDVRKMIAKSEQEIGKATAKYFFYSNIMNFFKTEITLANGEIRKRPLIETNGETGEIVWDKGRDFATVRKVLSMPQVNIVKKTEVQTGGFSKESILPKRNSDKLIARKKDWDPKKYGGFDSPTVAYSVLVVAKVEKGKSKKLKSVKELLGITIMERSSFEKNPIDFLEAKGYKEVKKDLIIKLPKYSLFELENGRKRMLASAGELQKGNELALPSKYVNFLYLASHYEKLKGSPEDNEQKQLFVEQHKHYLDEIIEQISEFSKRVILADANLDKVLSAYNKHRDKPIREQAENIIHLFTLTNLGAPAAFKYFDTTIDRKRYTSTKEVLDATLIHQSITGLYETRIDLSQLGGDGGEAAAKGSSGGSGGVLNLEEEYRLHEKPVPSSIDPSWLQLFPTVWAERAGMGLANQVPPVVVELRSGASPVAVRQYPMSKEAREGIRPHIQKFLDLGVLVPCRSPWNTPLLPVKKPGTNDYRPVQDLREINKRVQDIHPTVPNPYNLLSSLPPSYTWYSVLDLKDAFFCLRLHPNSQPLFAFEWKDPEKGNTGQLTWTRLPQGFKNSPTLFDEALHRDLAPFRALNPQVVLLQYVDDLLVAAPTYEDCKKGTQKLLQELSKLGYRVSAKKAQLCQREVTYLGYLLKEGKRWLTPARKATVMKIPVPTTPRQVREFLGTAGFCRLWIPGFASLAAPLYPLTKESIPFIWTEEHQQAFDHIKKALLSAPALALPDLTKPFTLYIDERAGVARGVLTQTLGPWRRPVAYLSKKLDPVASGWPTCLKAVAAVALLLKDADKLTLGQNVTVIASHSLESIVRQPPDRWMTNARMTHYQSLLLNERVSFAPPAVLNPATLLPVESEATPVHRCSEILAEETGTRRDLEDQPLPGVPTWYTDGSSFITEGKRRAGAPIVDGKRTVWASSLPEGTSAQKAELVALTQALRLAEGKNINIYTDSRYAFATAHIHGAIYKQRGLLTSAGKDIKNKEEILALLEAIHLPRRVAIIHCPGHQRGSNPVATGNRRADEAAKQAALSTRVLAGTTKPAGKRTADGSEFEKRTADGSEFESPKKKAKVE

SEQ ID NO: 1370 - protein, 2129 aa, synthetic construct
MPAAKRVKLDGGDKKYSIGLDIGTNSVGWAVITDEYKVPSKKFKVLGNTDRHSIKKNLIGALLFDSGETAEATRLKRTARRRYTRRKNRICYLQEIFSNEMAKVDDSFFHRLEESFLVEEDKKHERHPIFGNIVDEVAYHEKYPTIYHLRKKLVDSTDKADLRLIYLALAHMIKFRGHFLIEGDLNPDNSDVDKLFIQLVQTYNQLFEENPINASGVDAKAILSARLSKSRRLENLIAQLPGEKKNGLFGNLIALSLGLTPNFKSNFDLAEDAKLQLSKDTYDDDLDNLLAQIGDQYADLFLAAKNLSDAILLSDILRVNTEITKAPLSASMIKRYDEHHQDLTLLKALVRQQLPEKYKEIFFDQSKNGYAGYIDGGASQEEFYKFIKPILEKMDGTEELLVKLNREDLLRKQRTFDNGSIPHQIHLGELHAILRRQEDFYPFLKDNREKIEKILTFRIPYYVGPLARGNSRFAWMTRKSEETITPWNFEEVVDKGASAQSFIERMTNFDKNLPNEKVLPKHSLLYEYFTVYNELTKVKYVTEGMRKPAFLSGEQKKAIVDLLFKTNRKVTVKQLKEDYFKKIECFDSVEISGVEDRFNASLGTYHDLLKIIKDKDFLDNEENEDILEDIVLTLTLFEDREMIEERLKTYAHLFDDKVMKQLKRRRYTGWGRLSRKLINGIRDKQSGKTILDFLKSDGFANRNFMQLIHDDSLTFKEDIQKAQVSGQGDSLHEHIANLAGSPAIKKGILQTVKVVDELVKVMGRHKPENIVIEMARENQTTQKGQKNSRERMKRIEEGIKELGSQILKEHPVENTQLQNEKLYLYYLQNGRDMYVDQELDINRLSDYDVDHIVPQSFLKDDSIDNKVLTRSDKARGKSDNVPSEEVVKKMKNYWRQLLNAKLITQRKFDNLTKAERGGLSELDKAGFIKRQLVETRQITKHVAQILDSRMNTKYDENDKLIREVKVITLKSKLVSDFRKDFQFYKVREINNYHHAHDAYLNAVVGTALIKKYPKLESEFVYGDYKVYDVRKMIAKSEQEIGKATAKYFFYSNIMNFFKTEITLANGEIRKRPLIETNGETGEIVWDKGRDFATVRKVLSMPQVNIVKKTEVQTGGFSKESILPKRNSDKLIARKKDWDPKKYGGFDSPTVAYSVLVVAKVEKGKSKKLKSVKELLGITIMERSSFEKNPIDFLEAKGYKEVKKDLIIKLPKYSLFELENGRKRMLASAGELQKGNELALPSKYVNFLYLASHYEKLKGSPEDNEQKQLFVEQHKHYLDEIIEQISEFSKRVILADANLDKVLSAYNKHRDKPIREQAENIIHLFTLTNLGAPAAFKYFDTTIDRKRYTSTKEVLDATLIHQSITGLYETRIDLSQLGGDGGAEAAAKEAAAKEAAAKEAAAKALEAEAAAKEAAAKEAAAKEAAAKAGGVLNLEEEYRLHEKPVPSSIDPSWLQLFPTVWAERAGMGLANQVPPVVVELRSGASPVAVRQYPMSKEAREGIRPHIQKFLDLGVLVPCRSPWNTPLLPVKKPGTNDYRPVQDLREINKRVQDIHPTVPNPYNLLSSLPPSYTWYSVLDLKDAFFCLRLHPNSQPLFAFEWKDPEKGNTGQLTWTRLPQGFKNSPTLFNEALHRDLAPFRALNPQVVLLQYVDDLLVAAPTYEDCKKGTQKLLQELSKLGYRVSAKKAQLCQREVTYLGYLLKEGKRWLTPARKATVMKIPVPTTPRQVREFLGTAGFCRLWIPGFASLAAPLYPLTKPSIPFIWTEEHQQAFDHIKKALLSAPALALPDLTKPFTLYIDERAGVARGVLTQTLGPWRRPVAYLSKKLDPVASGWPTCLKAVAAVALLLKDADKLTLGQNVTVIASHSLESIVRQPPDRWMTNARMTHYQSLLLNERVSFAPPAVLNPATLLPVESEATPVHRCSEILAEETGTRRDLEDQPLPGVPTWYTDGSSFITEGKRRAGAPIVDGKRTVWASSLPEGTSAQKAELVALTQALRLAEGKNINIYTDSRYAFATAHIHGAIYKQRGWLTSAGKDIKNKEEILALLEAIHLPRRVAIIHCPGHQRGSNPVATGNRRADEAAKQAALSTRVLAGTTKPAGKRTADGSEFEKRTADGSEFESPKKKAKVE

SEQ ID NO: 1371 - protein, 2098 aa, synthetic construct
MPAAKRVKLDGGDKKYSIGLDIGTNSVGWAVITDEYKVPSKKFKVLGNTDRHSIKKNLIGALLFDSGETAEATRLKRTARRRYTRRKNRICYLQEIFSNEMAKVDDSFFHRLEESFLVEEDKKHERHPIFGNIVDEVAYHEKYPTIYHLRKKLVDSTDKADLRLIYLALAHMIKFRGHFLIEGDLNPDNSDVDKLFIQLVQTYNQLFEENPINASGVDAKAILSARLSKSRRLENLIAQLPGEKKNGLFGNLIALSLGLTPNFKSNFDLAEDAKLQLSKDTYDDDLDNLLAQIGDQYADLFLAAKNLSDAILLSDILRVNTEITKAPLSASMIKRYDEHHQDLTLLKALVRQQLPEKYKEIFFDQSKNGYAGYIDGGASQEEFYKFIKPILEKMDGTEELLVKLNREDLLRKQRTFDNGSIPHQIHLGELHAILRRQEDFYPFLKDNREKIEKILTFRIPYYVGPLARGNSRFAWMTRKSEETITPWNFEEVVDKGASAQSFIERMTNFDKNLPNEKVLPKHSLLYEYFTVYNELTKVKYVTEGMRKPAFLSGEQKKAIVDLLFKTNRKVTVKQLKEDYFKKIECFDSVEISGVEDRFNASLGTYHDLLKIIKDKDFLDNEENEDILEDIVLTLTLFEDREMIEERLKTYAHLFDDKVMKQLKRRRYTGWGRLSRKLINGIRDKQSGKTILDFLKSDGFANRNFMQLIHDDSLTFKEDIQKAQVSGQGDSLHEHIANLAGSPAIKKGILQTVKVVDELVKVMGRHKPENIVIEMARENQTTQKGQKNSRERMKRIEEGIKELGSQILKEHPVENTQLQNEKLYLYYLQNGRDMYVDQELDINRLSDYDVDHIVPQSFLKDDSIDNKVLTRSDKARGKSDNVPSEEVVKKMKNYWRQLLNAKLITQRKFDNLTKAERGGLSELDKAGFIKRQLVETRQITKHVAQILDSRMNTKYDENDKLIREVKVITLKSKLVSDFRKDFQFYKVREINNYHHAHDAYLNAVVGTALIKKYPKLESEFVYGDYKVYDVRKMIAKSEQEIGKATAKYFFYSNIMNFFKTEITLANGEIRKRPLIETNGETGEIVWDKGRDFATVRKVLSMPQVNIVKKTEVQTGGFSKESILPKRNSDKLIARKKDWDPKKYGGFDSPTVAYSVLVVAKVEKGKSKKLKSVKELLGITIMERSSFEKNPIDFLEAKGYKEVKKDLIIKLPKYSLFELENGRKRMLASAGELQKGNELALPSKYVNFLYLASHYEKLKGSPEDNEQKQLFVEQHKHYLDEIIEQISEFSKRVILADANLDKVLSAYNKHRDKPIREQAENIIHLFTLTNLGAPAAFKYFDTTIDRKRYTSTKEVLDATLIHQSITGLYETRIDLSQLGGDGGPAPGGSEAAAKGGTAPLEEEYRLFLEAPIQNVTLLEQWKREIPKVWAEINPPGLASTQAPIHVQLLSTALPVRVRQYPITLEAKRSLRETIRKFRAAGILRPVHSPWNTPLLPVRKSGTSEYRMVQDLREVNKRVETIHPTVPNPYTLLSLLPPDRIWYSVLDLKDAFFCIPLAPESQLIFAFEWADAEEGESGQLTWTRLPQGFKNSPTLFNEALNRDLQGFRLDHPSVSLLQYVDDLLIAADTQAACLSATRDLLMTLAELGYRVSGKKAQLCQEEVTYLGFKIHKGSRSLSNSRTQAILQIPVPKTKRQVREFLGKIGYCRLFIPGFAELAQPLYAATRPGNDPLVWGEKEEEAFQSLKLALTQPPALALPSLDKPFQLFVEETSGAAKGVLTQALGPWKRPVAYLSKRLDPVAAGWPRCLRAIAAAALLTREASKLTFGQDIEITSSHNLESLLRSPPDKWLTNARITQYQVLLLDPPRVRFKQTAALNPATLLPETDDTLPIHHCLDTLDSLTSTRPDLTDQPLAQAEATLFTDGSSYIRDGKRYAGAAVVTLDSVIWAEPLPIGTSAQKAELIALTKALEWSKDKSVNIYTDSRYAFATLHVHGMIYRERGWLTAGGKAIKNAPEILALLTAVWLPKRVAVMHCKGHQKDDAPTSTGNRRADEVAREVAIRPLSTQATISAGKRTADGSEFEKRTADGSEFESPKKKAKVE

SEQ ID NO: 1372 - protein, 2133 aa, synthetic construct
MPAAKRVKLDGGDKKYSIGLDIGTNSVGWAVITDEYKVPSKKFKVLGNTDRHSIKKNLIGALLFDSGETAEATRLKRTARRRYTRRKNRICYLQEIFSNEMAKVDDSFFHRLEESFLVEEDKKHERHPIFGNIVDEVAYHEKYPTIYHLRKKLVDSTDKADLRLIYLALAHMIKFRGHFLIEGDLNPDNSDVDKLFIQLVQTYNQLFEENPINASGVDAKAILSARLSKSRRLENLIAQLPGEKKNGLFGNLIALSLGLTPNFKSNFDLAEDAKLQLSKDTYDDDLDNLLAQIGDQYADLFLAAKNLSDAILLSDILRVNTEITKAPLSASMIKRYDEHHQDLTLLKALVRQQLPEKYKEIFFDQSKNGYAGYIDGGASQEEFYKFIKPILEKMDGTEELLVKLNREDLLRKQRTFDNGSIPHQIHLGELHAILRRQEDFYPFLKDNREKIEKILTFRIPYYVGPLARGNSRFAWMTRKSEETITPWNFEEVVDKGASAQSFIERMTNFDKNLPNEKVLPKHSLLYEYFTVYNELTKVKYVTEGMRKPAFLSGEQKKAIVDLLFKTNRKVTVKQLKEDYFKKIECFDSVEISGVEDRFNASLGTYHDLLKIIKDKDFLDNEENEDILEDIVLTLTLFEDREMIEERLKTYAHLFDDKVMKQLKRRRYTGWGRLSRKLINGIRDKQSGKTILDFLKSDGFANRNFMQLIHDDSLTFKEDIQKAQVSGQGDSLHEHIANLAGSPAIKKGILQTVKVVDELVKVMGRHKPENIVIEMARENQTTQKGQKNSRERMKRIEEGIKELGSQILKEHPVENTQLQNEKLYLYYLQNGRDMYVDQELDINRLSDYDVDHIVPQSFLKDDSIDNKVLTRSDKARGKSDNVPSEEVVKKMKNYWRQLLNAKLITQRKFDNLTKAERGGLSELDKAGFIKRQLVETRQITKHVAQILDSRMNTKYDENDKLIREVKVITLKSKLVSDFRKDFQFYKVREINNYHHAHDAYLNAVVGTALIKKYPKLESEFVYGDYKVYDVRKMIAKSEQEIGKATAKYFFYSNIMNFFKTEITLANGEIRKRPLIETNGETGEIVWDKGRDFATVRKVLSMPQVNIVKKTEVQTGGFSKESILPKRNSDKLIARKKDWDPKKYGGFDSPTVAYSVLVVAKVEKGKSKKLKSVKELLGITIMERSSFEKNPIDFLEAKGYKEVKKDLIIKLPKYSLFELENGRKRMLASAGELQKGNELALPSKYVNFLYLASHYEKLKGSPEDNEQKQLFVEQHKHYLDEIIEQISEFSKRVILADANLDKVLSAYNKHRDKPIREQAENIIHLFTLTNLGAPAAFKYFDTTIDRKRYTSTKEVLDATLIHQSITGLYETRIDLSQLGGDGGAEAAAKEAAAKEAAAKEAAAKALEAEAAAKEAAAKEAAAKEAAAKAGGTAPLEEEYRLFLEAPIQNVTLLEQWKREIPKVWAEINPPGLASTQAPIHVQLLSTALPVRVRQYPITLEAKRSLRETIRKFRAAGILRPVHSPWNTPLLPVRKSGTSEYRMVQDLREVNKRVETIHPTVPNPYTLLSLLPPDRIWYSVLDLKDAFFCIPLAPESQLIFAFEWADAEEGESGQLTWTRLPQGFKNSPTLFNEALNRDLQGFRLDHPSVSLLQYVDDLLIAADTQAACLSATRDLLMTLAELGYRVSGKKAQLCQEEVTYLGFKIHKGSRSLSNSRTQAILQIPVPKTKRQVREFLGKIGYCRLFIPGFAELAQPLYAATRPGNDPLVWGEKEEEAFQSLKLALTQPPALALPSLDKPFQLFVEETSGAAKGVLTQALGPWKRPVAYLSKRLDPVAAGWPRCLRAIAAAALLTREASKLTFGQDIEITSSHNLESLLRSPPDKWLTNARITQYQVLLLDPPRVRFKQTAALNPATLLPETDDTLPIHHCLDTLDSLTSTRPDLTDQPLAQAEATLFTDGSSYIRDGKRYAGAAVVTLDSVIWAEPLPIGTSAQKAELIALTKALEWSKDKSVNIYTDSRYAFATLHVHGMIYRERGWLTAGGKAIKNAPEILALLTAVWLPKRVAVMHCKGHQKDDAPTSTGNRRADEVAREVAIRPLSTQATISAGKRTADGSEFEKRTADGSEFESPKKKAKVE

SEQ ID NO: 1373 - protein, 2117 aa, synthetic construct
MPAAKRVKLDGGDKKYSIGLDIGTNSVGWAVITDEYKVPSKKFKVLGNTDRHSIKKNLIGALLFDSGETAEATRLKRTARRRYTRRKNRICYLQEIFSNEMAKVDDSFFHRLEESFLVEEDKKHERHPIFGNIVDEVAYHEKYPTIYHLRKKLVDSTDKADLRLIYLALAHMIKFRGHFLIEGDLNPDNSDVDKLFIQLVQTYNQLFEENPINASGVDAKAILSARLSKSRRLENLIAQLPGEKKNGLFGNLIALSLGLTPNFKSNFDLAEDAKLQLSKDTYDDDLDNLLAQIGDQYADLFLAAKNLSDAILLSDILRVNTEITKAPLSASMIKRYDEHHQDLTLLKALVRQQLPEKYKEIFFDQSKNGYAGYIDGGASQEEFYKFIKPILEKMDGTEELLVKLNREDLLRKQRTFDNGSIPHQIHLGELHAILRRQEDFYPFLKDNREKIEKILTFRIPYYVGPLARGNSRFAWMTRKSEETITPWNFEEVVDKGASAQSFIERMTNFDKNLPNEKVLPKHSLLYEYFTVYNELTKVKYVTEGMRKPAFLSGEQKKAIVDLLFKTNRKVTVKQLKEDYFKKIECFDSVEISGVEDRFNASLGTYHDLLKIIKDKDFLDNEENEDILEDIVLTLTLFEDREMIEERLKTYAHLFDDKVMKQLKRRRYTGWGRLSRKLINGIRDKQSGKTILDFLKSDGFANRNFMQLIHDDSLTFKEDIQKAQVSGQGDSLHEHIANLAGSPAIKKGILQTVKVVDELVKVMGRHKPENIVIEMARENQTTQKGQKNSRERMKRIEEGIKELGSQILKEHPVENTQLQNEKLYLYYLQNGRDMYVDQELDINRLSDYDVDHIVPQSFLKDDSIDNKVLTRSDKARGKSDNVPSEEVVKKMKNYWRQLLNAKLITQRKFDNLTKAERGGLSELDKAGFIKRQLVETRQITKHVAQILDSRMNTKYDENDKLIREVKVITLKSKLVSDFRKDFQFYKVREINNYHHAHDAYLNAVVGTALIKKYPKLESEFVYGDYKVYDVRKMIAKSEQEIGKATAKYFFYSNIMNFFKTEITLANGEIRKRPLIETNGETGEIVWDKGRDFATVRKVLSMPQVNIVKKTEVQTGGFSKESILPKRNSDKLIARKKDWDPKKYGGFDSPTVAYSVLVVAKVEKGKSKKLKSVKELLGITIMERSSFEKNPIDFLEAKGYKEVKKDLIIKLPKYSLFELENGRKRMLASAGELQKGNELALPSKYVNFLYLASHYEKLKGSPEDNEQKQLFVEQHKHYLDEIIEQISEFSKRVILADANLDKVLSAYNKHRDKPIREQAENIIHLFTLTNLGAPAAFKYFDTTIDRKRYTSTKEVLDATLIHQSITGLYETRIDLSQLGGDGGGGGGSGGGGSGGGGSGGGGSGGGGSGGGGSGGTAPLEEEYRLFLEAPIQNVTLLEQWKREIPKVWAEINPPGLASTQAPIHVQLLSTALPVRVRQYPITLEAKRSLRETIRKFRAAGILRPVHSPWNTPLLPVRKSGTSEYRMVQDLREVNKRVETIHPTVPNPYTLLSLLPPDRIWYSVLDLKDAFFCIPLAPESQLIFAFEWADAEEGESGQLTWTRLPQGFKNSPTLFNEALNRDLQGFRLDHPSVSLLQYVDDLLIAADTQAACLSATRDLLMTLAELGYRVSGKKAQLCQEEVTYLGFKIHKGSRSLSNSRTQAILQIPVPKTKRQVREFLGKIGYCRLFIPGFAELAQPLYAATRPGNDPLVWGEKEEEAFQSLKLALTQPPALALPSLDKPFQLFVEETSGAAKGVLTQALGPWKRPVAYLSKRLDPVAAGWPRCLRAIAAAALLTREASKLTFGQDIEITSSHNLESLLRSPPDKWLTNARITQYQVLLLDPPRVRFKQTAALNPATLLPETDDTLPIHHCLDTLDSLTSTRPDLTDQPLAQAEATLFTDGSSYIRDGKRYAGAAVVTLDSVIWAEPLPIGTSAQKAELIALTKALEWSKDKSVNIYTDSRYAFATLHVHGMIYRERGWLTAGGKAIKNAPEILALLTAVWLPKRVAVMHCKGHQKDDAPTSTGNRRADEVAREVAIRPLSTQATISAGKRTADGSEFEKRTADGSEFESPKKKAKVE

SEQ ID NO: 1374 - protein, 2107 aa, synthetic construct
MPAAKRVKLDGGDKKYSIGLDIGTNSVGWAVITDEYKVPSKKFKVLGNTDRHSIKKNLIGALLFDSGETAEATRLKRTARRRYTRRKNRICYLQEIFSNEMAKVDDSFFHRLEESFLVEEDKKHERHPIFGNIVDEVAYHEKYPTIYHLRKKLVDSTDKADLRLIYLALAHMIKFRGHFLIEGDLNPDNSDVDKLFIQLVQTYNQLFEENPINASGVDAKAILSARLSKSRRLENLIAQLPGEKKNGLFGNLIALSLGLTPNFKSNFDLAEDAKLQLSKDTYDDDLDNLLAQIGDQYADLFLAAKNLSDAILLSDILRVNTEITKAPLSASMIKRYDEHHQDLTLLKALVRQQLPEKYKEIFFDQSKNGYAGYIDGGASQEEFYKFIKPILEKMDGTEELLVKLNREDLLRKQRTFDNGSIPHQIHLGELHAILRRQEDFYPFLKDNREKIEKILTFRIPYYVGPLARGNSRFAWMTRKSEETITPWNFEEVVDKGASAQSFIERMTNFDKNLPNEKVLPKHSLLYEYFTVYNELTKVKYVTEGMRKPAFLSGEQKKAIVDLLFKTNRKVTVKQLKEDYFKKIECFDSVEISGVEDRFNASLGTYHDLLKIIKDKDFLDNEENEDILEDIVLTLTLFEDREMIEERLKTYAHLFDDKVMKQLKRRRYTGWGRLSRKLINGIRDKQSGKTILDFLKSDGFANRNFMQLIHDDSLTFKEDIQKAQVSGQGDSLHEHIANLAGSPAIKKGILQTVKVVDELVKVMGRHKPENIVIEMARENQTTQKGQKNSRERMKRIEEGIKELGSQILKEHPVENTQLQNEKLYLYYLQNGRDMYVDQELDINRLSDYDVDHIVPQSFLKDDSIDNKVLTRSDKARGKSDNVPSEEVVKKMKNYWRQLLNAKLITQRKFDNLTKAERGGLSELDKAGFIKRQLVETRQITKHVAQILDSRMNTKYDENDKLIREVKVITLKSKLVSDFRKDFQFYKVREINNYHHAHDAYLNAVVGTALIKKYPKLESEFVYGDYKVYDVRKMIAKSEQEIGKATAKYFFYSNIMNFFKTEITLANGEIRKRPLIETNGETGEIVWDKGRDFATVRKVLSMPQVNIVKKTEVQTGGFSKESILPKRNSDKLIARKKDWDPKKYGGFDSPTVAYSVLVVAKVEKGKSKKLKSVKELLGITIMERSSFEKNPIDFLEAKGYKEVKKDLIIKLPKYSLFELENGRKRMLASAGELQKGNELALPSKYVNFLYLASHYEKLKGSPEDNEQKQLFVEQHKHYLDEIIEQISEFSKRVILADANLDKVLSAYNKHRDKPIREQAENIIHLFTLTNLGAPAAFKYFDTTIDRKRYTSTKEVLDATLIHQSITGLYETRIDLSQLGGDGGGGGGSGGGGSGGGGSGGGGSGGTAPLEEEYRLFLEAPIQNVTLLEQWKREIPKVWAEINPPGLASTQAPIHVQLLSTALPVRVRQYPITLEAKRSLRETIRKFRAAGILRPVHSPWNTPLLPVRKSGTSEYRMVQDLREVNKRVETIHPTVPNPYTLLSLLPPDRIWYSVLDLKDAFFCIPLAPESQLIFAFEWADAEEGESGQLTWTRLPQGFKNSPTLFNEALNRDLQGFRLDHPSVSLLQYVDDLLIAADTQAACLSATRDLLMTLAELGYRVSGKKAQLCQEEVTYLGFKIHKGSRSLSNSRTQAILQIPVPKTKRQVREFLGKIGYCRLFIPGFAELAQPLYAATRPGNDPLVWGEKEEEAFQSLKLALTQPPALALPSLDKPFQLFVEETSGAAKGVLTQALGPWKRPVAYLSKRLDPVAAGWPRCLRAIAAAALLTREASKLTFGQDIEITSSHNLESLLRSPPDKWLTNARITQYQVLLLDPPRVRFKQTAALNPATLLPETDDTLPIHHCLDTLDSLTSTRPDLTDQPLAQAEATLFTDGSSYIRDGKRYAGAAVVTLDSVIWAEPLPIGTSAQKAELIALTKALEWSKDKSVNIYTDSRYAFATLHVHGMIYRERGWLTAGGKAIKNAPEILALLTAVWLPKRVAVMHCKGHQKDDAPTSTGNRRADEVAREVAIRPLSTQATISAGKRTADGSEFEKRTADGSEFESPKKKAKVE

SEQ ID NO: 1375 - protein, 2093 aa, synthetic construct
MPAAKRVKLDGGDKKYSIGLDIGTNSVGWAVITDEYKVPSKKFKVLGNTDRHSIKKNLIGALLFDSGETAEATRLKRTARRRYTRRKNRICYLQEIFSNEMAKVDDSFFHRLEESFLVEEDKKHERHPIFGNIVDEVAYHEKYPTIYHLRKKLVDSTDKADLRLIYLALAHMIKFRGHFLIEGDLNPDNSDVDKLFIQLVQTYNQLFEENPINASGVDAKAILSARLSKSRRLENLIAQLPGEKKNGLFGNLIALSLGLTPNFKSNFDLAEDAKLQLSKDTYDDDLDNLLAQIGDQYADLFLAAKNLSDAILLSDILRVNTEITKAPLSASMIKRYDEHHQDLTLLKALVRQQLPEKYKEIFFDQSKNGYAGYIDGGASQEEFYKFIKPILEKMDGTEELLVKLNREDLLRKQRTFDNGSIPHQIHLGELHAILRRQEDFYPFLKDNREKIEKILTFRIPYYVGPLARGNSRFAWMTRKSEETITPWNFEEVVDKGASAQSFIERMTNFDKNLPNEKVLPKHSLLYEYFTVYNELTKVKYVTEGMRKPAFLSGEQKKAIVDLLFKTNRKVTVKQLKEDYFKKIECFDSVEISGVEDRFNASLGTYHDLLKIIKDKDFLDNEENEDILEDIVLTLTLFEDREMIEERLKTYAHLFDDKVMKQLKRRRYTGWGRLSRKLINGIRDKQSGKTILDFLKSDGFANRNFMQLIHDDSLTFKEDIQKAQVSGQGDSLHEHIANLAGSPAIKKGILQTVKVVDELVKVMGRHKPENIVIEMARENQTTQKGQKNSRERMKRIEEGIKELGSQILKEHPVENTQLQNEKLYLYYLQNGRDMYVDQELDINRLSDYDVDHIVPQSFLKDDSIDNKVLTRSDKARGKSDNVPSEEVVKKMKNYWRQLLNAKLITQRKFDNLTKAERGGLSELDKAGFIKRQLVETRQITKHVAQILDSRMNTKYDENDKLIREVKVITLKSKLVSDFRKDFQFYKVREINNYHHAHDAYLNAVVGTALIKKYPKLESEFVYGDYKVYDVRKMIAKSEQEIGKATAKYFFYSNIMNFFKTEITLANGEIRKRPLIETNGETGEIVWDKGRDFATVRKVLSMPQVNIVKKTEVQTGGFSKESILPKRNSDKLIARKKDWDPKKYGGFDSPTVAYSVLVVAKVEKGKSKKLKSVKELLGITIMERSSFEKNPIDFLEAKGYKEVKKDLIIKLPKYSLFELENGRKRMLASAGELQKGNELALPSKYVNFLYLASHYEKLKGSPEDNEQKQLFVEQHKHYLDEIIEQISEFSKRVILADANLDKVLSAYNKHRDKPIREQAENIIHLFTLTNLGAPAAFKYFDTTIDRKRYTSTKEVLDATLIHQSITGLYETRIDLSQLGGDGGGSSPAPGGTAPLEEEYRLFLEAPIQNVTLLEQWKREIPKVWAEINPPGLASTQAPIHVQLLSTALPVRVRQYPITLEAKRSLRETIRKFRAAGILRPVHSPWNTPLLPVRKSGTSEYRMVQDLREVNKRVETIHPTVPNPYTLLSLLPPDRIWYSVLDLKDAFFCIPLAPESQLIFAFEWADAEEGESGQLTWTRLPQGFKNSPTLFNEALNRDLQGFRLDHPSVSLLQYVDDLLIAADTQAACLSATRDLLMTLAELGYRVSGKKAQLCQEEVTYLGFKIHKGSRSLSNSRTQAILQIPVPKTKRQVREFLGKIGYCRLFIPGFAELAQPLYAATRPGNDPLVWGEKEEEAFQSLKLALTQPPALALPSLDKPFQLFVEETSGAAKGVLTQALGPWKRPVAYLSKRLDPVAAGWPRCLRAIAAAALLTREASKLTFGQDIEITSSHNLESLLRSPPDKWLTNARITQYQVLLLDPPRVRFKQTAALNPATLLPETDDTLPIHHCLDTLDSLTSTRPDLTDQPLAQAEATLFTDGSSYIRDGKRYAGAAVVTLDSVIWAEPLPIGTSAQKAELIALTKALEWSKDKSVNIYTDSRYAFATLHVHGMIYRERGWLTAGGKAIKNAPEILALLTAVWLPKRVAVMHCKGHQKDDAPTSTGNRRADEVAREVAIRPLSTQATISAGKRTADGSEFEKRTADGSEFESPKKKAKVE

SEQ ID NO: 1376 - protein, 2103 aa, synthetic construct
MPAAKRVKLDGGDKKYSIGLDIGTNSVGWAVITDEYKVPSKKFKVLGNTDRHSIKKNLIGALLFDSGETAEATRLKRTARRRYTRRKNRICYLQEIFSNEMAKVDDSFFHRLEESFLVEEDKKHERHPIFGNIVDEVAYHEKYPTIYHLRKKLVDSTDKADLRLIYLALAHMIKFRGHFLIEGDLNPDNSDVDKLFIQLVQTYNQLFEENPINASGVDAKAILSARLSKSRRLENLIAQLPGEKKNGLFGNLIALSLGLTPNFKSNFDLAEDAKLQLSKDTYDDDLDNLLAQIGDQYADLFLAAKNLSDAILLSDILRVNTEITKAPLSASMIKRYDEHHQDLTLLKALVRQQLPEKYKEIFFDQSKNGYAGYIDGGASQEEFYKFIKPILEKMDGTEELLVKLNREDLLRKQRTFDNGSIPHQIHLGELHAILRRQEDFYPFLKDNREKIEKILTFRIPYYVGPLARGNSRFAWMTRKSEETITPWNFEEVVDKGASAQSFIERMTNFDKNLPNEKVLPKHSLLYEYFTVYNELTKVKYVTEGMRKPAFLSGEQKKAIVDLLFKTNRKVTVKQLKEDYFKKIECFDSVEISGVEDRFNASLGTYHDLLKIIKDKDFLDNEENEDILEDIVLTLTLFEDREMIEERLKTYAHLFDDKVMKQLKRRRYTGWGRLSRKLINGIRDKQSGKTILDFLKSDGFANRNFMQLIHDDSLTFKEDIQKAQVSGQGDSLHEHIANLAGSPAIKKGILQTVKVVDELVKVMGRHKPENIVIEMARENQTTQKGQKNSRERMKRIEEGIKELGSQILKEHPVENTQLQNEKLYLYYLQNGRDMYVDQELDINRLSDYDVDHIVPQSFLKDDSIDNKVLTRSDKARGKSDNVPSEEVVKKMKNYWRQLLNAKLITQRKFDNLTKAERGGLSELDKAGFIKRQLVETRQITKHVAQILDSRMNTKYDENDKLIREVKVITLKSKLVSDFRKDFQFYKVREINNYHHAHDAYLNAVVGTALIKKYPKLESEFVYGDYKVYDVRKMIAKSEQEIGKATAKYFFYSNIMNFFKTEITLANGEIRKRPLIETNGETGEIVWDKGRDFATVRKVLSMPQVNIVKKTEVQTGGFSKESILPKRNSDKLIARKKDWDPKKYGGFDSPTVAYSVLVVAKVEKGKSKKLKSVKELLGITIMERSSFEKNPIDFLEAKGYKEVKKDLIIKLPKYSLFELENGRKRMLASAGELQKGNELALPSKYVNFLYLASHYEKLKGSPEDNEQKQLFVEQHKHYLDEIIEQISEFSKRVILADANLDKVLSAYNKHRDKPIREQAENIIHLFTLTNLGAPAAFKYFDTTIDRKRYTSTKEVLDATLIHQSITGLYETRIDLSQLGGDGGSGSETPGTSESATPESGGTAPLEEEYRLFLEAPIQNVTLLEQWKREIPKVWAEINPPGLASTQAPIHVQLLSTALPVRVRQYPITLEAKRSLRETIRKFRAAGILRPVHSPWNTPLLPVRKSGTSEYRMVQDLREVNKRVETIHPTVPNPYTLLSLLPPDRIWYSVLDLKDAFFCIPLAPESQLIFAFEWADAEEGESGQLTWTRLPQGFKNSPTLFNEALNRDLQGFRLDHPSVSLLQYVDDLLIAADTQAACLSATRDLLMTLAELGYRVSGKKAQLCQEEVTYLGFKIHKGSRSLSNSRTQAILQIPVPKTKRQVREFLGKIGYCRLFIPGFAELAQPLYAATRPGNDPLVWGEKEEEAFQSLKLALTQPPALALPSLDKPFQLFVEETSGAAKGVLTQALGPWKRPVAYLSKRLDPVAAGWPRCLRAIAAAALLTREASKLTFGQDIEITSSHNLESLLRSPPDKWLTNARITQYQVLLLDPPRVRFKQTAALNPATLLPETDDTLPIHHCLDTLDSLTSTRPDLTDQPLAQAEATLFTDGSSYIRDGKRYAGAAVVTLDSVIWAEPLPIGTSAQKAELIALTKALEWSKDKSVNIYTDSRYAFATLHVHGMIYRERGWLTAGGKAIKNAPEILALLTAVWLPKRVAVMHCKGHQKDDAPTSTGNRRADEVAREVAIRPLSTQATISAGKRTADGSEFEKRTADGSEFESPKKKAKVE

SEQ ID NO: 1377 - protein, 2098 aa, synthetic construct
MPAAKRVKLDGGDKKYSIGLDIGTNSVGWAVITDEYKVPSKKFKVLGNTDRHSIKKNLIGALLFDSGETAEATRLKRTARRRYTRRKNRICYLQEIFSNEMAKVDDSFFHRLEESFLVEEDKKHERHPIFGNIVDEVAYHEKYPTIYHLRKKLVDSTDKADLRLIYLALAHMIKFRGHFLIEGDLNPDNSDVDKLFIQLVQTYNQLFEENPINASGVDAKAILSARLSKSRRLENLIAQLPGEKKNGLFGNLIALSLGLTPNFKSNFDLAEDAKLQLSKDTYDDDLDNLLAQIGDQYADLFLAAKNLSDAILLSDILRVNTEITKAPLSASMIKRYDEHHQDLTLLKALVRQQLPEKYKEIFFDQSKNGYAGYIDGGASQEEFYKFIKPILEKMDGTEELLVKLNREDLLRKQRTFDNGSIPHQIHLGELHAILRRQEDFYPFLKDNREKIEKILTFRIPYYVGPLARGNSRFAWMTRKSEETITPWNFEEVVDKGASAQSFIERMTNFDKNLPNEKVLPKHSLLYEYFTVYNELTKVKYVTEGMRKPAFLSGEQKKAIVDLLFKTNRKVTVKQLKEDYFKKIECFDSVEISGVEDRFNASLGTYHDLLKIIKDKDFLDNEENEDILEDIVLTLTLFEDREMIEERLKTYAHLFDDKVMKQLKRRRYTGWGRLSRKLINGIRDKQSGKTILDFLKSDGFANRNFMQLIHDDSLTFKEDIQKAQVSGQGDSLHEHIANLAGSPAIKKGILQTVKVVDELVKVMGRHKPENIVIEMARENQTTQKGQKNSRERMKRIEEGIKELGSQILKEHPVENTQLQNEKLYLYYLQNGRDMYVDQELDINRLSDYDVDHIVPQSFLKDDSIDNKVLTRSDKARGKSDNVPSEEVVKKMKNYWRQLLNAKLITQRKFDNLTKAERGGLSELDKAGFIKRQLVETRQITKHVAQILDSRMNTKYDENDKLIREVKVITLKSKLVSDFRKDFQFYKVREINNYHHAHDAYLNAVVGTALIKKYPKLESEFVYGDYKVYDVRKMIAKSEQEIGKATAKYFFYSNIMNFFKTEITLANGEIRKRPLIETNGETGEIVWDKGRDFATVRKVLSMPQVNIVKKTEVQTGGFSKESILPKRNSDKLIARKKDWDPKKYGGFDSPTVAYSVLVVAKVEKGKSKKLKSVKELLGITIMERSSFEKNPIDFLEAKGYKEVKKDLIIKLPKYSLFELENGRKRMLASAGELQKGNELALPSKYVNFLYLASHYEKLKGSPEDNEQKQLFVEQHKHYLDEIIEQISEFSKRVILADANLDKVLSAYNKHRDKPIREQAENIIHLFTLTNLGAPAAFKYFDTTIDRKRYTSTKEVLDATLIHQSITGLYETRIDLSQLGGDGGPAPEAAAKGGSGGTAPLEEEYRLFLEAPIQNVTLLEQWKREIPKVWAEINPPGLASTQAPIHVQLLSTALPVRVRQYPITLEAKRSLRETIRKFRAAGILRPVHSPWNTPLLPVRKSGTSEYRMVQDLREVNKRVETIHPTVPNPYTLLSLLPPDRIWYSVLDLKDAFFCIPLAPESQLIFAFEWADAEEGESGQLTWTRLPQGFKNSPTLFNEALNRDLQGFRLDHPSVSLLQYVDDLLIAADTQAACLSATRDLLMTLAELGYRVSGKKAQLCQEEVTYLGFKIHKGSRSLSNSRTQAILQIPVPKTKRQVREFLGKIGYCRLFIPGFAELAQPLYAATRPGNDPLVWGEKEEEAFQSLKLALTQPPALALPSLDKPFQLFVEETSGAAKGVLTQALGPWKRPVAYLSKRLDPVAAGWPRCLRAIAAAALLTREASKLTFGQDIEITSSHNLESLLRSPPDKWLTNARITQYQVLLLDPPRVRFKQTAALNPATLLPETDDTLPIHHCLDTLDSLTSTRPDLTDQPLAQAEATLFTDGSSYIRDGKRYAGAAVVTLDSVIWAEPLPIGTSAQKAELIALTKALEWSKDKSVNIYTDSRYAFATLHVHGMIYRERGWLTAGGKAIKNAPEILALLTAVWLPKRVAVMHCKGHQKDDAPTSTGNRRADEVAREVAIRPLSTQATISAGKRTADGSEFEKRTADGSEFESPKKKAKVE

SEQ ID NO: 1378 - protein, 2092 aa, synthetic construct
MPAAKRVKLDGGDKKYSIGLDIGTNSVGWAVITDEYKVPSKKFKVLGNTDRHSIKKNLIGALLFDSGETAEATRLKRTARRRYTRRKNRICYLQEIFSNEMAKVDDSFFHRLEESFLVEEDKKHERHPIFGNIVDEVAYHEKYPTIYHLRKKLVDSTDKADLRLIYLALAHMIKFRGHFLIEGDLNPDNSDVDKLFIQLVQTYNQLFEENPINASGVDAKAILSARLSKSRRLENLIAQLPGEKKNGLFGNLIALSLGLTPNFKSNFDLAEDAKLQLSKDTYDDDLDNLLAQIGDQYADLFLAAKNLSDAILLSDILRVNTEITKAPLSASMIKRYDEHHQDLTLLKALVRQQLPEKYKEIFFDQSKNGYAGYIDGGASQEEFYKFIKPILEKMDGTEELLVKLNREDLLRKQRTFDNGSIPHQIHLGELHAILRRQEDFYPFLKDNREKIEKILTFRIPYYVGPLARGNSRFAWMTRKSEETITPWNFEEVVDKGASAQSFIERMTNFDKNLPNEKVLPKHSLLYEYFTVYNELTKVKYVTEGMRKPAFLSGEQKKAIVDLLFKTNRKVTVKQLKEDYFKKIECFDSVEISGVEDRFNASLGTYHDLLKIIKDKDFLDNEENEDILEDIVLTLTLFEDREMIEERLKTYAHLFDDKVMKQLKRRRYTGWGRLSRKLINGIRDKQSGKTILDFLKSDGFANRNFMQLIHDDSLTFKEDIQKAQVSGQGDSLHEHIANLAGSPAIKKGILQTVKVVDELVKVMGRHKPENIVIEMARENQTTQKGQKNSRERMKRIEEGIKELGSQILKEHPVENTQLQNEKLYLYYLQNGRDMYVDQELDINRLSDYDVDHIVPQSFLKDDSIDNKVLTRSDKARGKSDNVPSEEVVKKMKNYWRQLLNAKLITQRKFDNLTKAERGGLSELDKAGFIKRQLVETRQITKHVAQILDSRMNTKYDENDKLIREVKVITLKSKLVSDFRKDFQFYKVREINNYHHAHDAYLNAVVGTALIKKYPKLESEFVYGDYKVYDVRKMIAKSEQEIGKATAKYFFYSNIMNFFKTEITLANGEIRKRPLIETNGETGEIVWDKGRDFATVRKVLSMPQVNIVKKTEVQTGGFSKESILPKRNSDKLIARKKDWDPKKYGGFDSPTVAYSVLVVAKVEKGKSKKLKSVKELLGITIMERSSFEKNPIDFLEAKGYKEVKKDLIIKLPKYSLFELENGRKRMLASAGELQKGNELALPSKYVNFLYLASHYEKLKGSPEDNEQKQLFVEQHKHYLDEIIEQISEFSKRVILADANLDKVLSAYNKHRDKPIREQAENIIHLFTLTNLGAPAAFKYFDTTIDRKRYTSTKEVLDATLIHQSITGLYETRIDLSQLGGDGGPAPAPGGTAPLEEEYRLFLEAPIQNVTLLEQWKREIPKVWAEINPPGLASTQAPIHVQLLSTALPVRVRQYPITLEAKRSLRETIRKFRAAGILRPVHSPWNTPLLPVRKSGTSEYRMVQDLREVNKRVETIHPTVPNPYTLLSLLPPDRIWYSVLDLKDAFFCIPLAPESQLIFAFEWADAEEGESGQLTWTRLPQGFKNSPTLFNEALNRDLQGFRLDHPSVSLLQYVDDLLIAADTQAACLSATRDLLMTLAELGYRVSGKKAQLCQEEVTYLGFKIHKGSRSLSNSRTQAILQIPVPKTKRQVREFLGKIGYCRLFIPGFAELAQPLYAATRPGNDPLVWGEKEEEAFQSLKLALTQPPALALPSLDKPFQLFVEETSGAAKGVLTQALGPWKRPVAYLSKRLDPVAAGWPRCLRAIAAAALLTREASKLTFGQDIEITSSHNLESLLRSPPDKWLTNARITQYQVLLLDPPRVRFKQTAALNPATLLPETDDTLPIHHCLDTLDSLTSTRPDLTDQPLAQAEATLFTDGSSYIRDGKRYAGAAVVTLDSVIWAEPLPIGTSAQKAELIALTKALEWSKDKSVNIYTDSRYAFATLHVHGMIYRERGWLTAGGKAIKNAPEILALLTAVWLPKRVAVMHCKGHQKDDAPTSTGNRRADEVAREVAIRPLSTQATISAGKRTADGSEFEKRTADGSEFESPKKKAKVE

SEQ ID NO: 1379 - protein, 2098 aa, synthetic construct
MPAAKRVKLDGGDKKYSIGLDIGTNSVGWAVITDEYKVPSKKFKVLGNTDRHSIKKNLIGALLFDSGETAEATRLKRTARRRYTRRKNRICYLQEIFSNEMAKVDDSFFHRLEESFLVEEDKKHERHPIFGNIVDEVAYHEKYPTIYHLRKKLVDSTDKADLRLIYLALAHMIKFRGHFLIEGDLNPDNSDVDKLFIQLVQTYNQLFEENPINASGVDAKAILSARLSKSRRLENLIAQLPGEKKNGLFGNLIALSLGLTPNFKSNFDLAEDAKLQLSKDTYDDDLDNLLAQIGDQYADLFLAAKNLSDAILLSDILRVNTEITKAPLSASMIKRYDEHHQDLTLLKALVRQQLPEKYKEIFFDQSKNGYAGYIDGGASQEEFYKFIKPILEKMDGTEELLVKLNREDLLRKQRTFDNGSIPHQIHLGELHAILRRQEDFYPFLKDNREKIEKILTFRIPYYVGPLARGNSRFAWMTRKSEETITPWNFEEVVDKGASAQSFIERMTNFDKNLPNEKVLPKHSLLYEYFTVYNELTKVKYVTEGMRKPAFLSGEQKKAIVDLLFKTNRKVTVKQLKEDYFKKIECFDSVEISGVEDRFNASLGTYHDLLKIIKDKDFLDNEENEDILEDIVLTLTLFEDREMIEERLKTYAHLFDDKVMKQLKRRRYTGWGRLSRKLINGIRDKQSGKTILDFLKSDGFANRNFMQLIHDDSLTFKEDIQKAQVSGQGDSLHEHIANLAGSPAIKKGILQTVKVVDELVKVMGRHKPENIVIEMARENQTTQKGQKNSRERMKRIEEGIKELGSQILKEHPVENTQLQNEKLYLYYLQNGRDMYVDQELDINRLSDYDVDHIVPQSFLKDDSIDNKVLTRSDKARGKSDNVPSEEVVKKMKNYWRQLLNAKLITQRKFDNLTKAERGGLSELDKAGFIKRQLVETRQITKHVAQILDSRMNTKYDENDKLIREVKVITLKSKLVSDFRKDFQFYKVREINNYHHAHDAYLNAVVGTALIKKYPKLESEFVYGDYKVYDVRKMIAKSEQEIGKATAKYFFYSNIMNFFKTEITLANGEIRKRPLIETNGETGEIVWDKGRDFATVRKVLSMPQVNIVKKTEVQTGGFSKESILPKRNSDKLIARKKDWDPKKYGGFDSPTVAYSVLVVAKVEKGKSKKLKSVKELLGITIMERSSFEKNPIDFLEAKGYKEVKKDLIIKLPKYSLFELENGRKRMLASAGELQKGNELALPSKYVNFLYLASHYEKLKGSPEDNEQKQLFVEQHKHYLDEIIEQISEFSKRVILADANLDKVLSAYNKHRDKPIREQAENIIHLFTLTNLGAPAAFKYFDTTIDRKRYTSTKEVLDATLIHQSITGLYETRIDLSQLGGDGGGGGEAAAKGGSGGTAPLEEEYRLFLEAPIQNVTLLEQWKREIPKVWAEINPPGLASTQAPIHVQLLSTALPVRVRQYPITLEAKRSLRETIRKFRAAGILRPVHSPWNTPLLPVRKSGTSEYRMVQDLREVNKRVETIHPTVPNPYTLLSLLPPDRIWYSVLDLKDAFFCIPLAPESQLIFAFEWADAEEGESGQLTWTRLPQGFKNSPTLFNEALNRDLQGFRLDHPSVSLLQYVDDLLIAADTQAACLSATRDLLMTLAELGYRVSGKKAQLCQEEVTYLGFKIHKGSRSLSNSRTQAILQIPVPKTKRQVREFLGKIGYCRLFIPGFAELAQPLYAATRPGNDPLVWGEKEEEAFQSLKLALTQPPALALPSLDKPFQLFVEETSGAAKGVLTQALGPWKRPVAYLSKRLDPVAAGWPRCLRAIAAAALLTREASKLTFGQDIEITSSHNLESLLRSPPDKWLTNARITQYQVLLLDPPRVRFKQTAALNPATLLPETDDTLPIHHCLDTLDSLTSTRPDLTDQPLAQAEATLFTDGSSYIRDGKRYAGAAVVTLDSVIWAEPLPIGTSAQKAELIALTKALEWSKDKSVNIYTDSRYAFATLHVHGMIYRERGWLTAGGKAIKNAPEILALLTAVWLPKRVAVMHCKGHQKDDAPTSTGNRRADEVAREVAIRPLSTQATISAGKRTADGSEFEKRTADGSEFESPKKKAKVE

SEQ ID NO: 1380 - protein, 2092 aa, synthetic construct
MPAAKRVKLDGGDKKYSIGLDIGTNSVGWAVITDEYKVPSKKFKVLGNTDRHSIKKNLIGALLFDSGETAEATRLKRTARRRYTRRKNRICYLQEIFSNEMAKVDDSFFHRLEESFLVEEDKKHERHPIFGNIVDEVAYHEKYPTIYHLRKKLVDSTDKADLRLIYLALAHMIKFRGHFLIEGDLNPDNSDVDKLFIQLVQTYNQLFEENPINASGVDAKAILSARLSKSRRLENLIAQLPGEKKNGLFGNLIALSLGLTPNFKSNFDLAEDAKLQLSKDTYDDDLDNLLAQIGDQYADLFLAAKNLSDAILLSDILRVNTEITKAPLSASMIKRYDEHHQDLTLLKALVRQQLPEKYKEIFFDQSKNGYAGYIDGGASQEEFYKFIKPILEKMDGTEELLVKLNREDLLRKQRTFDNGSIPHQIHLGELHAILRRQEDFYPFLKDNREKIEKILTFRIPYYVGPLARGNSRFAWMTRKSEETITPWNFEEVVDKGASAQSFIERMTNFDKNLPNEKVLPKHSLLYEYFTVYNELTKVKYVTEGMRKPAFLSGEQKKAIVDLLFKTNRKVTVKQLKEDYFKKIECFDSVEISGVEDRFNASLGTYHDLLKIIKDKDFLDNEENEDILEDIVLTLTLFEDREMIEERLKTYAHLFDDKVMKQLKRRRYTGWGRLSRKLINGIRDKQSGKTILDFLKSDGFANRNFMQLIHDDSLTFKEDIQKAQVSGQGDSLHEHIANLAGSPAIKKGILQTVKVVDELVKVMGRHKPENIVIEMARENQTTQKGQKNSRERMKRIEEGIKELGSQILKEHPVENTQLQNEKLYLYYLQNGRDMYVDQELDINRLSDYDVDHIVPQSFLKDDSIDNKVLTRSDKARGKSDNVPSEEVVKKMKNYWRQLLNAKLITQRKFDNLTKAERGGLSELDKAGFIKRQLVETRQITKHVAQILDSRMNTKYDENDKLIREVKVITLKSKLVSDFRKDFQFYKVREINNYHHAHDAYLNAVVGTALIKKYPKLESEFVYGDYKVYDVRKMIAKSEQEIGKATAKYFFYSNIMNFFKTEITLANGEIRKRPLIETNGETGEIVWDKGRDFATVRKVLSMPQVNIVKKTEVQTGGFSKESILPKRNSDKLIARKKDWDPKKYGGFDSPTVAYSVLVVAKVEKGKSKKLKSVKELLGITIMERSSFEKNPIDFLEAKGYKEVKKDLIIKLPKYSLFELENGRKRMLASAGELQKGNELALPSKYVNFLYLASHYEKLKGSPEDNEQKQLFVEQHKHYLDEIIEQISEFSKRVILADANLDKVLSAYNKHRDKPIREQAENIIHLFTLTNLGAPAAFKYFDTTIDRKRYTSTKEVLDATLIHQSITGLYETRIDLSQLGGDGGEAAAKGGTAPLEEEYRLFLEAPIQNVTLLEQWKREIPKVWAEINPPGLASTQAPIHVQLLSTALPVRVRQYPITLEAKRSLRETIRKFRAAGILRPVHSPWNTPLLPVRKSGTSEYRMVQDLREVNKRVETIHPTVPNPYTLLSLLPPDRIWYSVLDLKDAFFCIPLAPESQLIFAFEWADAEEGESGQLTWTRLPQGFKNSPTLFNEALNRDLQGFRLDHPSVSLLQYVDDLLIAADTQAACLSATRDLLMTLAELGYRVSGKKAQLCQEEVTYLGFKIHKGSRSLSNSRTQAILQIPVPKTKRQVREFLGKIGYCRLFIPGFAELAQPLYAATRPGNDPLVWGEKEEEAFQSLKLALTQPPALALPSLDKPFQLFVEETSGAAKGVLTQALGPWKRPVAYLSKRLDPVAAGWPRCLRAIAAAALLTREASKLTFGQDIEITSSHNLESLLRSPPDKWLTNARITQYQVLLLDPPRVRFKQTAALNPATLLPETDDTLPIHHCLDTLDSLTSTRPDLTDQPLAQAEATLFTDGSSYIRDGKRYAGAAVVTLDSVIWAEPLPIGTSAQKAELIALTKALEWSKDKSVNIYTDSRYAFATLHVHGMIYRERGWLTAGGKAIKNAPEILALLTAVWLPKRVAVMHCKGHQKDDAPTSTGNRRADEVAREVAIRPLSTQATISAGKRTADGSEFEKRTADGSEFESPKKKAKVE

SEQ ID NO: 1381 - protein, 2098 aa, synthetic construct
MPAAKRVKLDGGDKKYSIGLDIGTNSVGWAVITDEYKVPSKKFKVLGNTDRHSIKKNLIGALLFDSGETAEATRLKRTARRRYTRRKNRICYLQEIFSNEMAKVDDSFFHRLEESFLVEEDKKHERHPIFGNIVDEVAYHEKYPTIYHLRKKLVDSTDKADLRLIYLALAHMIKFRGHFLIEGDLNPDNSDVDKLFIQLVQTYNQLFEENPINASGVDAKAILSARLSKSRRLENLIAQLPGEKKNGLFGNLIALSLGLTPNFKSNFDLAEDAKLQLSKDTYDDDLDNLLAQIGDQYADLFLAAKNLSDAILLSDILRVNTEITKAPLSASMIKRYDEHHQDLTLLKALVRQQLPEKYKEIFFDQSKNGYAGYIDGGASQEEFYKFIKPILEKMDGTEELLVKLNREDLLRKQRTFDNGSIPHQIHLGELHAILRRQEDFYPFLKDNREKIEKILTFRIPYYVGPLARGNSRFAWMTRKSEETITPWNFEEVVDKGASAQSFIERMTNFDKNLPNEKVLPKHSLLYEYFTVYNELTKVKYVTEGMRKPAFLSGEQKKAIVDLLFKTNRKVTVKQLKEDYFKKIECFDSVEISGVEDRFNASLGTYHDLLKIIKDKDFLDNEENEDILEDIVLTLTLFEDREMIEERLKTYAHLFDDKVMKQLKRRRYTGWGRLSRKLINGIRDKQSGKTILDFLKSDGFANRNFMQLIHDDSLTFKEDIQKAQVSGQGDSLHEHIANLAGSPAIKKGILQTVKVVDELVKVMGRHKPENIVIEMARENQTTQKGQKNSRERMKRIEEGIKELGSQILKEHPVENTQLQNEKLYLYYLQNGRDMYVDQELDINRLSDYDVDHIVPQSFLKDDSIDNKVLTRSDKARGKSDNVPSEEVVKKMKNYWRQLLNAKLITQRKFDNLTKAERGGLSELDKAGFIKRQLVETRQITKHVAQILDSRMNTKYDENDKLIREVKVITLKSKLVSDFRKDFQFYKVREINNYHHAHDAYLNAVVGTALIKKYPKLESEFVYGDYKVYDVRKMIAKSEQEIGKATAKYFFYSNIMNFFKTEITLANGEIRKRPLIETNGETGEIVWDKGRDFATVRKVLSMPQVNIVKKTEVQTGGFSKESILPKRNSDKLIARKKDWDPKKYGGFDSPTVAYSVLVVAKVEKGKSKKLKSVKELLGITIMERSSFEKNPIDFLEAKGYKEVKKDLIIKLPKYSLFELENGRKRMLASAGELQKGNELALPSKYVNFLYLASHYEKLKGSPEDNEQKQLFVEQHKHYLDEIIEQISEFSKRVILADANLDKVLSAYNKHRDKPIREQAENIIHLFTLTNLGAPAAFKYFDTTIDRKRYTSTKEVLDATLIHQSITGLYETRIDLSQLGGDGGGSSEAAAKPAPGGTAPLEEEYRLFLEAPIQNVTLLEQWKREIPKVWAEINPPGLASTQAPIHVQLLSTALPVRVRQYPITLEAKRSLRETIRKFRAAGILRPVHSPWNTPLLPVRKSGTSEYRMVQDLREVNKRVETIHPTVPNPYTLLSLLPPDRIWYSVLDLKDAFFCIPLAPESQLIFAFEWADAEEGESGQLTWTRLPQGFKNSPTLFNEALNRDLQGFRLDHPSVSLLQYVDDLLIAADTQAACLSATRDLLMTLAELGYRVSGKKAQLCQEEVTYLGFKIHKGSRSLSNSRTQAILQIPVPKTKRQVREFLGKIGYCRLFIPGFAELAQPLYAATRPGNDPLVWGEKEEEAFQSLKLALTQPPALALPSLDKPFQLFVEETSGAAKGVLTQALGPWKRPVAYLSKRLDPVAAGWPRCLRAIAAAALLTREASKLTFGQDIEITSSHNLESLLRSPPDKWLTNARITQYQVLLLDPPRVRFKQTAALNPATLLPETDDTLPIHHCLDTLDSLTSTRPDLTDQPLAQAEATLFTDGSSYIRDGKRYAGAAVVTLDSVIWAEPLPIGTSAQKAELIALTKALEWSKDKSVNIYTDSRYAFATLHVHGMIYRERGWLTAGGKAIKNAPEILALLTAVWLPKRVAVMHCKGHQKDDAPTSTGNRRADEVAREVAIRPLSTQATISAGKRTADGSEFEKRTADGSEFESPKKKAKVE

SEQ ID NO: 1382 - protein, 2105 aa, synthetic construct
MPAAKRVKLDGGDKKYSIGLDIGTNSVGWAVITDEYKVPSKKFKVLGNTDRHSIKKNLIGALLFDSGETAEATRLKRTARRRYTRRKNRICYLQEIFSNEMAKVDDSFFHRLEESFLVEEDKKHERHPIFGNIVDEVAYHEKYPTIYHLRKKLVDSTDKADLRLIYLALAHMIKFRGHFLIEGDLNPDNSDVDKLFIQLVQTYNQLFEENPINASGVDAKAILSARLSKSRRLENLIAQLPGEKKNGLFGNLIALSLGLTPNFKSNFDLAEDAKLQLSKDTYDDDLDNLLAQIGDQYADLFLAAKNLSDAILLSDILRVNTEITKAPLSASMIKRYDEHHQDLTLLKALVRQQLPEKYKEIFFDQSKNGYAGYIDGGASQEEFYKFIKPILEKMDGTEELLVKLNREDLLRKQRTFDNGSIPHQIHLGELHAILRRQEDFYPFLKDNREKIEKILTFRIPYYVGPLARGNSRFAWMTRKSEETITPWNFEEVVDKGASAQSFIERMTNFDKNLPNEKVLPKHSLLYEYFTVYNELTKVKYVTEGMRKPAFLSGEQKKAIVDLLFKTNRKVTVKQLKEDYFKKIECFDSVEISGVEDRFNASLGTYHDLLKIIKDKDFLDNEENEDILEDIVLTLTLFEDREMIEERLKTYAHLFDDKVMKQLKRRRYTGWGRLSRKLINGIRDKQSGKTILDFLKSDGFANRNFMQLIHDDSLTFKEDIQKAQVSGQGDSLHEHIANLAGSPAIKKGILQTVKVVDELVKVMGRHKPENIVIEMARENQTTQKGQKNSRERMKRIEEGIKELGSQILKEHPVENTQLQNEKLYLYYLQNGRDMYVDQELDINRLSDYDVDHIVPQSFLKDDSIDNKVLTRSDKARGKSDNVPSEEVVKKMKNYWRQLLNAKLITQRKFDNLTKAERGGLSELDKAGFIKRQLVETRQITKHVAQILDSRMNTKYDENDKLIREVKVITLKSKLVSDFRKDFQFYKVREINNYHHAHDAYLNAVVGTALIKKYPKLESEFVYGDYKVYDVRKMIAKSEQEIGKATAKYFFYSNIMNFFKTEITLANGEIRKRPLIETNGETGEIVWDKGRDFATVRKVLSMPQVNIVKKTEVQTGGFSKESILPKRNSDKLIARKKDWDPKKYGGFDSPTVAYSVLVVAKVEKGKSKKLKSVKELLGITIMERSSFEKNPIDFLEAKGYKEVKKDLIIKLPKYSLFELENGRKRMLASAGELQKGNELALPSKYVNFLYLASHYEKLKGSPEDNEQKQLFVEQHKHYLDEIIEQISEFSKRVILADANLDKVLSAYNKHRDKPIREQAENIIHLFTLTNLGAPAAFKYFDTTIDRKRYTSTKEVLDATLIHQSITGLYETRIDLSQLGGDGGGSSGSSGSSGSSGSSGSSGGTAPLEEEYRLFLEAPIQNVTLLEQWKREIPKVWAEINPPGLASTQAPIHVQLLSTALPVRVRQYPITLEAKRSLRETIRKFRAAGILRPVHSPWNTPLLPVRKSGTSEYRMVQDLREVNKRVETIHPTVPNPYTLLSLLPPDRIWYSVLDLKDAFFCIPLAPESQLIFAFEWADAEEGESGQLTWTRLPQGFKNSPTLFNEALNRDLQGFRLDHPSVSLLQYVDDLLIAADTQAACLSATRDLLMTLAELGYRVSGKKAQLCQEEVTYLGFKIHKGSRSLSNSRTQAILQIPVPKTKRQVREFLGKIGYCRLFIPGFAELAQPLYAATRPGNDPLVWGEKEEEAFQSLKLALTQPPALALPSLDKPFQLFVEETSGAAKGVLTQALGPWKRPVAYLSKRLDPVAAGWPRCLRAIAAAALLTREASKLTFGQDIEITSSHNLESLLRSPPDKWLTNARITQYQVLLLDPPRVRFKQTAALNPATLLPETDDTLPIHHCLDTLDSLTSTRPDLTDQPLAQAEATLFTDGSSYIRDGKRYAGAAVVTLDSVIWAEPLPIGTSAQKAELIALTKALEWSKDKSVNIYTDSRYAFATLHVHGMIYRERGWLTAGGKAIKNAPEILALLTAVWLPKRVAVMHCKGHQKDDAPTSTGNRRADEVAREVAIRPLSTQATISAGKRTADGSEFEKRTADGSEFESPKKKAKVE

SEQ ID NO: 1383 - protein, 2096 aa, synthetic construct
MPAAKRVKLDGGDKKYSIGLDIGTNSVGWAVITDEYKVPSKKFKVLGNTDRHSIKKNLIGALLFDSGETAEATRLKRTARRRYTRRKNRICYLQEIFSNEMAKVDDSFFHRLEESFLVEEDKKHERHPIFGNIVDEVAYHEKYPTIYHLRKKLVDSTDKADLRLIYLALAHMIKFRGHFLIEGDLNPDNSDVDKLFIQLVQTYNQLFEENPINASGVDAKAILSARLSKSRRLENLIAQLPGEKKNGLFGNLIALSLGLTPNFKSNFDLAEDAKLQLSKDTYDDDLDNLLAQIGDQYADLFLAAKNLSDAILLSDILRVNTEITKAPLSASMIKRYDEHHQDLTLLKALVRQQLPEKYKEIFFDQSKNGYAGYIDGGASQEEFYKFIKPILEKMDGTEELLVKLNREDLLRKQRTFDNGSIPHQIHLGELHAILRRQEDFYPFLKDNREKIEKILTFRIPYYVGPLARGNSRFAWMTRKSEETITPWNFEEVVDKGASAQSFIERMTNFDKNLPNEKVLPKHSLLYEYFTVYNELTKVKYVTEGMRKPAFLSGEQKKAIVDLLFKTNRKVTVKQLKEDYFKKIECFDSVEISGVEDRFNASLGTYHDLLKIIKDKDFLDNEENEDILEDIVLTLTLFEDREMIEERLKTYAHLFDDKVMKQLKRRRYTGWGRLSRKLINGIRDKQSGKTILDFLKSDGFANRNFMQLIHDDSLTFKEDIQKAQVSGQGDSLHEHIANLAGSPAIKKGILQTVKVVDELVKVMGRHKPENIVIEMARENQTTQKGQKNSRERMKRIEEGIKELGSQILKEHPVENTQLQNEKLYLYYLQNGRDMYVDQELDINRLSDYDVDHIVPQSFLKDDSIDNKVLTRSDKARGKSDNVPSEEVVKKMKNYWRQLLNAKLITQRKFDNLTKAERGGLSELDKAGFIKRQLVETRQITKHVAQILDSRMNTKYDENDKLIREVKVITLKSKLVSDFRKDFQFYKVREINNYHHAHDAYLNAVVGTALIKKYPKLESEFVYGDYKVYDVRKMIAKSEQEIGKATAKYFFYSNIMNFFKTEITLANGEIRKRPLIETNGETGEIVWDKGRDFATVRKVLSMPQVNIVKKTEVQTGGFSKESILPKRNSDKLIARKKDWDPKKYGGFDSPTVAYSVLVVAKVEKGKSKKLKSVKELLGITIMERSSFEKNPIDFLEAKGYKEVKKDLIIKLPKYSLFELENGRKRMLASAGELQKGNELALPSKYVNFLYLASHYEKLKGSPEDNEQKQLFVEQHKHYLDEIIEQISEFSKRVILADANLDKVLSAYNKHRDKPIREQAENIIHLFTLTNLGAPAAFKYFDTTIDRKRYTSTKEVLDATLIHQSITGLYETRIDLSQLGGDGGGGSPAPGGGGGTAPLEEEYRLFLEAPIQNVTLLEQWKREIPKVWAEINPPGLASTQAPIHVQLLSTALPVRVRQYPITLEAKRSLRETIRKFRAAGILRPVHSPWNTPLLPVRKSGTSEYRMVQDLREVNKRVETIHPTVPNPYTLLSLLPPDRIWYSVLDLKDAFFCIPLAPESQLIFAFEWADAEEGESGQLTWTRLPQGFKNSPTLFNEALNRDLQGFRLDHPSVSLLQYVDDLLIAADTQAACLSATRDLLMTLAELGYRVSGKKAQLCQEEVTYLGFKIHKGSRSLSNSRTQAILQIPVPKTKRQVREFLGKIGYCRLFIPGFAELAQPLYAATRPGNDPLVWGEKEEEAFQSLKLALTQPPALALPSLDKPFQLFVEETSGAAKGVLTQALGPWKRPVAYLSKRLDPVAAGWPRCLRAIAAAALLTREASKLTFGQDIEITSSHNLESLLRSPPDKWLTNARITQYQVLLLDPPRVRFKQTAALNPATLLPETDDTLPIHHCLDTLDSLTSTRPDLTDQPLAQAEATLFTDGSSYIRDGKRYAGAAVVTLDSVIWAEPLPIGTSAQKAELIALTKALEWSKDKSVNIYTDSRYAFATLHVHGMIYRERGWLTAGGKAIKNAPEILALLTAVWLPKRVAVMHCKGHQKDDAPTSTGNRRADEVAREVAIRPLSTQATISAGKRTADGSEFEKRTADGSEFESPKKKAKVE

SEQ ID NO: 1384 - protein, 2098 aa, synthetic construct
MPAAKRVKLDGGDKKYSIGLDIGTNSVGWAVITDEYKVPSKKFKVLGNTDRHSIKKNLIGALLFDSGETAEATRLKRTARRRYTRRKNRICYLQEIFSNEMAKVDDSFFHRLEESFLVEEDKKHERHPIFGNIVDEVAYHEKYPTIYHLRKKLVDSTDKADLRLIYLALAHMIKFRGHFLIEGDLNPDNSDVDKLFIQLVQTYNQLFEENPINASGVDAKAILSARLSKSRRLENLIAQLPGEKKNGLFGNLIALSLGLTPNFKSNFDLAEDAKLQLSKDTYDDDLDNLLAQIGDQYADLFLAAKNLSDAILLSDILRVNTEITKAPLSASMIKRYDEHHQDLTLLKALVRQQLPEKYKEIFFDQSKNGYAGYIDGGASQEEFYKFIKPILEKMDGTEELLVKLNREDLLRKQRTFDNGSIPHQIHLGELHAILRRQEDFYPFLKDNREKIEKILTFRIPYYVGPLARGNSRFAWMTRKSEETITPWNFEEVVDKGASAQSFIERMTNFDKNLPNEKVLPKHSLLYEYFTVYNELTKVKYVTEGMRKPAFLSGEQKKAIVDLLFKTNRKVTVKQLKEDYFKKIECFDSVEISGVEDRFNASLGTYHDLLKIIKDKDFLDNEENEDILEDIVLTLTLFEDREMIEERLKTYAHLFDDKVMKQLKRRRYTGWGRLSRKLINGIRDKQSGKTILDFLKSDGFANRNFMQLIHDDSLTFKEDIQKAQVSGQGDSLHEHIANLAGSPAIKKGILQTVKVVDELVKVMGRHKPENIVIEMARENQTTQKGQKNSRERMKRIEEGIKELGSQILKEHPVENTQLQNEKLYLYYLQNGRDMYVDQELDINRLSDYDVDHIVPQSFLKDDSIDNKVLTRSDKARGKSDNVPSEEVVKKMKNYWRQLLNAKLITQRKFDNLTKAERGGLSELDKAGFIKRQLVETRQITKHVAQILDSRMNTKYDENDKLIREVKVITLKSKLVSDFRKDFQFYKVREINNYHHAHDAYLNAVVGTALIKKYPKLESEFVYGDYKVYDVRKMIAKSEQEIGKATAKYFFYSNIMNFFKTEITLANGEIRKRPLIETNGETGEIVWDKGRDFATVRKVLSMPQVNIVKKTEVQTGGFSKESILPKRNSDKLIARKKDWDPKKYGGFDSPTVAYSVLVVAKVEKGKSKKLKSVKELLGITIMERSSFEKNPIDFLEAKGYKEVKKDLIIKLPKYSLFELENGRKRMLASAGELQKGNELALPSKYVNFLYLASHYEKLKGSPEDNEQKQLFVEQHKHYLDEIIEQISEFSKRVILADANLDKVLSAYNKHRDKPIREQAENIIHLFTLTNLGAPAAFKYFDTTIDRKRYTSTKEVLDATLIHQSITGLYETRIDLSQLGGDGGGGGEAAAKPAPGGTAPLEEEYRLFLEAPIQNVTLLEQWKREIPKVWAEINPPGLASTQAPIHVQLLSTALPVRVRQYPITLEAKRSLRETIRKFRAAGILRPVHSPWNTPLLPVRKSGTSEYRMVQDLREVNKRVETIHPTVPNPYTLLSLLPPDRIWYSVLDLKDAFFCIPLAPESQLIFAFEWADAEEGESGQLTWTRLPQGFKNSPTLFNEALNRDLQGFRLDHPSVSLLQYVDDLLIAADTQAACLSATRDLLMTLAELGYRVSGKKAQLCQEEVTYLGFKIHKGSRSLSNSRTQAILQIPVPKTKRQVREFLGKIGYCRLFIPGFAELAQPLYAATRPGNDPLVWGEKEEEAFQSLKLALTQPPALALPSLDKPFQLFVEETSGAAKGVLTQALGPWKRPVAYLSKRLDPVAAGWPRCLRAIAAAALLTREASKLTFGQDIEITSSHNLESLLRSPPDKWLTNARITQYQVLLLDPPRVRFKQTAALNPATLLPETDDTLPIHHCLDTLDSLTSTRPDLTDQPLAQAEATLFTDGSSYIRDGKRYAGAAVVTLDSVIWAEPLPIGTSAQKAELIALTKALEWSKDKSVNIYTDSRYAFATLHVHGMIYRERGWLTAGGKAIKNAPEILALLTAVWLPKRVAVMHCKGHQKDDAPTSTGNRRADEVAREVAIRPLSTQATISAGKRTADGSEFEKRTADGSEFESPKKKAKVE

SEQ ID NO: 1385 - protein, 2096 aa, synthetic construct
MPAAKRVKLDGGDKKYSIGLDIGTNSVGWAVITDEYKVPSKKFKVLGNTDRHSIKKNLIGALLFDSGETAEATRLKRTARRRYTRRKNRICYLQEIFSNEMAKVDDSFFHRLEESFLVEEDKKHERHPIFGNIVDEVAYHEKYPTIYHLRKKLVDSTDKADLRLIYLALAHMIKFRGHFLIEGDLNPDNSDVDKLFIQLVQTYNQLFEENPINASGVDAKAILSARLSKSRRLENLIAQLPGEKKNGLFGNLIALSLGLTPNFKSNFDLAEDAKLQLSKDTYDDDLDNLLAQIGDQYADLFLAAKNLSDAILLSDILRVNTEITKAPLSASMIKRYDEHHQDLTLLKALVRQQLPEKYKEIFFDQSKNGYAGYIDGGASQEEFYKFIKPILEKMDGTEELLVKLNREDLLRKQRTFDNGSIPHQIHLGELHAILRRQEDFYPFLKDNREKIEKILTFRIPYYVGPLARGNSRFAWMTRKSEETITPWNFEEVVDKGASAQSFIERMTNFDKNLPNEKVLPKHSLLYEYFTVYNELTKVKYVTEGMRKPAFLSGEQKKAIVDLLFKTNRKVTVKQLKEDYFKKIECFDSVEISGVEDRFNASLGTYHDLLKIIKDKDFLDNEENEDILEDIVLTLTLFEDREMIEERLKTYAHLFDDKVMKQLKRRRYTGWGRLSRKLINGIRDKQSGKTILDFLKSDGFANRNFMQLIHDDSLTFKEDIQKAQVSGQGDSLHEHIANLAGSPAIKKGILQTVKVVDELVKVMGRHKPENIVIEMARENQTTQKGQKNSRERMKRIEEGIKELGSQILKEHPVENTQLQNEKLYLYYLQNGRDMYVDQELDINRLSDYDVDHIVPQSFLKDDSIDNKVLTRSDKARGKSDNVPSEEVVKKMKNYWRQLLNAKLITQRKFDNLTKAERGGLSELDKAGFIKRQLVETRQITKHVAQILDSRMNTKYDENDKLIREVKVITLKSKLVSDFRKDFQFYKVREINNYHHAHDAYLNAVVGTALIKKYPKLESEFVYGDYKVYDVRKMIAKSEQEIGKATAKYFFYSNIMNFFKTEITLANGEIRKRPLIETNGETGEIVWDKGRDFATVRKVLSMPQVNIVKKTEVQTGGFSKESILPKRNSDKLIARKKDWDPKKYGGFDSPTVAYSVLVVAKVEKGKSKKLKSVKELLGITIMERSSFEKNPIDFLEAKGYKEVKKDLIIKLPKYSLFELENGRKRMLASAGELQKGNELALPSKYVNFLYLASHYEKLKGSPEDNEQKQLFVEQHKHYLDEIIEQISEFSKRVILADANLDKVLSAYNKHRDKPIREQAENIIHLFTLTNLGAPAAFKYFDTTIDRKRYTSTKEVLDATLIHQSITGLYETRIDLSQLGGDGGPAPGGSGSSGGTAPLEEEYRLFLEAPIQNVTLLEQWKREIPKVWAEINPPGLASTQAPIHVQLLSTALPVRVRQYPITLEAKRSLRETIRKFRAAGILRPVHSPWNTPLLPVRKSGTSEYRMVQDLREVNKRVETIHPTVPNPYTLLSLLPPDRIWYSVLDLKDAFFCIPLAPESQLIFAFEWADAEEGESGQLTWTRLPQGFKNSPTLFNEALNRDLQGFRLDHPSVSLLQYVDDLLIAADTQAACLSATRDLLMTLAELGYRVSGKKAQLCQEEVTYLGFKIHKGSRSLSNSRTQAILQIPVPKTKRQVREFLGKIGYCRLFIPGFAELAQPLYAATRPGNDPLVWGEKEEEAFQSLKLALTQPPALALPSLDKPFQLFVEETSGAAKGVLTQALGPWKRPVAYLSKRLDPVAAGWPRCLRAIAAAALLTREASKLTFGQDIEITSSHNLESLLRSPPDKWLTNARITQYQVLLLDPPRVRFKQTAALNPATLLPETDDTLPIHHCLDTLDSLTSTRPDLTDQPLAQAEATLFTDGSSYIRDGKRYAGAAVVTLDSVIWAEPLPIGTSAQKAELIALTKALEWSKDKSVNIYTDSRYAFATLHVHGMIYRERGWLTAGGKAIKNAPEILALLTAVWLPKRVAVMHCKGHQKDDAPTSTGNRRADEVAREVAIRPLSTQATISAGKRTADGSEFEKRTADGSEFESPKKKAKVE

SEQ ID NO: 1386 - protein, 2099 aa, synthetic construct
MPAAKRVKLDGGDKKYSIGLDIGTNSVGWAVITDEYKVPSKKFKVLGNTDRHSIKKNLIGALLFDSGETAEATRLKRTARRRYTRRKNRICYLQEIFSNEMAKVDDSFFHRLEESFLVEEDKKHERHPIFGNIVDEVAYHEKYPTIYHLRKKLVDSTDKADLRLIYLALAHMIKFRGHFLIEGDLNPDNSDVDKLFIQLVQTYNQLFEENPINASGVDAKAILSARLSKSRRLENLIAQLPGEKKNGLFGNLIALSLGLTPNFKSNFDLAEDAKLQLSKDTYDDDLDNLLAQIGDQYADLFLAAKNLSDAILLSDILRVNTEITKAPLSASMIKRYDEHHQDLTLLKALVRQQLPEKYKEIFFDQSKNGYAGYIDGGASQEEFYKFIKPILEKMDGTEELLVKLNREDLLRKQRTFDNGSIPHQIHLGELHAILRRQEDFYPFLKDNREKIEKILTFRIPYYVGPLARGNSRFAWMTRKSEETITPWNFEEVVDKGASAQSFIERMTNFDKNLPNEKVLPKHSLLYEYFTVYNELTKVKYVTEGMRKPAFLSGEQKKAIVDLLFKTNRKVTVKQLKEDYFKKIECFDSVEISGVEDRFNASLGTYHDLLKIIKDKDFLDNEENEDILEDIVLTLTLFEDREMIEERLKTYAHLFDDKVMKQLKRRRYTGWGRLSRKLINGIRDKQSGKTILDFLKSDGFANRNFMQLIHDDSLTFKEDIQKAQVSGQGDSLHEHIANLAGSPAIKKGILQTVKVVDELVKVMGRHKPENIVIEMARENQTTQKGQKNSRERMKRIEEGIKELGSQILKEHPVENTQLQNEKLYLYYLQNGRDMYVDQELDINRLSDYDVDHIVPQSFLKDDSIDNKVLTRSDKARGKSDNVPSEEVVKKMKNYWRQLLNAKLITQRKFDNLTKAERGGLSELDKAGFIKRQLVETRQITKHVAQILDSRMNTKYDENDKLIREVKVITLKSKLVSDFRKDFQFYKVREINNYHHAHDAYLNAVVGTALIKKYPKLESEFVYGDYKVYDVRKMIAKSEQEIGKATAKYFFYSNIMNFFKTEITLANGEIRKRPLIETNGETGEIVWDKGRDFATVRKVLSMPQVNIVKKTEVQTGGFSKESILPKRNSDKLIARKKDWDPKKYGGFDSPTVAYSVLVVAKVEKGKSKKLKSVKELLGITIMERSSFEKNPIDFLEAKGYKEVKKDLIIKLPKYSLFELENGRKRMLASAGELQKGNELALPSKYVNFLYLASHYEKLKGSPEDNEQKQLFVEQHKHYLDEIIEQISEFSKRVILADANLDKVLSAYNKHRDKPIREQAENIIHLFTLTNLGAPAAFKYFDTTIDRKRYTSTKEVLDATLIHQSITGLYETRIDLSQLGGDGGGSSGSSGSSGSSGGTAPLEEEYRLFLEAPIQNVTLLEQWKREIPKVWAEINPPGLASTQAPIHVQLLSTALPVRVRQYPITLEAKRSLRETIRKFRAAGILRPVHSPWNTPLLPVRKSGTSEYRMVQDLREVNKRVETIHPTVPNPYTLLSLLPPDRIWYSVLDLKDAFFCIPLAPESQLIFAFEWADAEEGESGQLTWTRLPQGFKNSPTLFNEALNRDLQGFRLDHPSVSLLQYVDDLLIAADTQAACLSATRDLLMTLAELGYRVSGKKAQLCQEEVTYLGFKIHKGSRSLSNSRTQAILQIPVPKTKRQVREFLGKIGYCRLFIPGFAELAQPLYAATRPGNDPLVWGEKEEEAFQSLKLALTQPPALALPSLDKPFQLFVEETSGAAKGVLTQALGPWKRPVAYLSKRLDPVAAGWPRCLRAIAAAALLTREASKLTFGQDIEITSSHNLESLLRSPPDKWLTNARITQYQVLLLDPPRVRFKQTAALNPATLLPETDDTLPIHHCLDTLDSLTSTRPDLTDQPLAQAEATLFTDGSSYIRDGKRYAGAAVVTLDSVIWAEPLPIGTSAQKAELIALTKALEWSKDKSVNIYTDSRYAFATLHVHGMIYRERGWLTAGGKAIKNAPEILALLTAVWLPKRVAVMHCKGHQKDDAPTSTGNRRADEVAREVAIRPLSTQATISAGKRTADGSEFEKRTADGSEFESPKKKAKVE

SEQ ID NO: 1387 - protein, 2098 aa, synthetic construct
MPAAKRVKLDGGDKKYSIGLDIGTNSVGWAVITDEYKVPSKKFKVLGNTDRHSIKKNLIGALLFDSGETAEATRLKRTARRRYTRRKNRICYLQEIFSNEMAKVDDSFFHRLEESFLVEEDKKHERHPIFGNIVDEVAYHEKYPTIYHLRKKLVDSTDKADLRLIYLALAHMIKFRGHFLIEGDLNPDNSDVDKLFIQLVQTYNQLFEENPINASGVDAKAILSARLSKSRRLENLIAQLPGEKKNGLFGNLIALSLGLTPNFKSNFDLAEDAKLQLSKDTYDDDLDNLLAQIGDQYADLFLAAKNLSDAILLSDILRVNTEITKAPLSASMIKRYDEHHQDLTLLKALVRQQLPEKYKEIFFDQSKNGYAGYIDGGASQEEFYKFIKPILEKMDGTEELLVKLNREDLLRKQRTFDNGSIPHQIHLGELHAILRRQEDFYPFLKDNREKIEKILTFRIPYYVGPLARGNSRFAWMTRKSEETITPWNFEEVVDKGASAQSFIERMTNFDKNLPNEKVLPKHSLLYEYFTVYNELTKVKYVTEGMRKPAFLSGEQKKAIVDLLFKTNRKVTVKQLKEDYFKKIECFDSVEISGVEDRFNASLGTYHDLLKIIKDKDFLDNEENEDILEDIVLTLTLFEDREMIEERLKTYAHLFDDKVMKQLKRRRYTGWGRLSRKLINGIRDKQSGKTILDFLKSDGFANRNFMQLIHDDSLTFKEDIQKAQVSGQGDSLHEHIANLAGSPAIKKGILQTVKVVDELVKVMGRHKPENIVIEMARENQTTQKGQKNSRERMKRIEEGIKELGSQILKEHPVENTQLQNEKLYLYYLQNGRDMYVDQELDINRLSDYDVDHIVPQSFLKDDSIDNKVLTRSDKARGKSDNVPSEEVVKKMKNYWRQLLNAKLITQRKFDNLTKAERGGLSELDKAGFIKRQLVETRQITKHVAQILDSRMNTKYDENDKLIREVKVITLKSKLVSDFRKDFQFYKVREINNYHHAHDAYLNAVVGTALIKKYPKLESEFVYGDYKVYDVRKMIAKSEQEIGKATAKYFFYSNIMNFFKTEITLANGEIRKRPLIETNGETGEIVWDKGRDFATVRKVLSMPQVNIVKKTEVQTGGFSKESILPKRNSDKLIARKKDWDPKKYGGFDSPTVAYSVLVVAKVEKGKSKKLKSVKELLGITIMERSSFEKNPIDFLEAKGYKEVKKDLIIKLPKYSLFELENGRKRMLASAGELQKGNELALPSKYVNFLYLASHYEKLKGSPEDNEQKQLFVEQHKHYLDEIIEQISEFSKRVILADANLDKVLSAYNKHRDKPIREQAENIIHLFTLTNLGAPAAFKYFDTTIDRKRYTSTKEVLDATLIHQSITGLYETRIDLSQLGGDGGPAPEAAAKGGGGGTAPLEEEYRLFLEAPIQNVTLLEQWKREIPKVWAEINPPGLASTQAPIHVQLLSTALPVRVRQYPITLEAKRSLRETIRKFRAAGILRPVHSPWNTPLLPVRKSGTSEYRMVQDLREVNKRVETIHPTVPNPYTLLSLLPPDRIWYSVLDLKDAFFCIPLAPESQLIFAFEWADAEEGESGQLTWTRLPQGFKNSPTLFNEALNRDLQGFRLDHPSVSLLQYVDDLLIAADTQAACLSATRDLLMTLAELGYRVSGKKAQLCQEEVTYLGFKIHKGSRSLSNSRTQAILQIPVPKTKRQVREFLGKIGYCRLFIPGFAELAQPLYAATRPGNDPLVWGEKEEEAFQSLKLALTQPPALALPSLDKPFQLFVEETSGAAKGVLTQALGPWKRPVAYLSKRLDPVAAGWPRCLRAIAAAALLTREASKLTFGQDIEITSSHNLESLLRSPPDKWLTNARITQYQVLLLDPPRVRFKQTAALNPATLLPETDDTLPIHHCLDTLDSLTSTRPDLTDQPLAQAEATLFTDGSSYIRDGKRYAGAAVVTLDSVIWAEPLPIGTSAQKAELIALTKALEWSKDKSVNIYTDSRYAFATLHVHGMIYRERGWLTAGGKAIKNAPEILALLTAVWLPKRVAVMHCKGHQKDDAPTSTGNRRADEVAREVAIRPLSTQATISAGKRTADGSEFEKRTADGSEFESPKKKAKVE

SEQ ID NO: 1388 - protein, 2098 aa, synthetic construct
MPAAKRVKLDGGDKKYSIGLDIGTNSVGWAVITDEYKVPSKKFKVLGNTDRHSIKKNLIGALLFDSGETAEATRLKRTARRRYTRRKNRICYLQEIFSNEMAKVDDSFFHRLEESFLVEEDKKHERHPIFGNIVDEVAYHEKYPTIYHLRKKLVDSTDKADLRLIYLALAHMIKFRGHFLIEGDLNPDNSDVDKLFIQLVQTYNQLFEENPINASGVDAKAILSARLSKSRRLENLIAQLPGEKKNGLFGNLIALSLGLTPNFKSNFDLAEDAKLQLSKDTYDDDLDNLLAQIGDQYADLFLAAKNLSDAILLSDILRVNTEITKAPLSASMIKRYDEHHQDLTLLKALVRQQLPEKYKEIFFDQSKNGYAGYIDGGASQEEFYKFIKPILEKMDGTEELLVKLNREDLLRKQRTFDNGSIPHQIHLGELHAILRRQEDFYPFLKDNREKIEKILTFRIPYYVGPLARGNSRFAWMTRKSEETITPWNFEEVVDKGASAQSFIERMTNFDKNLPNEKVLPKHSLLYEYFTVYNELTKVKYVTEGMRKPAFLSGEQKKAIVDLLFKTNRKVTVKQLKEDYFKKIECFDSVEISGVEDRFNASLGTYHDLLKIIKDKDFLDNEENEDILEDIVLTLTLFEDREMIEERLKTYAHLFDDKVMKQLKRRRYTGWGRLSRKLINGIRDKQSGKTILDFLKSDGFANRNFMQLIHDDSLTFKEDIQKAQVSGQGDSLHEHIANLAGSPAIKKGILQTVKVVDELVKVMGRHKPENIVIEMARENQTTQKGQKNSRERMKRIEEGIKELGSQILKEHPVENTQLQNEKLYLYYLQNGRDMYVDQELDINRLSDYDVDHIVPQSFLKDDSIDNKVLTRSDKARGKSDNVPSEEVVKKMKNYWRQLLNAKLITQRKFDNLTKAERGGLSELDKAGFIKRQLVETRQITKHVAQILDSRMNTKYDENDKLIREVKVITLKSKLVSDFRKDFQFYKVREINNYHHAHDAYLNAVVGTALIKKYPKLESEFVYGDYKVYDVRKMIAKSEQEIGKATAKYFFYSNIMNFFKTEITLANGEIRKRPLIETNGETGEIVWDKGRDFATVRKVLSMPQVNIVKKTEVQTGGFSKESILPKRNSDKLIARKKDWDPKKYGGFDSPTVAYSVLVVAKVEKGKSKKLKSVKELLGITIMERSSFEKNPIDFLEAKGYKEVKKDLIIKLPKYSLFELENGRKRMLASAGELQKGNELALPSKYVNFLYLASHYEKLKGSPEDNEQKQLFVEQHKHYLDEIIEQISEFSKRVILADANLDKVLSAYNKHRDKPIREQAENIIHLFTLTNLGAPAAFKYFDTTIDRKRYTSTKEVLDATLIHQSITGLYETRIDLSQLGGDGGPAPEAAAKGSSGGTAPLEEEYRLFLEAPIQNVTLLEQWKREIPKVWAEINPPGLASTQAPIHVQLLSTALPVRVRQYPITLEAKRSLRETIRKFRAAGILRPVHSPWNTPLLPVRKSGTSEYRMVQDLREVNKRVETIHPTVPNPYTLLSLLPPDRIWYSVLDLKDAFFCIPLAPESQLIFAFEWADAEEGESGQLTWTRLPQGFKNSPTLFNEALNRDLQGFRLDHPSVSLLQYVDDLLIAADTQAACLSATRDLLMTLAELGYRVSGKKAQLCQEEVTYLGFKIHKGSRSLSNSRTQAILQIPVPKTKRQVREFLGKIGYCRLFIPGFAELAQPLYAATRPGNDPLVWGEKEEEAFQSLKLALTQPPALALPSLDKPFQLFVEETSGAAKGVLTQALGPWKRPVAYLSKRLDPVAAGWPRCLRAIAAAALLTREASKLTFGQDIEITSSHNLESLLRSPPDKWLTNARITQYQVLLLDPPRVRFKQTAALNPATLLPETDDTLPIHHCLDTLDSLTSTRPDLTDQPLAQAEATLFTDGSSYIRDGKRYAGAAVVTLDSVIWAEPLPIGTSAQKAELIALTKALEWSKDKSVNIYTDSRYAFATLHVHGMIYRERGWLTAGGKAIKNAPEILALLTAVWLPKRVAVMHCKGHQKDDAPTSTGNRRADEVAREVAIRPLSTQATISAGKRTADGSEFEKRTADGSEFESPKKKAKVE

SEQ ID NO: 1389 - protein, 2090 aa, synthetic construct
MPAAKRVKLDGGDKKYSIGLDIGTNSVGWAVITDEYKVPSKKFKVLGNTDRHSIKKNLIGALLFDSGETAEATRLKRTARRRYTRRKNRICYLQEIFSNEMAKVDDSFFHRLEESFLVEEDKKHERHPIFGNIVDEVAYHEKYPTIYHLRKKLVDSTDKADLRLIYLALAHMIKFRGHFLIEGDLNPDNSDVDKLFIQLVQTYNQLFEENPINASGVDAKAILSARLSKSRRLENLIAQLPGEKKNGLFGNLIALSLGLTPNFKSNFDLAEDAKLQLSKDTYDDDLDNLLAQIGDQYADLFLAAKNLSDAILLSDILRVNTEITKAPLSASMIKRYDEHHQDLTLLKALVRQQLPEKYKEIFFDQSKNGYAGYIDGGASQEEFYKFIKPILEKMDGTEELLVKLNREDLLRKQRTFDNGSIPHQIHLGELHAILRRQEDFYPFLKDNREKIEKILTFRIPYYVGPLARGNSRFAWMTRKSEETITPWNFEEVVDKGASAQSFIERMTNFDKNLPNEKVLPKHSLLYEYFTVYNELTKVKYVTEGMRKPAFLSGEQKKAIVDLLFKTNRKVTVKQLKEDYFKKIECFDSVEISGVEDRFNASLGTYHDLLKIIKDKDFLDNEENEDILEDIVLTLTLFEDREMIEERLKTYAHLFDDKVMKQLKRRRYTGWGRLSRKLINGIRDKQSGKTILDFLKSDGFANRNFMQLIHDDSLTFKEDIQKAQVSGQGDSLHEHIANLAGSPAIKKGILQTVKVVDELVKVMGRHKPENIVIEMARENQTTQKGQKNSRERMKRIEEGIKELGSQILKEHPVENTQLQNEKLYLYYLQNGRDMYVDQELDINRLSDYDVDHIVPQSFLKDDSIDNKVLTRSDKARGKSDNVPSEEVVKKMKNYWRQLLNAKLITQRKFDNLTKAERGGLSELDKAGFIKRQLVETRQITKHVAQILDSRMNTKYDENDKLIREVKVITLKSKLVSDFRKDFQFYKVREINNYHHAHDAYLNAVVGTALIKKYPKLESEFVYGDYKVYDVRKMIAKSEQEIGKATAKYFFYSNIMNFFKTEITLANGEIRKRPLIETNGETGEIVWDKGRDFATVRKVLSMPQVNIVKKTEVQTGGFSKESILPKRNSDKLIARKKDWDPKKYGGFDSPTVAYSVLVVAKVEKGKSKKLKSVKELLGITIMERSSFEKNPIDFLEAKGYKEVKKDLIIKLPKYSLFELENGRKRMLASAGELQKGNELALPSKYVNFLYLASHYEKLKGSPEDNEQKQLFVEQHKHYLDEIIEQISEFSKRVILADANLDKVLSAYNKHRDKPIREQAENIIHLFTLTNLGAPAAFKYFDTTIDRKRYTSTKEVLDATLIHQSITGLYETRIDLSQLGGDGGGGGGGTAPLEEEYRLFLEAPIQNVTLLEQWKREIPKVWAEINPPGLASTQAPIHVQLLSTALPVRVRQYPITLEAKRSLRETIRKFRAAGILRPVHSPWNTPLLPVRKSGTSEYRMVQDLREVNKRVETIHPTVPNPYTLLSLLPPDRIWYSVLDLKDAFFCIPLAPESQLIFAFEWADAEEGESGQLTWTRLPQGFKNSPTLFNEALNRDLQGFRLDHPSVSLLQYVDDLLIAADTQAACLSATRDLLMTLAELGYRVSGKKAQLCQEEVTYLGFKIHKGSRSLSNSRTQAILQIPVPKTKRQVREFLGKIGYCRLFIPGFAELAQPLYAATRPGNDPLVWGEKEEEAFQSLKLALTQPPALALPSLDKPFQLFVEETSGAAKGVLTQALGPWKRPVAYLSKRLDPVAAGWPRCLRAIAAAALLTREASKLTFGQDIEITSSHNLESLLRSPPDKWLTNARITQYQVLLLDPPRVRFKQTAALNPATLLPETDDTLPIHHCLDTLDSLTSTRPDLTDQPLAQAEATLFTDGSSYIRDGKRYAGAAVVTLDSVIWAEPLPIGTSAQKAELIALTKALEWSKDKSVNIYTDSRYAFATLHVHGMIYRERGWLTAGGKAIKNAPEILALLTAVWLPKRVAVMHCKGHQKDDAPTSTGNRRADEVAREVAIRPLSTQATISAGKRTADGSEFEKRTADGSEFESPKKKAKVE

SEQ ID NO: 1390 - protein, 2098 aa, synthetic construct
MPAAKRVKLDGGDKKYSIGLDIGTNSVGWAVITDEYKVPSKKFKVLGNTDRHSIKKNLIGALLFDSGETAEATRLKRTARRRYTRRKNRICYLQEIFSNEMAKVDDSFFHRLEESFLVEEDKKHERHPIFGNIVDEVAYHEKYPTIYHLRKKLVDSTDKADLRLIYLALAHMIKFRGHFLIEGDLNPDNSDVDKLFIQLVQTYNQLFEENPINASGVDAKAILSARLSKSRRLENLIAQLPGEKKNGLFGNLIALSLGLTPNFKSNFDLAEDAKLQLSKDTYDDDLDNLLAQIGDQYADLFLAAKNLSDAILLSDILRVNTEITKAPLSASMIKRYDEHHQDLTLLKALVRQQLPEKYKEIFFDQSKNGYAGYIDGGASQEEFYKFIKPILEKMDGTEELLVKLNREDLLRKQRTFDNGSIPHQIHLGELHAILRRQEDFYPFLKDNREKIEKILTFRIPYYVGPLARGNSRFAWMTRKSEETITPWNFEEVVDKGASAQSFIERMTNFDKNLPNEKVLPKHSLLYEYFTVYNELTKVKYVTEGMRKPAFLSGEQKKAIVDLLFKTNRKVTVKQLKEDYFKKIECFDSVEISGVEDRFNASLGTYHDLLKIIKDKDFLDNEENEDILEDIVLTLTLFEDREMIEERLKTYAHLFDDKVMKQLKRRRYTGWGRLSRKLINGIRDKQSGKTILDFLKSDGFANRNFMQLIHDDSLTFKEDIQKAQVSGQGDSLHEHIANLAGSPAIKKGILQTVKVVDELVKVMGRHKPENIVIEMARENQTTQKGQKNSRERMKRIEEGIKELGSQILKEHPVENTQLQNEKLYLYYLQNGRDMYVDQELDINRLSDYDVDHIVPQSFLKDDSIDNKVLTRSDKARGKSDNVPSEEVVKKMKNYWRQLLNAKLITQRKFDNLTKAERGGLSELDKAGFIKRQLVETRQITKHVAQILDSRMNTKYDENDKLIREVKVITLKSKLVSDFRKDFQFYKVREINNYHHAHDAYLNAVVGTALIKKYPKLESEFVYGDYKVYDVRKMIAKSEQEIGKATAKYFFYSNIMNFFKTEITLANGEIRKRPLIETNGETGEIVWDKGRDFATVRKVLSMPQVNIVKKTEVQTGGFSKESILPKRNSDKLIARKKDWDPKKYGGFDSPTVAYSVLVVAKVEKGKSKKLKSVKELLGITIMERSSFEKNPIDFLEAKGYKEVKKDLIIKLPKYSLFELENGRKRMLASAGELQKGNELALPSKYVNFLYLASHYEKLKGSPEDNEQKQLFVEQHKHYLDEIIEQISEFSKRVILADANLDKVLSAYNKHRDKPIREQAENIIHLFTLTNLGAPAAFKYFDTTIDRKRYTSTKEVLDATLIHQSITGLYETRIDLSQLGGDGGEAAAKGGGGGSGGTAPLEEEYRLFLEAPIQNVTLLEQWKREIPKVWAEINPPGLASTQAPIHVQLLSTALPVRVRQYPITLEAKRSLRETIRKFRAAGILRPVHSPWNTPLLPVRKSGTSEYRMVQDLREVNKRVETIHPTVPNPYTLLSLLPPDRIWYSVLDLKDAFFCIPLAPESQLIFAFEWADAEEGESGQLTWTRLPQGFKNSPTLFNEALNRDLQGFRLDHPSVSLLQYVDDLLIAADTQAACLSATRDLLMTLAELGYRVSGKKAQLCQEEVTYLGFKIHKGSRSLSNSRTQAILQIPVPKTKRQVREFLGKIGYCRLFIPGFAELAQPLYAATRPGNDPLVWGEKEEEAFQSLKLALTQPPALALPSLDKPFQLFVEETSGAAKGVLTQALGPWKRPVAYLSKRLDPVAAGWPRCLRAIAAAALLTREASKLTFGQDIEITSSHNLESLLRSPPDKWLTNARITQYQVLLLDPPRVRFKQTAALNPATLLPETDDTLPIHHCLDTLDSLTSTRPDLTDQPLAQAEATLFTDGSSYIRDGKRYAGAAVVTLDSVIWAEPLPIGTSAQKAELIALTKALEWSKDKSVNIYTDSRYAFATLHVHGMIYRERGWLTAGGKAIKNAPEILALLTAVWLPKRVAVMHCKGHQKDDAPTSTGNRRADEVAREVAIRPLSTQATISAGKRTADGSEFEKRTADGSEFESPKKKAKVE

SEQ ID NO: 1391 - protein, 2093 aa, synthetic construct
MPAAKRVKLDGGDKKYSIGLDIGTNSVGWAVITDEYKVPSKKFKVLGNTDRHSIKKNLIGALLFDSGETAEATRLKRTARRRYTRRKNRICYLQEIFSNEMAKVDDSFFHRLEESFLVEEDKKHERHPIFGNIVDEVAYHEKYPTIYHLRKKLVDSTDKADLRLIYLALAHMIKFRGHFLIEGDLNPDNSDVDKLFIQLVQTYNQLFEENPINASGVDAKAILSARLSKSRRLENLIAQLPGEKKNGLFGNLIALSLGLTPNFKSNFDLAEDAKLQLSKDTYDDDLDNLLAQIGDQYADLFLAAKNLSDAILLSDILRVNTEITKAPLSASMIKRYDEHHQDLTLLKALVRQQLPEKYKEIFFDQSKNGYAGYIDGGASQEEFYKFIKPILEKMDGTEELLVKLNREDLLRKQRTFDNGSIPHQIHLGELHAILRRQEDFYPFLKDNREKIEKILTFRIPYYVGPLARGNSRFAWMTRKSEETITPWNFEEVVDKGASAQSFIERMTNFDKNLPNEKVLPKHSLLYEYFTVYNELTKVKYVTEGMRKPAFLSGEQKKAIVDLLFKTNRKVTVKQLKEDYFKKIECFDSVEISGVEDRFNASLGTYHDLLKIIKDKDFLDNEENEDILEDIVLTLTLFEDREMIEERLKTYAHLFDDKVMKQLKRRRYTGWGRLSRKLINGIRDKQSGKTILDFLKSDGFANRNFMQLIHDDSLTFKEDIQKAQVSGQGDSLHEHIANLAGSPAIKKGILQTVKVVDELVKVMGRHKPENIVIEMARENQTTQKGQKNSRERMKRIEEGIKELGSQILKEHPVENTQLQNEKLYLYYLQNGRDMYVDQELDINRLSDYDVDHIVPQSFLKDDSIDNKVLTRSDKARGKSDNVPSEEVVKKMKNYWRQLLNAKLITQRKFDNLTKAERGGLSELDKAGFIKRQLVETRQITKHVAQILDSRMNTKYDENDKLIREVKVITLKSKLVSDFRKDFQFYKVREINNYHHAHDAYLNAVVGTALIKKYPKLESEFVYGDYKVYDVRKMIAKSEQEIGKATAKYFFYSNIMNFFKTEITLANGEIRKRPLIETNGETGEIVWDKGRDFATVRKVLSMPQVNIVKKTEVQTGGFSKESILPKRNSDKLIARKKDWDPKKYGGFDSPTVAYSVLVVAKVEKGKSKKLKSVKELLGITIMERSSFEKNPIDFLEAKGYKEVKKDLIIKLPKYSLFELENGRKRMLASAGELQKGNELALPSKYVNFLYLASHYEKLKGSPEDNEQKQLFVEQHKHYLDEIIEQISEFSKRVILADANLDKVLSAYNKHRDKPIREQAENIIHLFTLTNLGAPAAFKYFDTTIDRKRYTSTKEVLDATLIHQSITGLYETRIDLSQLGGDGGGGSGGGGGTAPLEEEYRLFLEAPIQNVTLLEQWKREIPKVWAEINPPGLASTQAPIHVQLLSTALPVRVRQYPITLEAKRSLRETIRKFRAAGILRPVHSPWNTPLLPVRKSGTSEYRMVQDLREVNKRVETIHPTVPNPYTLLSLLPPDRIWYSVLDLKDAFFCIPLAPESQLIFAFEWADAEEGESGQLTWTRLPQGFKNSPTLFNEALNRDLQGFRLDHPSVSLLQYVDDLLIAADTQAACLSATRDLLMTLAELGYRVSGKKAQLCQEEVTYLGFKIHKGSRSLSNSRTQAILQIPVPKTKRQVREFLGKIGYCRLFIPGFAELAQPLYAATRPGNDPLVWGEKEEEAFQSLKLALTQPPALALPSLDKPFQLFVEETSGAAKGVLTQALGPWKRPVAYLSKRLDPVAAGWPRCLRAIAAAALLTREASKLTFGQDIEITSSHNLESLLRSPPDKWLTNARITQYQVLLLDPPRVRFKQTAALNPATLLPETDDTLPIHHCLDTLDSLTSTRPDLTDQPLAQAEATLFTDGSSYIRDGKRYAGAAVVTLDSVIWAEPLPIGTSAQKAELIALTKALEWSKDKSVNIYTDSRYAFATLHVHGMIYRERGWLTAGGKAIKNAPEILALLTAVWLPKRVAVMHCKGHQKDDAPTSTGNRRADEVAREVAIRPLSTQATISAGKRTADGSEFEKRTADGSEFESPKKKAKVE

SEQ ID NO: 1392 - protein, 2093 aa, synthetic construct
MPAAKRVKLDGGDKKYSIGLDIGTNSVGWAVITDEYKVPSKKFKVLGNTDRHSIKKNLIGALLFDSGETAEATRLKRTARRRYTRRKNRICYLQEIFSNEMAKVDDSFFHRLEESFLVEEDKKHERHPIFGNIVDEVAYHEKYPTIYHLRKKLVDSTDKADLRLIYLALAHMIKFRGHFLIEGDLNPDNSDVDKLFIQLVQTYNQLFEENPINASGVDAKAILSARLSKSRRLENLIAQLPGEKKNGLFGNLIALSLGLTPNFKSNFDLAEDAKLQLSKDTYDDDLDNLLAQIGDQYADLFLAAKNLSDAILLSDILRVNTEITKAPLSASMIKRYDEHHQDLTLLKALVRQQLPEKYKEIFFDQSKNGYAGYIDGGASQEEFYKFIKPILEKMDGTEELLVKLNREDLLRKQRTFDNGSIPHQIHLGELHAILRRQEDFYPFLKDNREKIEKILTFRIPYYVGPLARGNSRFAWMTRKSEETITPWNFEEVVDKGASAQSFIERMTNFDKNLPNEKVLPKHSLLYEYFTVYNELTKVKYVTEGMRKPAFLSGEQKKAIVDLLFKTNRKVTVKQLKEDYFKKIECFDSVEISGVEDRFNASLGTYHDLLKIIKDKDFLDNEENEDILEDIVLTLTLFEDREMIEERLKTYAHLFDDKVMKQLKRRRYTGWGRLSRKLINGIRDKQSGKTILDFLKSDGFANRNFMQLIHDDSLTFKEDIQKAQVSGQGDSLHEHIANLAGSPAIKKGILQTVKVVDELVKVMGRHKPENIVIEMARENQTTQKGQKNSRERMKRIEEGIKELGSQILKEHPVENTQLQNEKLYLYYLQNGRDMYVDQELDINRLSDYDVDHIVPQSFLKDDSIDNKVLTRSDKARGKSDNVPSEEVVKKMKNYWRQLLNAKLITQRKFDNLTKAERGGLSELDKAGFIKRQLVETRQITKHVAQILDSRMNTKYDENDKLIREVKVITLKSKLVSDFRKDFQFYKVREINNYHHAHDAYLNAVVGTALIKKYPKLESEFVYGDYKVYDVRKMIAKSEQEIGKATAKYFFYSNIMNFFKTEITLANGEIRKRPLIETNGETGEIVWDKGRDFATVRKVLSMPQVNIVKKTEVQTGGFSKESILPKRNSDKLIARKKDWDPKKYGGFDSPTVAYSVLVVAKVEKGKSKKLKSVKELLGITIMERSSFEKNPIDFLEAKGYKEVKKDLIIKLPKYSLFELENGRKRMLASAGELQKGNELALPSKYVNFLYLASHYEKLKGSPEDNEQKQLFVEQHKHYLDEIIEQISEFSKRVILADANLDKVLSAYNKHRDKPIREQAENIIHLFTLTNLGAPAAFKYFDTTIDRKRYTSTKEVLDATLIHQSITGLYETRIDLSQLGGDGGGGSPAPGGTAPLEEEYRLFLEAPIQNVTLLEQWKREIPKVWAEINPPGLASTQAPIHVQLLSTALPVRVRQYPITLEAKRSLRETIRKFRAAGILRPVHSPWNTPLLPVRKSGTSEYRMVQDLREVNKRVETIHPTVPNPYTLLSLLPPDRIWYSVLDLKDAFFCIPLAPESQLIFAFEWADAEEGESGQLTWTRLPQGFKNSPTLFNEALNRDLQGFRLDHPSVSLLQYVDDLLIAADTQAACLSATRDLLMTLAELGYRVSGKKAQLCQEEVTYLGFKIHKGSRSLSNSRTQAILQIPVPKTKRQVREFLGKIGYCRLFIPGFAELAQPLYAATRPGNDPLVWGEKEEEAFQSLKLALTQPPALALPSLDKPFQLFVEETSGAAKGVLTQALGPWKRPVAYLSKRLDPVAAGWPRCLRAIAAAALLTREASKLTFGQDIEITSSHNLESLLRSPPDKWLTNARITQYQVLLLDPPRVRFKQTAALNPATLLPETDDTLPIHHCLDTLDSLTSTRPDLTDQPLAQAEATLFTDGSSYIRDGKRYAGAAVVTLDSVIWAEPLPIGTSAQKAELIALTKALEWSKDKSVNIYTDSRYAFATLHVHGMIYRERGWLTAGGKAIKNAPEILALLTAVWLPKRVAVMHCKGHQKDDAPTSTGNRRADEVAREVAIRPLSTQATISAGKRTADGSEFEKRTADGSEFESPKKKAKVE

SEQ ID NO: 1393 - protein, 2102 aa, synthetic construct
MPAAKRVKLDGGDKKYSIGLDIGTNSVGWAVITDEYKVPSKKFKVLGNTDRHSIKKNLIGALLFDSGETAEATRLKRTARRRYTRRKNRICYLQEIFSNEMAKVDDSFFHRLEESFLVEEDKKHERHPIFGNIVDEVAYHEKYPTIYHLRKKLVDSTDKADLRLIYLALAHMIKFRGHFLIEGDLNPDNSDVDKLFIQLVQTYNQLFEENPINASGVDAKAILSARLSKSRRLENLIAQLPGEKKNGLFGNLIALSLGLTPNFKSNFDLAEDAKLQLSKDTYDDDLDNLLAQIGDQYADLFLAAKNLSDAILLSDILRVNTEITKAPLSASMIKRYDEHHQDLTLLKALVRQQLPEKYKEIFFDQSKNGYAGYIDGGASQEEFYKFIKPILEKMDGTEELLVKLNREDLLRKQRTFDNGSIPHQIHLGELHAILRRQEDFYPFLKDNREKIEKILTFRIPYYVGPLARGNSRFAWMTRKSEETITPWNFEEVVDKGASAQSFIERMTNFDKNLPNEKVLPKHSLLYEYFTVYNELTKVKYVTEGMRKPAFLSGEQKKAIVDLLFKTNRKVTVKQLKEDYFKKIECFDSVEISGVEDRFNASLGTYHDLLKIIKDKDFLDNEENEDILEDIVLTLTLFEDREMIEERLKTYAHLFDDKVMKQLKRRRYTGWGRLSRKLINGIRDKQSGKTILDFLKSDGFANRNFMQLIHDDSLTFKEDIQKAQVSGQGDSLHEHIANLAGSPAIKKGILQTVKVVDELVKVMGRHKPENIVIEMARENQTTQKGQKNSRERMKRIEEGIKELGSQILKEHPVENTQLQNEKLYLYYLQNGRDMYVDQELDINRLSDYDVDHIVPQSFLKDDSIDNKVLTRSDKARGKSDNVPSEEVVKKMKNYWRQLLNAKLITQRKFDNLTKAERGGLSELDKAGFIKRQLVETRQITKHVAQILDSRMNTKYDENDKLIREVKVITLKSKLVSDFRKDFQFYKVREINNYHHAHDAYLNAVVGTALIKKYPKLESEFVYGDYKVYDVRKMIAKSEQEIGKATAKYFFYSNIMNFFKTEITLANGEIRKRPLIETNGETGEIVWDKGRDFATVRKVLSMPQVNIVKKTEVQTGGFSKESILPKRNSDKLIARKKDWDPKKYGGFDSPTVAYSVLVVAKVEKGKSKKLKSVKELLGITIMERSSFEKNPIDFLEAKGYKEVKKDLIIKLPKYSLFELENGRKRMLASAGELQKGNELALPSKYVNFLYLASHYEKLKGSPEDNEQKQLFVEQHKHYLDEIIEQISEFSKRVILADANLDKVLSAYNKHRDKPIREQAENIIHLFTLTNLGAPAAFKYFDTTIDRKRYTSTKEVLDATLIHQSITGLYETRIDLSQLGGDGGGGGGSEAAAKGGGGSGGTAPLEEEYRLFLEAPIQNVTLLEQWKREIPKVWAEINPPGLASTQAPIHVQLLSTALPVRVRQYPITLEAKRSLRETIRKFRAAGILRPVHSPWNTPLLPVRKSGTSEYRMVQDLREVNKRVETIHPTVPNPYTLLSLLPPDRIWYSVLDLKDAFFCIPLAPESQLIFAFEWADAEEGESGQLTWTRLPQGFKNSPTLFNEALNRDLQGFRLDHPSVSLLQYVDDLLIAADTQAACLSATRDLLMTLAELGYRVSGKKAQLCQEEVTYLGFKIHKGSRSLSNSRTQAILQIPVPKTKRQVREFLGKIGYCRLFIPGFAELAQPLYAATRPGNDPLVWGEKEEEAFQSLKLALTQPPALALPSLDKPFQLFVEETSGAAKGVLTQALGPWKRPVAYLSKRLDPVAAGWPRCLRAIAAAALLTREASKLTFGQDIEITSSHNLESLLRSPPDKWLTNARITQYQVLLLDPPRVRFKQTAALNPATLLPETDDTLPIHHCLDTLDSLTSTRPDLTDQPLAQAEATLFTDGSSYIRDGKRYAGAAVVTLDSVIWAEPLPIGTSAQKAELIALTKALEWSKDKSVNIYTDSRYAFATLHVHGMIYRERGWLTAGGKAIKNAPEILALLTAVWLPKRVAVMHCKGHQKDDAPTSTGNRRADEVAREVAIRPLSTQATISAGKRTADGSEFEKRTADGSEFESPKKKAKVE

SEQ ID NO: 1394 - protein, 2098 aa, synthetic construct
MPAAKRVKLDGGDKKYSIGLDIGTNSVGWAVITDEYKVPSKKFKVLGNTDRHSIKKNLIGALLFDSGETAEATRLKRTARRRYTRRKNRICYLQEIFSNEMAKVDDSFFHRLEESFLVEEDKKHERHPIFGNIVDEVAYHEKYPTIYHLRKKLVDSTDKADLRLIYLALAHMIKFRGHFLIEGDLNPDNSDVDKLFIQLVQTYNQLFEENPINASGVDAKAILSARLSKSRRLENLIAQLPGEKKNGLFGNLIALSLGLTPNFKSNFDLAEDAKLQLSKDTYDDDLDNLLAQIGDQYADLFLAAKNLSDAILLSDILRVNTEITKAPLSASMIKRYDEHHQDLTLLKALVRQQLPEKYKEIFFDQSKNGYAGYIDGGASQEEFYKFIKPILEKMDGTEELLVKLNREDLLRKQRTFDNGSIPHQIHLGELHAILRRQEDFYPFLKDNREKIEKILTFRIPYYVGPLARGNSRFAWMTRKSEETITPWNFEEVVDKGASAQSFIERMTNFDKNLPNEKVLPKHSLLYEYFTVYNELTKVKYVTEGMRKPAFLSGEQKKAIVDLLFKTNRKVTVKQLKEDYFKKIECFDSVEISGVEDRFNASLGTYHDLLKIIKDKDFLDNEENEDILEDIVLTLTLFEDREMIEERLKTYAHLFDDKVMKQLKRRRYTGWGRLSRKLINGIRDKQSGKTILDFLKSDGFANRNFMQLIHDDSLTFKEDIQKAQVSGQGDSLHEHIANLAGSPAIKKGILQTVKVVDELVKVMGRHKPENIVIEMARENQTTQKGQKNSRERMKRIEEGIKELGSQILKEHPVENTQLQNEKLYLYYLQNGRDMYVDQELDINRLSDYDVDHIVPQSFLKDDSIDNKVLTRSDKARGKSDNVPSEEVVKKMKNYWRQLLNAKLITQRKFDNLTKAERGGLSELDKAGFIKRQLVETRQITKHVAQILDSRMNTKYDENDKLIREVKVITLKSKLVSDFRKDFQFYKVREINNYHHAHDAYLNAVVGTALIKKYPKLESEFVYGDYKVYDVRKMIAKSEQEIGKATAKYFFYSNIMNFFKTEITLANGEIRKRPLIETNGETGEIVWDKGRDFATVRKVLSMPQVNIVKKTEVQTGGFSKESILPKRNSDKLIARKKDWDPKKYGGFDSPTVAYSVLVVAKVEKGKSKKLKSVKELLGITIMERSSFEKNPIDFLEAKGYKEVKKDLIIKLPKYSLFELENGRKRMLASAGELQKGNELALPSKYVNFLYLASHYEKLKGSPEDNEQKQLFVEQHKHYLDEIIEQISEFSKRVILADANLDKVLSAYNKHRDKPIREQAENIIHLFTLTNLGAPAAFKYFDTTIDRKRYTSTKEVLDATLIHQSITGLYETRIDLSQLGGDGGGSSEAAAKGGGGGTAPLEEEYRLFLEAPIQNVTLLEQWKREIPKVWAEINPPGLASTQAPIHVQLLSTALPVRVRQYPITLEAKRSLRETIRKFRAAGILRPVHSPWNTPLLPVRKSGTSEYRMVQDLREVNKRVETIHPTVPNPYTLLSLLPPDRIWYSVLDLKDAFFCIPLAPESQLIFAFEWADAEEGESGQLTWTRLPQGFKNSPTLFNEALNRDLQGFRLDHPSVSLLQYVDDLLIAADTQAACLSATRDLLMTLAELGYRVSGKKAQLCQEEVTYLGFKIHKGSRSLSNSRTQAILQIPVPKTKRQVREFLGKIGYCRLFIPGFAELAQPLYAATRPGNDPLVWGEKEEEAFQSLKLALTQPPALALPSLDKPFQLFVEETSGAAKGVLTQALGPWKRPVAYLSKRLDPVAAGWPRCLRAIAAAALLTREASKLTFGQDIEITSSHNLESLLRSPPDKWLTNARITQYQVLLLDPPRVRFKQTAALNPATLLPETDDTLPIHHCLDTLDSLTSTRPDLTDQPLAQAEATLFTDGSSYIRDGKRYAGAAVVTLDSVIWAEPLPIGTSAQKAELIALTKALEWSKDKSVNIYTDSRYAFATLHVHGMIYRERGWLTAGGKAIKNAPEILALLTAVWLPKRVAVMHCKGHQKDDAPTSTGNRRADEVAREVAIRPLSTQATISAGKRTADGSEFEKRTADGSEFESPKKKAKVE

SEQ ID NO: 1395 - protein, 2098 aa, synthetic construct
MPAAKRVKLDGGDKKYSIGLDIGTNSVGWAVITDEYKVPSKKFKVLGNTDRHSIKKNLIGALLFDSGETAEATRLKRTARRRYTRRKNRICYLQEIFSNEMAKVDDSFFHRLEESFLVEEDKKHERHPIFGNIVDEVAYHEKYPTIYHLRKKLVDSTDKADLRLIYLALAHMIKFRGHFLIEGDLNPDNSDVDKLFIQLVQTYNQLFEENPINASGVDAKAILSARLSKSRRLENLIAQLPGEKKNGLFGNLIALSLGLTPNFKSNFDLAEDAKLQLSKDTYDDDLDNLLAQIGDQYADLFLAAKNLSDAILLSDILRVNTEITKAPLSASMIKRYDEHHQDLTLLKALVRQQLPEKYKEIFFDQSKNGYAGYIDGGASQEEFYKFIKPILEKMDGTEELLVKLNREDLLRKQRTFDNGSIPHQIHLGELHAILRRQEDFYPFLKDNREKIEKILTFRIPYYVGPLARGNSRFAWMTRKSEETITPWNFEEVVDKGASAQSFIERMTNFDKNLPNEKVLPKHSLLYEYFTVYNELTKVKYVTEGMRKPAFLSGEQKKAIVDLLFKTNRKVTVKQLKEDYFKKIECFDSVEISGVEDRFNASLGTYHDLLKIIKDKDFLDNEENEDILEDIVLTLTLFEDREMIEERLKTYAHLFDDKVMKQLKRRRYTGWGRLSRKLINGIRDKQSGKTILDFLKSDGFANRNFMQLIHDDSLTFKEDIQKAQVSGQGDSLHEHIANLAGSPAIKKGILQTVKVVDELVKVMGRHKPENIVIEMARENQTTQKGQKNSRERMKRIEEGIKELGSQILKEHPVENTQLQNEKLYLYYLQNGRDMYVDQELDINRLSDYDVDHIVPQSFLKDDSIDNKVLTRSDKARGKSDNVPSEEVVKKMKNYWRQLLNAKLITQRKFDNLTKAERGGLSELDKAGFIKRQLVETRQITKHVAQILDSRMNTKYDENDKLIREVKVITLKSKLVSDFRKDFQFYKVREINNYHHAHDAYLNAVVGTALIKKYPKLESEFVYGDYKVYDVRKMIAKSEQEIGKATAKYFFYSNIMNFFKTEITLANGEIRKRPLIETNGETGEIVWDKGRDFATVRKVLSMPQVNIVKKTEVQTGGFSKESILPKRNSDKLIARKKDWDPKKYGGFDSPTVAYSVLVVAKVEKGKSKKLKSVKELLGITIMERSSFEKNPIDFLEAKGYKEVKKDLIIKLPKYSLFELENGRKRMLASAGELQKGNELALPSKYVNFLYLASHYEKLKGSPEDNEQKQLFVEQHKHYLDEIIEQISEFSKRVILADANLDKVLSAYNKHRDKPIREQAENIIHLFTLTNLGAPAAFKYFDTTIDRKRYTSTKEVLDATLIHQSITGLYETRIDLSQLGGDGGGGGEAAAKGSSGGTAPLEEEYRLFLEAPIQNVTLLEQWKREIPKVWAEINPPGLASTQAPIHVQLLSTALPVRVRQYPITLEAKRSLRETIRKFRAAGILRPVHSPWNTPLLPVRKSGTSEYRMVQDLREVNKRVETIHPTVPNPYTLLSLLPPDRIWYSVLDLKDAFFCIPLAPESQLIFAFEWADAEEGESGQLTWTRLPQGFKNSPTLFNEALNRDLQGFRLDHPSVSLLQYVDDLLIAADTQAACLSATRDLLMTLAELGYRVSGKKAQLCQEEVTYLGFKIHKGSRSLSNSRTQAILQIPVPKTKRQVREFLGKIGYCRLFIPGFAELAQPLYAATRPGNDPLVWGEKEEEAFQSLKLALTQPPALALPSLDKPFQLFVEETSGAAKGVLTQALGPWKRPVAYLSKRLDPVAAGWPRCLRAIAAAALLTREASKLTFGQDIEITSSHNLESLLRSPPDKWLTNARITQYQVLLLDPPRVRFKQTAALNPATLLPETDDTLPIHHCLDTLDSLTSTRPDLTDQPLAQAEATLFTDGSSYIRDGKRYAGAAVVTLDSVIWAEPLPIGTSAQKAELIALTKALEWSKDKSVNIYTDSRYAFATLHVHGMIYRERGWLTAGGKAIKNAPEILALLTAVWLPKRVAVMHCKGHQKDDAPTSTGNRRADEVAREVAIRPLSTQATISAGKRTADGSEFEKRTADGSEFESPKKKAKVE

SEQ ID NO: 1396 - protein, 2093 aa, synthetic construct
MPAAKRVKLDGGDKKYSIGLDIGTNSVGWAVITDEYKVPSKKFKVLGNTDRHSIKKNLIGALLFDSGETAEATRLKRTARRRYTRRKNRICYLQEIFSNEMAKVDDSFFHRLEESFLVEEDKKHERHPIFGNIVDEVAYHEKYPTIYHLRKKLVDSTDKADLRLIYLALAHMIKFRGHFLIEGDLNPDNSDVDKLFIQLVQTYNQLFEENPINASGVDAKAILSARLSKSRRLENLIAQLPGEKKNGLFGNLIALSLGLTPNFKSNFDLAEDAKLQLSKDTYDDDLDNLLAQIGDQYADLFLAAKNLSDAILLSDILRVNTEITKAPLSASMIKRYDEHHQDLTLLKALVRQQLPEKYKEIFFDQSKNGYAGYIDGGASQEEFYKFIKPILEKMDGTEELLVKLNREDLLRKQRTFDNGSIPHQIHLGELHAILRRQEDFYPFLKDNREKIEKILTFRIPYYVGPLARGNSRFAWMTRKSEETITPWNFEEVVDKGASAQSFIERMTNFDKNLPNEKVLPKHSLLYEYFTVYNELTKVKYVTEGMRKPAFLSGEQKKAIVDLLFKTNRKVTVKQLKEDYFKKIECFDSVEISGVEDRFNASLGTYHDLLKIIKDKDFLDNEENEDILEDIVLTLTLFEDREMIEERLKTYAHLFDDKVMKQLKRRRYTGWGRLSRKLINGIRDKQSGKTILDFLKSDGFANRNFMQLIHDDSLTFKEDIQKAQVSGQGDSLHEHIANLAGSPAIKKGILQTVKVVDELVKVMGRHKPENIVIEMARENQTTQKGQKNSRERMKRIEEGIKELGSQILKEHPVENTQLQNEKLYLYYLQNGRDMYVDQELDINRLSDYDVDHIVPQSFLKDDSIDNKVLTRSDKARGKSDNVPSEEVVKKMKNYWRQLLNAKLITQRKFDNLTKAERGGLSELDKAGFIKRQLVETRQITKHVAQILDSRMNTKYDENDKLIREVKVITLKSKLVSDFRKDFQFYKVREINNYHHAHDAYLNAVVGTALIKKYPKLESEFVYGDYKVYDVRKMIAKSEQEIGKATAKYFFYSNIMNFFKTEITLANGEIRKRPLIETNGETGEIVWDKGRDFATVRKVLSMPQVNIVKKTEVQTGGFSKESILPKRNSDKLIARKKDWDPKKYGGFDSPTVAYSVLVVAKVEKGKSKKLKSVKELLGITIMERSSFEKNPIDFLEAKGYKEVKKDLIIKLPKYSLFELENGRKRMLASAGELQKGNELALPSKYVNFLYLASHYEKLKGSPEDNEQKQLFVEQHKHYLDEIIEQISEFSKRVILADANLDKVLSAYNKHRDKPIREQAENIIHLFTLTNLGAPAAFKYFDTTIDRKRYTSTKEVLDATLIHQSITGLYETRIDLSQLGGDGGGGGGGGGGTAPLEEEYRLFLEAPIQNVTLLEQWKREIPKVWAEINPPGLASTQAPIHVQLLSTALPVRVRQYPITLEAKRSLRETIRKFRAAGILRPVHSPWNTPLLPVRKSGTSEYRMVQDLREVNKRVETIHPTVPNPYTLLSLLPPDRIWYSVLDLKDAFFCIPLAPESQLIFAFEWADAEEGESGQLTWTRLPQGFKNSPTLFNEALNRDLQGFRLDHPSVSLLQYVDDLLIAADTQAACLSATRDLLMTLAELGYRVSGKKAQLCQEEVTYLGFKIHKGSRSLSNSRTQAILQIPVPKTKRQVREFLGKIGYCRLFIPGFAELAQPLYAATRPGNDPLVWGEKEEEAFQSLKLALTQPPALALPSLDKPFQLFVEETSGAAKGVLTQALGPWKRPVAYLSKRLDPVAAGWPRCLRAIAAAALLTREASKLTFGQDIEITSSHNLESLLRSPPDKWLTNARITQYQVLLLDPPRVRFKQTAALNPATLLPETDDTLPIHHCLDTLDSLTSTRPDLTDQPLAQAEATLFTDGSSYIRDGKRYAGAAVVTLDSVIWAEPLPIGTSAQKAELIALTKALEWSKDKSVNIYTDSRYAFATLHVHGMIYRERGWLTAGGKAIKNAPEILALLTAVWLPKRVAVMHCKGHQKDDAPTSTGNRRADEVAREVAIRPLSTQATISAGKRTADGSEFEKRTADGSEFESPKKKAKVE

SEQ ID NO: 1397 - protein, 2093 aa, synthetic construct
MPAAKRVKLDGGDKKYSIGLDIGTNSVGWAVITDEYKVPSKKFKVLGNTDRHSIKKNLIGALLFDSGETAEATRLKRTARRRYTRRKNRICYLQEIFSNEMAKVDDSFFHRLEESFLVEEDKKHERHPIFGNIVDEVAYHEKYPTIYHLRKKLVDSTDKADLRLIYLALAHMIKFRGHFLIEGDLNPDNSDVDKLFIQLVQTYNQLFEENPINASGVDAKAILSARLSKSRRLENLIAQLPGEKKNGLFGNLIALSLGLTPNFKSNFDLAEDAKLQLSKDTYDDDLDNLLAQIGDQYADLFLAAKNLSDAILLSDILRVNTEITKAPLSASMIKRYDEHHQDLTLLKALVRQQLPEKYKEIFFDQSKNGYAGYIDGGASQEEFYKFIKPILEKMDGTEELLVKLNREDLLRKQRTFDNGSIPHQIHLGELHAILRRQEDFYPFLKDNREKIEKILTFRIPYYVGPLARGNSRFAWMTRKSEETITPWNFEEVVDKGASAQSFIERMTNFDKNLPNEKVLPKHSLLYEYFTVYNELTKVKYVTEGMRKPAFLSGEQKKAIVDLLFKTNRKVTVKQLKEDYFKKIECFDSVEISGVEDRFNASLGTYHDLLKIIKDKDFLDNEENEDILEDIVLTLTLFEDREMIEERLKTYAHLFDDKVMKQLKRRRYTGWGRLSRKLINGIRDKQSGKTILDFLKSDGFANRNFMQLIHDDSLTFKEDIQKAQVSGQGDSLHEHIANLAGSPAIKKGILQTVKVVDELVKVMGRHKPENIVIEMARENQTTQKGQKNSRERMKRIEEGIKELGSQILKEHPVENTQLQNEKLYLYYLQNGRDMYVDQELDINRLSDYDVDHIVPQSFLKDDSIDNKVLTRSDKARGKSDNVPSEEVVKKMKNYWRQLLNAKLITQRKFDNLTKAERGGLSELDKAGFIKRQLVETRQITKHVAQILDSRMNTKYDENDKLIREVKVITLKSKLVSDFRKDFQFYKVREINNYHHAHDAYLNAVVGTALIKKYPKLESEFVYGDYKVYDVRKMIAKSEQEIGKATAKYFFYSNIMNFFKTEITLANGEIRKRPLIETNGETGEIVWDKGRDFATVRKVLSMPQVNIVKKTEVQTGGFSKESILPKRNSDKLIARKKDWDPKKYGGFDSPTVAYSVLVVAKVEKGKSKKLKSVKELLGITIMERSSFEKNPIDFLEAKGYKEVKKDLIIKLPKYSLFELENGRKRMLASAGELQKGNELALPSKYVNFLYLASHYEKLKGSPEDNEQKQLFVEQHKHYLDEIIEQISEFSKRVILADANLDKVLSAYNKHRDKPIREQAENIIHLFTLTNLGAPAAFKYFDTTIDRKRYTSTKEVLDATLIHQSITGLYETRIDLSQLGGDGGGGGPAPGGTAPLEEEYRLFLEAPIQNVTLLEQWKREIPKVWAEINPPGLASTQAPIHVQLLSTALPVRVRQYPITLEAKRSLRETIRKFRAAGILRPVHSPWNTPLLPVRKSGTSEYRMVQDLREVNKRVETIHPTVPNPYTLLSLLPPDRIWYSVLDLKDAFFCIPLAPESQLIFAFEWADAEEGESGQLTWTRLPQGFKNSPTLFNEALNRDLQGFRLDHPSVSLLQYVDDLLIAADTQAACLSATRDLLMTLAELGYRVSGKKAQLCQEEVTYLGFKIHKGSRSLSNSRTQAILQIPVPKTKRQVREFLGKIGYCRLFIPGFAELAQPLYAATRPGNDPLVWGEKEEEAFQSLKLALTQPPALALPSLDKPFQLFVEETSGAAKGVLTQALGPWKRPVAYLSKRLDPVAAGWPRCLRAIAAAALLTREASKLTFGQDIEITSSHNLESLLRSPPDKWLTNARITQYQVLLLDPPRVRFKQTAALNPATLLPETDDTLPIHHCLDTLDSLTSTRPDLTDQPLAQAEATLFTDGSSYIRDGKRYAGAAVVTLDSVIWAEPLPIGTSAQKAELIALTKALEWSKDKSVNIYTDSRYAFATLHVHGMIYRERGWLTAGGKAIKNAPEILALLTAVWLPKRVAVMHCKGHQKDDAPTSTGNRRADEVAREVAIRPLSTQATISAGKRTADGSEFEKRTADGSEFESPKKKAKVE

SEQ ID NO: 1398 - protein, 2099 aa, synthetic construct
MPAAKRVKLDGGDKKYSIGLDIGTNSVGWAVITDEYKVPSKKFKVLGNTDRHSIKKNLIGALLFDSGETAEATRLKRTARRRYTRRKNRICYLQEIFSNEMAKVDDSFFHRLEESFLVEEDKKHERHPIFGNIVDEVAYHEKYPTIYHLRKKLVDSTDKADLRLIYLALAHMIKFRGHFLIEGDLNPDNSDVDKLFIQLVQTYNQLFEENPINASGVDAKAILSARLSKSRRLENLIAQLPGEKKNGLFGNLIALSLGLTPNFKSNFDLAEDAKLQLSKDTYDDDLDNLLAQIGDQYADLFLAAKNLSDAILLSDILRVNTEITKAPLSASMIKRYDEHHQDLTLLKALVRQQLPEKYKEIFFDQSKNGYAGYIDGGASQEEFYKFIKPILEKMDGTEELLVKLNREDLLRKQRTFDNGSIPHQIHLGELHAILRRQEDFYPFLKDNREKIEKILTFRIPYYVGPLARGNSRFAWMTRKSEETITPWNFEEVVDKGASAQSFIERMTNFDKNLPNEKVLPKHSLLYEYFTVYNELTKVKYVTEGMRKPAFLSGEQKKAIVDLLFKTNRKVTVKQLKEDYFKKIECFDSVEISGVEDRFNASLGTYHDLLKIIKDKDFLDNEENEDILEDIVLTLTLFEDREMIEERLKTYAHLFDDKVMKQLKRRRYTGWGRLSRKLINGIRDKQSGKTILDFLKSDGFANRNFMQLIHDDSLTFKEDIQKAQVSGQGDSLHEHIANLAGSPAIKKGILQTVKVVDELVKVMGRHKPENIVIEMARENQTTQKGQKNSRERMKRIEEGIKELGSQILKEHPVENTQLQNEKLYLYYLQNGRDMYVDQELDINRLSDYDVDHIVPQSFLKDDSIDNKVLTRSDKARGKSDNVPSEEVVKKMKNYWRQLLNAKLITQRKFDNLTKAERGGLSELDKAGFIKRQLVETRQITKHVAQILDSRMNTKYDENDKLIREVKVITLKSKLVSDFRKDFQFYKVREINNYHHAHDAYLNAVVGTALIKKYPKLESEFVYGDYKVYDVRKMIAKSEQEIGKATAKYFFYSNIMNFFKTEITLANGEIRKRPLIETNGETGEIVWDKGRDFATVRKVLSMPQVNIVKKTEVQTGGFSKESILPKRNSDKLIARKKDWDPKKYGGFDSPTVAYSVLVVAKVEKGKSKKLKSVKELLGITIMERSSFEKNPIDFLEAKGYKEVKKDLIIKLPKYSLFELENGRKRMLASAGELQKGNELALPSKYVNFLYLASHYEKLKGSPEDNEQKQLFVEQHKHYLDEIIEQISEFSKRVILADANLDKVLSAYNKHRDKPIREQAENIIHLFTLTNLGAPAAFKYFDTTIDRKRYTSTKEVLDATLIHQSITGLYETRIDLSQLGGDGGGGSGGSGGSGGSGGTAPLEEEYRLFLEAPIQNVTLLEQWKREIPKVWAEINPPGLASTQAPIHVQLLSTALPVRVRQYPITLEAKRSLRETIRKFRAAGILRPVHSPWNTPLLPVRKSGTSEYRMVQDLREVNKRVETIHPTVPNPYTLLSLLPPDRIWYSVLDLKDAFFCIPLAPESQLIFAFEWADAEEGESGQLTWTRLPQGFKNSPTLFNEALNRDLQGFRLDHPSVSLLQYVDDLLIAADTQAACLSATRDLLMTLAELGYRVSGKKAQLCQEEVTYLGFKIHKGSRSLSNSRTQAILQIPVPKTKRQVREFLGKIGYCRLFIPGFAELAQPLYAATRPGNDPLVWGEKEEEAFQSLKLALTQPPALALPSLDKPFQLFVEETSGAAKGVLTQALGPWKRPVAYLSKRLDPVAAGWPRCLRAIAAAALLTREASKLTFGQDIEITSSHNLESLLRSPPDKWLTNARITQYQVLLLDPPRVRFKQTAALNPATLLPETDDTLPIHHCLDTLDSLTSTRPDLTDQPLAQAEATLFTDGSSYIRDGKRYAGAAVVTLDSVIWAEPLPIGTSAQKAELIALTKALEWSKDKSVNIYTDSRYAFATLHVHGMIYRERGWLTAGGKAIKNAPEILALLTAVWLPKRVAVMHCKGHQKDDAPTSTGNRRADEVAREVAIRPLSTQATISAGKRTADGSEFEKRTADGSEFESPKKKAKVE

SEQ ID NO: 1399 - protein, 2102 aa, synthetic construct
MPAAKRVKLDGGDKKYSIGLDIGTNSVGWAVITDEYKVPSKKFKVLGNTDRHSIKKNLIGALLFDSGETAEATRLKRTARRRYTRRKNRICYLQEIFSNEMAKVDDSFFHRLEESFLVEEDKKHERHPIFGNIVDEVAYHEKYPTIYHLRKKLVDSTDKADLRLIYLALAHMIKFRGHFLIEGDLNPDNSDVDKLFIQLVQTYNQLFEENPINASGVDAKAILSARLSKSRRLENLIAQLPGEKKNGLFGNLIALSLGLTPNFKSNFDLAEDAKLQLSKDTYDDDLDNLLAQIGDQYADLFLAAKNLSDAILLSDILRVNTEITKAPLSASMIKRYDEHHQDLTLLKALVRQQLPEKYKEIFFDQSKNGYAGYIDGGASQEEFYKFIKPILEKMDGTEELLVKLNREDLLRKQRTFDNGSIPHQIHLGELHAILRRQEDFYPFLKDNREKIEKILTFRIPYYVGPLARGNSRFAWMTRKSEETITPWNFEEVVDKGASAQSFIERMTNFDKNLPNEKVLPKHSLLYEYFTVYNELTKVKYVTEGMRKPAFLSGEQKKAIVDLLFKTNRKVTVKQLKEDYFKKIECFDSVEISGVEDRFNASLGTYHDLLKIIKDKDFLDNEENEDILEDIVLTLTLFEDREMIEERLKTYAHLFDDKVMKQLKRRRYTGWGRLSRKLINGIRDKQSGKTILDFLKSDGFANRNFMQLIHDDSLTFKEDIQKAQVSGQGDSLHEHIANLAGSPAIKKGILQTVKVVDELVKVMGRHKPENIVIEMARENQTTQKGQKNSRERMKRIEEGIKELGSQILKEHPVENTQLQNEKLYLYYLQNGRDMYVDQELDINRLSDYDVDHIVPQSFLKDDSIDNKVLTRSDKARGKSDNVPSEEVVKKMKNYWRQLLNAKLITQRKFDNLTKAERGGLSELDKAGFIKRQLVETRQITKHVAQILDSRMNTKYDENDKLIREVKVITLKSKLVSDFRKDFQFYKVREINNYHHAHDAYLNAVVGTALIKKYPKLESEFVYGDYKVYDVRKMIAKSEQEIGKATAKYFFYSNIMNFFKTEITLANGEIRKRPLIETNGETGEIVWDKGRDFATVRKVLSMPQVNIVKKTEVQTGGFSKESILPKRNSDKLIARKKDWDPKKYGGFDSPTVAYSVLVVAKVEKGKSKKLKSVKELLGITIMERSSFEKNPIDFLEAKGYKEVKKDLIIKLPKYSLFELENGRKRMLASAGELQKGNELALPSKYVNFLYLASHYEKLKGSPEDNEQKQLFVEQHKHYLDEIIEQISEFSKRVILADANLDKVLSAYNKHRDKPIREQAENIIHLFTLTNLGAPAAFKYFDTTIDRKRYTSTKEVLDATLIHQSITGLYETRIDLSQLGGDGGEAAAKGGGGSEAAAKGGTAPLEEEYRLFLEAPIQNVTLLEQWKREIPKVWAEINPPGLASTQAPIHVQLLSTALPVRVRQYPITLEAKRSLRETIRKFRAAGILRPVHSPWNTPLLPVRKSGTSEYRMVQDLREVNKRVETIHPTVPNPYTLLSLLPPDRIWYSVLDLKDAFFCIPLAPESQLIFAFEWADAEEGESGQLTWTRLPQGFKNSPTLFNEALNRDLQGFRLDHPSVSLLQYVDDLLIAADTQAACLSATRDLLMTLAELGYRVSGKKAQLCQEEVTYLGFKIHKGSRSLSNSRTQAILQIPVPKTKRQVREFLGKIGYCRLFIPGFAELAQPLYAATRPGNDPLVWGEKEEEAFQSLKLALTQPPALALPSLDKPFQLFVEETSGAAKGVLTQALGPWKRPVAYLSKRLDPVAAGWPRCLRAIAAAALLTREASKLTFGQDIEITSSHNLESLLRSPPDKWLTNARITQYQVLLLDPPRVRFKQTAALNPATLLPETDDTLPIHHCLDTLDSLTSTRPDLTDQPLAQAEATLFTDGSSYIRDGKRYAGAAVVTLDSVIWAEPLPIGTSAQKAELIALTKALEWSKDKSVNIYTDSRYAFATLHVHGMIYRERGWLTAGGKAIKNAPEILALLTAVWLPKRVAVMHCKGHQKDDAPTSTGNRRADEVAREVAIRPLSTQATISAGKRTADGSEFEKRTADGSEFESPKKKAKVE

SEQ ID NO: 1400 - protein, 2112 aa, synthetic construct
MPAAKRVKLDGGDKKYSIGLDIGTNSVGWAVITDEYKVPSKKFKVLGNTDRHSIKKNLIGALLFDSGETAEATRLKRTARRRYTRRKNRICYLQEIFSNEMAKVDDSFFHRLEESFLVEEDKKHERHPIFGNIVDEVAYHEKYPTIYHLRKKLVDSTDKADLRLIYLALAHMIKFRGHFLIEGDLNPDNSDVDKLFIQLVQTYNQLFEENPINASGVDAKAILSARLSKSRRLENLIAQLPGEKKNGLFGNLIALSLGLTPNFKSNFDLAEDAKLQLSKDTYDDDLDNLLAQIGDQYADLFLAAKNLSDAILLSDILRVNTEITKAPLSASMIKRYDEHHQDLTLLKALVRQQLPEKYKEIFFDQSKNGYAGYIDGGASQEEFYKFIKPILEKMDGTEELLVKLNREDLLRKQRTFDNGSIPHQIHLGELHAILRRQEDFYPFLKDNREKIEKILTFRIPYYVGPLARGNSRFAWMTRKSEETITPWNFEEVVDKGASAQSFIERMTNFDKNLPNEKVLPKHSLLYEYFTVYNELTKVKYVTEGMRKPAFLSGEQKKAIVDLLFKTNRKVTVKQLKEDYFKKIECFDSVEISGVEDRFNASLGTYHDLLKIIKDKDFLDNEENEDILEDIVLTLTLFEDREMIEERLKTYAHLFDDKVMKQLKRRRYTGWGRLSRKLINGIRDKQSGKTILDFLKSDGFANRNFMQLIHDDSLTFKEDIQKAQVSGQGDSLHEHIANLAGSPAIKKGILQTVKVVDELVKVMGRHKPENIVIEMARENQTTQKGQKNSRERMKRIEEGIKELGSQILKEHPVENTQLQNEKLYLYYLQNGRDMYVDQELDINRLSDYDVDHIVPQSFLKDDSIDNKVLTRSDKARGKSDNVPSEEVVKKMKNYWRQLLNAKLITQRKFDNLTKAERGGLSELDKAGFIKRQLVETRQITKHVAQILDSRMNTKYDENDKLIREVKVITLKSKLVSDFRKDFQFYKVREINNYHHAHDAYLNAVVGTALIKKYPKLESEFVYGDYKVYDVRKMIAKSEQEIGKATAKYFFYSNIMNFFKTEITLANGEIRKRPLIETNGETGEIVWDKGRDFATVRKVLSMPQVNIVKKTEVQTGGFSKESILPKRNSDKLIARKKDWDPKKYGGFDSPTVAYSVLVVAKVEKGKSKKLKSVKELLGITIMERSSFEKNPIDFLEAKGYKEVKKDLIIKLPKYSLFELENGRKRMLASAGELQKGNELALPSKYVNFLYLASHYEKLKGSPEDNEQKQLFVEQHKHYLDEIIEQISEFSKRVILADANLDKVLSAYNKHRDKPIREQAENIIHLFTLTNLGAPAAFKYFDTTIDRKRYTSTKEVLDATLIHQSITGLYETRIDLSQLGGDGGEAAAKEAAAKEAAAKEAAAKEAAAKGGTAPLEEEYRLFLEAPIQNVTLLEQWKREIPKVWAEINPPGLASTQAPIHVQLLSTALPVRVRQYPITLEAKRSLRETIRKFRAAGILRPVHSPWNTPLLPVRKSGTSEYRMVQDLREVNKRVETIHPTVPNPYTLLSLLPPDRIWYSVLDLKDAFFCIPLAPESQLIFAFEWADAEEGESGQLTWTRLPQGFKNSPTLFNEALNRDLQGFRLDHPSVSLLQYVDDLLIAADTQAACLSATRDLLMTLAELGYRVSGKKAQLCQEEVTYLGFKIHKGSRSLSNSRTQAILQIPVPKTKRQVREFLGKIGYCRLFIPGFAELAQPLYAATRPGNDPLVWGEKEEEAFQSLKLALTQPPALALPSLDKPFQLFVEETSGAAKGVLTQALGPWKRPVAYLSKRLDPVAAGWPRCLRAIAAAALLTREASKLTFGQDIEITSSHNLESLLRSPPDKWLTNARITQYQVLLLDPPRVRFKQTAALNPATLLPETDDTLPIHHCLDTLDSLTSTRPDLTDQPLAQAEATLFTDGSSYIRDGKRYAGAAVVTLDSVIWAEPLPIGTSAQKAELIALTKALEWSKDKSVNIYTDSRYAFATLHVHGMIYRERGWLTAGGKAIKNAPEILALLTAVWLPKRVAVMHCKGHQKDDAPTSTGNRRADEVAREVAIRPLSTQATISAGKRTADGSEFEKRTADGSEFESPKKKAKVE

SEQ ID NO: 1401 - protein, 2096 aa, synthetic construct
MPAAKRVKLDGGDKKYSIGLDIGTNSVGWAVITDEYKVPSKKFKVLGNTDRHSIKKNLIGALLFDSGETAEATRLKRTARRRYTRRKNRICYLQEIFSNEMAKVDDSFFHRLEESFLVEEDKKHERHPIFGNIVDEVAYHEKYPTIYHLRKKLVDSTDKADLRLIYLALAHMIKFRGHFLIEGDLNPDNSDVDKLFIQLVQTYNQLFEENPINASGVDAKAILSARLSKSRRLENLIAQLPGEKKNGLFGNLIALSLGLTPNFKSNFDLAEDAKLQLSKDTYDDDLDNLLAQIGDQYADLFLAAKNLSDAILLSDILRVNTEITKAPLSASMIKRYDEHHQDLTLLKALVRQQLPEKYKEIFFDQSKNGYAGYIDGGASQEEFYKFIKPILEKMDGTEELLVKLNREDLLRKQRTFDNGSIPHQIHLGELHAILRRQEDFYPFLKDNREKIEKILTFRIPYYVGPLARGNSRFAWMTRKSEETITPWNFEEVVDKGASAQSFIERMTNFDKNLPNEKVLPKHSLLYEYFTVYNELTKVKYVTEGMRKPAFLSGEQKKAIVDLLFKTNRKVTVKQLKEDYFKKIECFDSVEISGVEDRFNASLGTYHDLLKIIKDKDFLDNEENEDILEDIVLTLTLFEDREMIEERLKTYAHLFDDKVMKQLKRRRYTGWGRLSRKLINGIRDKQSGKTILDFLKSDGFANRNFMQLIHDDSLTFKEDIQKAQVSGQGDSLHEHIANLAGSPAIKKGILQTVKVVDELVKVMGRHKPENIVIEMARENQTTQKGQKNSRERMKRIEEGIKELGSQILKEHPVENTQLQNEKLYLYYLQNGRDMYVDQELDINRLSDYDVDHIVPQSFLKDDSIDNKVLTRSDKARGKSDNVPSEEVVKKMKNYWRQLLNAKLITQRKFDNLTKAERGGLSELDKAGFIKRQLVETRQITKHVAQILDSRMNTKYDENDKLIREVKVITLKSKLVSDFRKDFQFYKVREINNYHHAHDAYLNAVVGTALIKKYPKLESEFVYGDYKVYDVRKMIAKSEQEIGKATAKYFFYSNIMNFFKTEITLANGEIRKRPLIETNGETGEIVWDKGRDFATVRKVLSMPQVNIVKKTEVQTGGFSKESILPKRNSDKLIARKKDWDPKKYGGFDSPTVAYSVLVVAKVEKGKSKKLKSVKELLGITIMERSSFEKNPIDFLEAKGYKEVKKDLIIKLPKYSLFELENGRKRMLASAGELQKGNELALPSKYVNFLYLASHYEKLKGSPEDNEQKQLFVEQHKHYLDEIIEQISEFSKRVILADANLDKVLSAYNKHRDKPIREQAENIIHLFTLTNLGAPAAFKYFDTTIDRKRYTSTKEVLDATLIHQSITGLYETRIDLSQLGGDGGPAPGSSGGSGGTAPLEEEYRLFLEAPIQNVTLLEQWKREIPKVWAEINPPGLASTQAPIHVQLLSTALPVRVRQYPITLEAKRSLRETIRKFRAAGILRPVHSPWNTPLLPVRKSGTSEYRMVQDLREVNKRVETIHPTVPNPYTLLSLLPPDRIWYSVLDLKDAFFCIPLAPESQLIFAFEWADAEEGESGQLTWTRLPQGFKNSPTLFNEALNRDLQGFRLDHPSVSLLQYVDDLLIAADTQAACLSATRDLLMTLAELGYRVSGKKAQLCQEEVTYLGFKIHKGSRSLSNSRTQAILQIPVPKTKRQVREFLGKIGYCRLFIPGFAELAQPLYAATRPGNDPLVWGEKEEEAFQSLKLALTQPPALALPSLDKPFQLFVEETSGAAKGVLTQALGPWKRPVAYLSKRLDPVAAGWPRCLRAIAAAALLTREASKLTFGQDIEITSSHNLESLLRSPPDKWLTNARITQYQVLLLDPPRVRFKQTAALNPATLLPETDDTLPIHHCLDTLDSLTSTRPDLTDQPLAQAEATLFTDGSSYIRDGKRYAGAAVVTLDSVIWAEPLPIGTSAQKAELIALTKALEWSKDKSVNIYTDSRYAFATLHVHGMIYRERGWLTAGGKAIKNAPEILALLTAVWLPKRVAVMHCKGHQKDDAPTSTGNRRADEVAREVAIRPLSTQATISAGKRTADGSEFEKRTADGSEFESPKKKAKVE

SEQ ID NO: 1402 - protein, 2096 aa, synthetic construct
MPAAKRVKLDGGDKKYSIGLDIGTNSVGWAVITDEYKVPSKKFKVLGNTDRHSIKKNLIGALLFDSGETAEATRLKRTARRRYTRRKNRICYLQEIFSNEMAKVDDSFFHRLEESFLVEEDKKHERHPIFGNIVDEVAYHEKYPTIYHLRKKLVDSTDKADLRLIYLALAHMIKFRGHFLIEGDLNPDNSDVDKLFIQLVQTYNQLFEENPINASGVDAKAILSARLSKSRRLENLIAQLPGEKKNGLFGNLIALSLGLTPNFKSNFDLAEDAKLQLSKDTYDDDLDNLLAQIGDQYADLFLAAKNLSDAILLSDILRVNTEITKAPLSASMIKRYDEHHQDLTLLKALVRQQLPEKYKEIFFDQSKNGYAGYIDGGASQEEFYKFIKPILEKMDGTEELLVKLNREDLLRKQRTFDNGSIPHQIHLGELHAILRRQEDFYPFLKDNREKIEKILTFRIPYYVGPLARGNSRFAWMTRKSEETITPWNFEEVVDKGASAQSFIERMTNFDKNLPNEKVLPKHSLLYEYFTVYNELTKVKYVTEGMRKPAFLSGEQKKAIVDLLFKTNRKVTVKQLKEDYFKKIECFDSVEISGVEDRFNASLGTYHDLLKIIKDKDFLDNEENEDILEDIVLTLTLFEDREMIEERLKTYAHLFDDKVMKQLKRRRYTGWGRLSRKLINGIRDKQSGKTILDFLKSDGFANRNFMQLIHDDSLTFKEDIQKAQVSGQGDSLHEHIANLAGSPAIKKGILQTVKVVDELVKVMGRHKPENIVIEMARENQTTQKGQKNSRERMKRIEEGIKELGSQILKEHPVENTQLQNEKLYLYYLQNGRDMYVDQELDINRLSDYDVDHIVPQSFLKDDSIDNKVLTRSDKARGKSDNVPSEEVVKKMKNYWRQLLNAKLITQRKFDNLTKAERGGLSELDKAGFIKRQLVETRQITKHVAQILDSRMNTKYDENDKLIREVKVITLKSKLVSDFRKDFQFYKVREINNYHHAHDAYLNAVVGTALIKKYPKLESEFVYGDYKVYDVRKMIAKSEQEIGKATAKYFFYSNIMNFFKTEITLANGEIRKRPLIETNGETGEIVWDKGRDFATVRKVLSMPQVNIVKKTEVQTGGFSKESILPKRNSDKLIARKKDWDPKKYGGFDSPTVAYSVLVVAKVEKGKSKKLKSVKELLGITIMERSSFEKNPIDFLEAKGYKEVKKDLIIKLPKYSLFELENGRKRMLASAGELQKGNELALPSKYVNFLYLASHYEKLKGSPEDNEQKQLFVEQHKHYLDEIIEQISEFSKRVILADANLDKVLSAYNKHRDKPIREQAENIIHLFTLTNLGAPAAFKYFDTTIDRKRYTSTKEVLDATLIHQSITGLYETRIDLSQLGGDGGGGGPAPGGSGGTAPLEEEYRLFLEAPIQNVTLLEQWKREIPKVWAEINPPGLASTQAPIHVQLLSTALPVRVRQYPITLEAKRSLRETIRKFRAAGILRPVHSPWNTPLLPVRKSGTSEYRMVQDLREVNKRVETIHPTVPNPYTLLSLLPPDRIWYSVLDLKDAFFCIPLAPESQLIFAFEWADAEEGESGQLTWTRLPQGFKNSPTLFNEALNRDLQGFRLDHPSVSLLQYVDDLLIAADTQAACLSATRDLLMTLAELGYRVSGKKAQLCQEEVTYLGFKIHKGSRSLSNSRTQAILQIPVPKTKRQVREFLGKIGYCRLFIPGFAELAQPLYAATRPGNDPLVWGEKEEEAFQSLKLALTQPPALALPSLDKPFQLFVEETSGAAKGVLTQALGPWKRPVAYLSKRLDPVAAGWPRCLRAIAAAALLTREASKLTFGQDIEITSSHNLESLLRSPPDKWLTNARITQYQVLLLDPPRVRFKQTAALNPATLLPETDDTLPIHHCLDTLDSLTSTRPDLTDQPLAQAEATLFTDGSSYIRDGKRYAGAAVVTLDSVIWAEPLPIGTSAQKAELIALTKALEWSKDKSVNIYTDSRYAFATLHVHGMIYRERGWLTAGGKAIKNAPEILALLTAVWLPKRVAVMHCKGHQKDDAPTSTGNRRADEVAREVAIRPLSTQATISAGKRTADGSEFEKRTADGSEFESPKKKAKVE

SEQ ID NO: 1403 - protein, 2096 aa, synthetic construct
MPAAKRVKLDGGDKKYSIGLDIGTNSVGWAVITDEYKVPSKKFKVLGNTDRHSIKKNLIGALLFDSGETAEATRLKRTARRRYTRRKNRICYLQEIFSNEMAKVDDSFFHRLEESFLVEEDKKHERHPIFGNIVDEVAYHEKYPTIYHLRKKLVDSTDKADLRLIYLALAHMIKFRGHFLIEGDLNPDNSDVDKLFIQLVQTYNQLFEENPINASGVDAKAILSARLSKSRRLENLIAQLPGEKKNGLFGNLIALSLGLTPNFKSNFDLAEDAKLQLSKDTYDDDLDNLLAQIGDQYADLFLAAKNLSDAILLSDILRVNTEITKAPLSASMIKRYDEHHQDLTLLKALVRQQLPEKYKEIFFDQSKNGYAGYIDGGASQEEFYKFIKPILEKMDGTEELLVKLNREDLLRKQRTFDNGSIPHQIHLGELHAILRRQEDFYPFLKDNREKIEKILTFRIPYYVGPLARGNSRFAWMTRKSEETITPWNFEEVVDKGASAQSFIERMTNFDKNLPNEKVLPKHSLLYEYFTVYNELTKVKYVTEGMRKPAFLSGEQKKAIVDLLFKTNRKVTVKQLKEDYFKKIECFDSVEISGVEDRFNASLGTYHDLLKIIKDKDFLDNEENEDILEDIVLTLTLFEDREMIEERLKTYAHLFDDKVMKQLKRRRYTGWGRLSRKLINGIRDKQSGKTILDFLKSDGFANRNFMQLIHDDSLTFKEDIQKAQVSGQGDSLHEHIANLAGSPAIKKGILQTVKVVDELVKVMGRHKPENIVIEMARENQTTQKGQKNSRERMKRIEEGIKELGSQILKEHPVENTQLQNEKLYLYYLQNGRDMYVDQELDINRLSDYDVDHIVPQSFLKDDSIDNKVLTRSDKARGKSDNVPSEEVVKKMKNYWRQLLNAKLITQRKFDNLTKAERGGLSELDKAGFIKRQLVETRQITKHVAQILDSRMNTKYDENDKLIREVKVITLKSKLVSDFRKDFQFYKVREINNYHHAHDAYLNAVVGTALIKKYPKLESEFVYGDYKVYDVRKMIAKSEQEIGKATAKYFFYSNIMNFFKTEITLANGEIRKRPLIETNGETGEIVWDKGRDFATVRKVLSMPQVNIVKKTEVQTGGFSKESILPKRNSDKLIARKKDWDPKKYGGFDSPTVAYSVLVVAKVEKGKSKKLKSVKELLGITIMERSSFEKNPIDFLEAKGYKEVKKDLIIKLPKYSLFELENGRKRMLASAGELQKGNELALPSKYVNFLYLASHYEKLKGSPEDNEQKQLFVEQHKHYLDEIIEQISEFSKRVILADANLDKVLSAYNKHRDKPIREQAENIIHLFTLTNLGAPAAFKYFDTTIDRKRYTSTKEVLDATLIHQSITGLYETRIDLSQLGGDGGPAPGGSGGGGGTAPLEEEYRLFLEAPIQNVTLLEQWKREIPKVWAEINPPGLASTQAPIHVQLLSTALPVRVRQYPITLEAKRSLRETIRKFRAAGILRPVHSPWNTPLLPVRKSGTSEYRMVQDLREVNKRVETIHPTVPNPYTLLSLLPPDRIWYSVLDLKDAFFCIPLAPESQLIFAFEWADAEEGESGQLTWTRLPQGFKNSPTLFNEALNRDLQGFRLDHPSVSLLQYVDDLLIAADTQAACLSATRDLLMTLAELGYRVSGKKAQLCQEEVTYLGFKIHKGSRSLSNSRTQAILQIPVPKTKRQVREFLGKIGYCRLFIPGFAELAQPLYAATRPGNDPLVWGEKEEEAFQSLKLALTQPPALALPSLDKPFQLFVEETSGAAKGVLTQALGPWKRPVAYLSKRLDPVAAGWPRCLRAIAAAALLTREASKLTFGQDIEITSSHNLESLLRSPPDKWLTNARITQYQVLLLDPPRVRFKQTAALNPATLLPETDDTLPIHHCLDTLDSLTSTRPDLTDQPLAQAEATLFTDGSSYIRDGKRYAGAAVVTLDSVIWAEPLPIGTSAQKAELIALTKALEWSKDKSVNIYTDSRYAFATLHVHGMIYRERGWLTAGGKAIKNAPEILALLTAVWLPKRVAVMHCKGHQKDDAPTSTGNRRADEVAREVAIRPLSTQATISAGKRTADGSEFEKRTADGSEFESPKKKAKVE

SEQ ID NO: 1404 - protein, 2098 aa, synthetic construct
MPAAKRVKLDGGDKKYSIGLDIGTNSVGWAVITDEYKVPSKKFKVLGNTDRHSIKKNLIGALLFDSGETAEATRLKRTARRRYTRRKNRICYLQEIFSNEMAKVDDSFFHRLEESFLVEEDKKHERHPIFGNIVDEVAYHEKYPTIYHLRKKLVDSTDKADLRLIYLALAHMIKFRGHFLIEGDLNPDNSDVDKLFIQLVQTYNQLFEENPINASGVDAKAILSARLSKSRRLENLIAQLPGEKKNGLFGNLIALSLGLTPNFKSNFDLAEDAKLQLSKDTYDDDLDNLLAQIGDQYADLFLAAKNLSDAILLSDILRVNTEITKAPLSASMIKRYDEHHQDLTLLKALVRQQLPEKYKEIFFDQSKNGYAGYIDGGASQEEFYKFIKPILEKMDGTEELLVKLNREDLLRKQRTFDNGSIPHQIHLGELHAILRRQEDFYPFLKDNREKIEKILTFRIPYYVGPLARGNSRFAWMTRKSEETITPWNFEEVVDKGASAQSFIERMTNFDKNLPNEKVLPKHSLLYEYFTVYNELTKVKYVTEGMRKPAFLSGEQKKAIVDLLFKTNRKVTVKQLKEDYFKKIECFDSVEISGVEDRFNASLGTYHDLLKIIKDKDFLDNEENEDILEDIVLTLTLFEDREMIEERLKTYAHLFDDKVMKQLKRRRYTGWGRLSRKLINGIRDKQSGKTILDFLKSDGFANRNFMQLIHDDSLTFKEDIQKAQVSGQGDSLHEHIANLAGSPAIKKGILQTVKVVDELVKVMGRHKPENIVIEMARENQTTQKGQKNSRERMKRIEEGIKELGSQILKEHPVENTQLQNEKLYLYYLQNGRDMYVDQELDINRLSDYDVDHIVPQSFLKDDSIDNKVLTRSDKARGKSDNVPSEEVVKKMKNYWRQLLNAKLITQRKFDNLTKAERGGLSELDKAGFIKRQLVETRQITKHVAQILDSRMNTKYDENDKLIREVKVITLKSKLVSDFRKDFQFYKVREINNYHHAHDAYLNAVVGTALIKKYPKLESEFVYGDYKVYDVRKMIAKSEQEIGKATAKYFFYSNIMNFFKTEITLANGEIRKRPLIETNGETGEIVWDKGRDFATVRKVLSMPQVNIVKKTEVQTGGFSKESILPKRNSDKLIARKKDWDPKKYGGFDSPTVAYSVLVVAKVEKGKSKKLKSVKELLGITIMERSSFEKNPIDFLEAKGYKEVKKDLIIKLPKYSLFELENGRKRMLASAGELQKGNELALPSKYVNFLYLASHYEKLKGSPEDNEQKQLFVEQHKHYLDEIIEQISEFSKRVILADANLDKVLSAYNKHRDKPIREQAENIIHLFTLTNLGAPAAFKYFDTTIDRKRYTSTKEVLDATLIHQSITGLYETRIDLSQLGGDGGGGGGSSEAAAKGGTAPLEEEYRLFLEAPIQNVTLLEQWKREIPKVWAEINPPGLASTQAPIHVQLLSTALPVRVRQYPITLEAKRSLRETIRKFRAAGILRPVHSPWNTPLLPVRKSGTSEYRMVQDLREVNKRVETIHPTVPNPYTLLSLLPPDRIWYSVLDLKDAFFCIPLAPESQLIFAFEWADAEEGESGQLTWTRLPQGFKNSPTLFNEALNRDLQGFRLDHPSVSLLQYVDDLLIAADTQAACLSATRDLLMTLAELGYRVSGKKAQLCQEEVTYLGFKIHKGSRSLSNSRTQAILQIPVPKTKRQVREFLGKIGYCRLFIPGFAELAQPLYAATRPGNDPLVWGEKEEEAFQSLKLALTQPPALALPSLDKPFQLFVEETSGAAKGVLTQALGPWKRPVAYLSKRLDPVAAGWPRCLRAIAAAALLTREASKLTFGQDIEITSSHNLESLLRSPPDKWLTNARITQYQVLLLDPPRVRFKQTAALNPATLLPETDDTLPIHHCLDTLDSLTSTRPDLTDQPLAQAEATLFTDGSSYIRDGKRYAGAAVVTLDSVIWAEPLPIGTSAQKAELIALTKALEWSKDKSVNIYTDSRYAFATLHVHGMIYRERGWLTAGGKAIKNAPEILALLTAVWLPKRVAVMHCKGHQKDDAPTSTGNRRADEVAREVAIRPLSTQATISAGKRTADGSEFEKRTADGSEFESPKKKAKVE

SEQ ID NO: 1405 - protein, 2095 aa, synthetic construct
MPAAKRVKLDGGDKKYSIGLDIGTNSVGWAVITDEYKVPSKKFKVLGNTDRHSIKKNLIGALLFDSGETAEATRLKRTARRRYTRRKNRICYLQEIFSNEMAKVDDSFFHRLEESFLVEEDKKHERHPIFGNIVDEVAYHEKYPTIYHLRKKLVDSTDKADLRLIYLALAHMIKFRGHFLIEGDLNPDNSDVDKLFIQLVQTYNQLFEENPINASGVDAKAILSARLSKSRRLENLIAQLPGEKKNGLFGNLIALSLGLTPNFKSNFDLAEDAKLQLSKDTYDDDLDNLLAQIGDQYADLFLAAKNLSDAILLSDILRVNTEITKAPLSASMIKRYDEHHQDLTLLKALVRQQLPEKYKEIFFDQSKNGYAGYIDGGASQEEFYKFIKPILEKMDGTEELLVKLNREDLLRKQRTFDNGSIPHQIHLGELHAILRRQEDFYPFLKDNREKIEKILTFRIPYYVGPLARGNSRFAWMTRKSEETITPWNFEEVVDKGASAQSFIERMTNFDKNLPNEKVLPKHSLLYEYFTVYNELTKVKYVTEGMRKPAFLSGEQKKAIVDLLFKTNRKVTVKQLKEDYFKKIECFDSVEISGVEDRFNASLGTYHDLLKIIKDKDFLDNEENEDILEDIVLTLTLFEDREMIEERLKTYAHLFDDKVMKQLKRRRYTGWGRLSRKLINGIRDKQSGKTILDFLKSDGFANRNFMQLIHDDSLTFKEDIQKAQVSGQGDSLHEHIANLAGSPAIKKGILQTVKVVDELVKVMGRHKPENIVIEMARENQTTQKGQKNSRERMKRIEEGIKELGSQILKEHPVENTQLQNEKLYLYYLQNGRDMYVDQELDINRLSDYDVDHIVPQSFLKDDSIDNKVLTRSDKARGKSDNVPSEEVVKKMKNYWRQLLNAKLITQRKFDNLTKAERGGLSELDKAGFIKRQLVETRQITKHVAQILDSRMNTKYDENDKLIREVKVITLKSKLVSDFRKDFQFYKVREINNYHHAHDAYLNAVVGTALIKKYPKLESEFVYGDYKVYDVRKMIAKSEQEIGKATAKYFFYSNIMNFFKTEITLANGEIRKRPLIETNGETGEIVWDKGRDFATVRKVLSMPQVNIVKKTEVQTGGFSKESILPKRNSDKLIARKKDWDPKKYGGFDSPTVAYSVLVVAKVEKGKSKKLKSVKELLGITIMERSSFEKNPIDFLEAKGYKEVKKDLIIKLPKYSLFELENGRKRMLASAGELQKGNELALPSKYVNFLYLASHYEKLKGSPEDNEQKQLFVEQHKHYLDEIIEQISEFSKRVILADANLDKVLSAYNKHRDKPIREQAENIIHLFTLTNLGAPAAFKYFDTTIDRKRYTSTKEVLDATLIHQSITGLYETRIDLSQLGGDGGGSSEAAAKGGTAPLEEEYRLFLEAPIQNVTLLEQWKREIPKVWAEINPPGLASTQAPIHVQLLSTALPVRVRQYPITLEAKRSLRETIRKFRAAGILRPVHSPWNTPLLPVRKSGTSEYRMVQDLREVNKRVETIHPTVPNPYTLLSLLPPDRIWYSVLDLKDAFFCIPLAPESQLIFAFEWADAEEGESGQLTWTRLPQGFKNSPTLFNEALNRDLQGFRLDHPSVSLLQYVDDLLIAADTQAACLSATRDLLMTLAELGYRVSGKKAQLCQEEVTYLGFKIHKGSRSLSNSRTQAILQIPVPKTKRQVREFLGKIGYCRLFIPGFAELAQPLYAATRPGNDPLVWGEKEEEAFQSLKLALTQPPALALPSLDKPFQLFVEETSGAAKGVLTQALGPWKRPVAYLSKRLDPVAAGWPRCLRAIAAAALLTREASKLTFGQDIEITSSHNLESLLRSPPDKWLTNARITQYQVLLLDPPRVRFKQTAALNPATLLPETDDTLPIHHCLDTLDSLTSTRPDLTDQPLAQAEATLFTDGSSYIRDGKRYAGAAVVTLDSVIWAEPLPIGTSAQKAELIALTKALEWSKDKSVNIYTDSRYAFATLHVHGMIYRERGWLTAGGKAIKNAPEILALLTAVWLPKRVAVMHCKGHQKDDAPTSTGNRRADEVAREVAIRPLSTQATISAGKRTADGSEFEKRTADGSEFESPKKKAKVE

SEQ ID NO: 1406 - protein, 2098 aa, synthetic construct
MPAAKRVKLDGGDKKYSIGLDIGTNSVGWAVITDEYKVPSKKFKVLGNTDRHSIKKNLIGALLFDSGETAEATRLKRTARRRYTRRKNRICYLQEIFSNEMAKVDDSFFHRLEESFLVEEDKKHERHPIFGNIVDEVAYHEKYPTIYHLRKKLVDSTDKADLRLIYLALAHMIKFRGHFLIEGDLNPDNSDVDKLFIQLVQTYNQLFEENPINASGVDAKAILSARLSKSRRLENLIAQLPGEKKNGLFGNLIALSLGLTPNFKSNFDLAEDAKLQLSKDTYDDDLDNLLAQIGDQYADLFLAAKNLSDAILLSDILRVNTEITKAPLSASMIKRYDEHHQDLTLLKALVRQQLPEKYKEIFFDQSKNGYAGYIDGGASQEEFYKFIKPILEKMDGTEELLVKLNREDLLRKQRTFDNGSIPHQIHLGELHAILRRQEDFYPFLKDNREKIEKILTFRIPYYVGPLARGNSRFAWMTRKSEETITPWNFEEVVDKGASAQSFIERMTNFDKNLPNEKVLPKHSLLYEYFTVYNELTKVKYVTEGMRKPAFLSGEQKKAIVDLLFKTNRKVTVKQLKEDYFKKIECFDSVEISGVEDRFNASLGTYHDLLKIIKDKDFLDNEENEDILEDIVLTLTLFEDREMIEERLKTYAHLFDDKVMKQLKRRRYTGWGRLSRKLINGIRDKQSGKTILDFLKSDGFANRNFMQLIHDDSLTFKEDIQKAQVSGQGDSLHEHIANLAGSPAIKKGILQTVKVVDELVKVMGRHKPENIVIEMARENQTTQKGQKNSRERMKRIEEGIKELGSQILKEHPVENTQLQNEKLYLYYLQNGRDMYVDQELDINRLSDYDVDHIVPQSFLKDDSIDNKVLTRSDKARGKSDNVPSEEVVKKMKNYWRQLLNAKLITQRKFDNLTKAERGGLSELDKAGFIKRQLVETRQITKHVAQILDSRMNTKYDENDKLIREVKVITLKSKLVSDFRKDFQFYKVREINNYHHAHDAYLNAVVGTALIKKYPKLESEFVYGDYKVYDVRKMIAKSEQEIGKATAKYFFYSNIMNFFKTEITLANGEIRKRPLIETNGETGEIVWDKGRDFATVRKVLSMPQVNIVKKTEVQTGGFSKESILPKRNSDKLIARKKDWDPKKYGGFDSPTVAYSVLVVAKVEKGKSKKLKSVKELLGITIMERSSFEKNPIDFLEAKGYKEVKKDLIIKLPKYSLFELENGRKRMLASAGELQKGNELALPSKYVNFLYLASHYEKLKGSPEDNEQKQLFVEQHKHYLDEIIEQISEFSKRVILADANLDKVLSAYNKHRDKPIREQAENIIHLFTLTNLGAPAAFKYFDTTIDRKRYTSTKEVLDATLIHQSITGLYETRIDLSQLGGDGGEAAAKGGSGSSGGTAPLEEEYRLFLEAPIQNVTLLEQWKREIPKVWAEINPPGLASTQAPIHVQLLSTALPVRVRQYPITLEAKRSLRETIRKFRAAGILRPVHSPWNTPLLPVRKSGTSEYRMVQDLREVNKRVETIHPTVPNPYTLLSLLPPDRIWYSVLDLKDAFFCIPLAPESQLIFAFEWADAEEGESGQLTWTRLPQGFKNSPTLFNEALNRDLQGFRLDHPSVSLLQYVDDLLIAADTQAACLSATRDLLMTLAELGYRVSGKKAQLCQEEVTYLGFKIHKGSRSLSNSRTQAILQIPVPKTKRQVREFLGKIGYCRLFIPGFAELAQPLYAATRPGNDPLVWGEKEEEAFQSLKLALTQPPALALPSLDKPFQLFVEETSGAAKGVLTQALGPWKRPVAYLSKRLDPVAAGWPRCLRAIAAAALLTREASKLTFGQDIEITSSHNLESLLRSPPDKWLTNARITQYQVLLLDPPRVRFKQTAALNPATLLPETDDTLPIHHCLDTLDSLTSTRPDLTDQPLAQAEATLFTDGSSYIRDGKRYAGAAVVTLDSVIWAEPLPIGTSAQKAELIALTKALEWSKDKSVNIYTDSRYAFATLHVHGMIYRERGWLTAGGKAIKNAPEILALLTAVWLPKRVAVMHCKGHQKDDAPTSTGNRRADEVAREVAIRPLSTQATISAGKRTADGSEFEKRTADGSEFESPKKKAKVE

SEQ ID NO: 1407 - protein, 2095 aa, synthetic construct
MPAAKRVKLDGGDKKYSIGLDIGTNSVGWAVITDEYKVPSKKFKVLGNTDRHSIKKNLIGALLFDSGETAEATRLKRTARRRYTRRKNRICYLQEIFSNEMAKVDDSFFHRLEESFLVEEDKKHERHPIFGNIVDEVAYHEKYPTIYHLRKKLVDSTDKADLRLIYLALAHMIKFRGHFLIEGDLNPDNSDVDKLFIQLVQTYNQLFEENPINASGVDAKAILSARLSKSRRLENLIAQLPGEKKNGLFGNLIALSLGLTPNFKSNFDLAEDAKLQLSKDTYDDDLDNLLAQIGDQYADLFLAAKNLSDAILLSDILRVNTEITKAPLSASMIKRYDEHHQDLTLLKALVRQQLPEKYKEIFFDQSKNGYAGYIDGGASQEEFYKFIKPILEKMDGTEELLVKLNREDLLRKQRTFDNGSIPHQIHLGELHAILRRQEDFYPFLKDNREKIEKILTFRIPYYVGPLARGNSRFAWMTRKSEETITPWNFEEVVDKGASAQSFIERMTNFDKNLPNEKVLPKHSLLYEYFTVYNELTKVKYVTEGMRKPAFLSGEQKKAIVDLLFKTNRKVTVKQLKEDYFKKIECFDSVEISGVEDRFNASLGTYHDLLKIIKDKDFLDNEENEDILEDIVLTLTLFEDREMIEERLKTYAHLFDDKVMKQLKRRRYTGWGRLSRKLINGIRDKQSGKTILDFLKSDGFANRNFMQLIHDDSLTFKEDIQKAQVSGQGDSLHEHIANLAGSPAIKKGILQTVKVVDELVKVMGRHKPENIVIEMARENQTTQKGQKNSRERMKRIEEGIKELGSQILKEHPVENTQLQNEKLYLYYLQNGRDMYVDQELDINRLSDYDVDHIVPQSFLKDDSIDNKVLTRSDKARGKSDNVPSEEVVKKMKNYWRQLLNAKLITQRKFDNLTKAERGGLSELDKAGFIKRQLVETRQITKHVAQILDSRMNTKYDENDKLIREVKVITLKSKLVSDFRKDFQFYKVREINNYHHAHDAYLNAVVGTALIKKYPKLESEFVYGDYKVYDVRKMIAKSEQEIGKATAKYFFYSNIMNFFKTEITLANGEIRKRPLIETNGETGEIVWDKGRDFATVRKVLSMPQVNIVKKTEVQTGGFSKESILPKRNSDKLIARKKDWDPKKYGGFDSPTVAYSVLVVAKVEKGKSKKLKSVKELLGITIMERSSFEKNPIDFLEAKGYKEVKKDLIIKLPKYSLFELENGRKRMLASAGELQKGNELALPSKYVNFLYLASHYEKLKGSPEDNEQKQLFVEQHKHYLDEIIEQISEFSKRVILADANLDKVLSAYNKHRDKPIREQAENIIHLFTLTNLGAPAAFKYFDTTIDRKRYTSTKEVLDATLIHQSITGLYETRIDLSQLGGDGGPAPEAAAKGGTAPLEEEYRLFLEAPIQNVTLLEQWKREIPKVWAEINPPGLASTQAPIHVQLLSTALPVRVRQYPITLEAKRSLRETIRKFRAAGILRPVHSPWNTPLLPVRKSGTSEYRMVQDLREVNKRVETIHPTVPNPYTLLSLLPPDRIWYSVLDLKDAFFCIPLAPESQLIFAFEWADAEEGESGQLTWTRLPQGFKNSPTLFNEALNRDLQGFRLDHPSVSLLQYVDDLLIAADTQAACLSATRDLLMTLAELGYRVSGKKAQLCQEEVTYLGFKIHKGSRSLSNSRTQAILQIPVPKTKRQVREFLGKIGYCRLFIPGFAELAQPLYAATRPGNDPLVWGEKEEEAFQSLKLALTQPPALALPSLDKPFQLFVEETSGAAKGVLTQALGPWKRPVAYLSKRLDPVAAGWPRCLRAIAAAALLTREASKLTFGQDIEITSSHNLESLLRSPPDKWLTNARITQYQVLLLDPPRVRFKQTAALNPATLLPETDDTLPIHHCLDTLDSLTSTRPDLTDQPLAQAEATLFTDGSSYIRDGKRYAGAAVVTLDSVIWAEPLPIGTSAQKAELIALTKALEWSKDKSVNIYTDSRYAFATLHVHGMIYRERGWLTAGGKAIKNAPEILALLTAVWLPKRVAVMHCKGHQKDDAPTSTGNRRADEVAREVAIRPLSTQATISAGKRTADGSEFEKRTADGSEFESPKKKAKVE

SEQ ID NO: 1408 - protein, 2099 aa, synthetic construct
MPAAKRVKLDGGDKKYSIGLDIGTNSVGWAVITDEYKVPSKKFKVLGNTDRHSIKKNLIGALLFDSGETAEATRLKRTARRRYTRRKNRICYLQEIFSNEMAKVDDSFFHRLEESFLVEEDKKHERHPIFGNIVDEVAYHEKYPTIYHLRKKLVDSTDKADLRLIYLALAHMIKFRGHFLIEGDLNPDNSDVDKLFIQLVQTYNQLFEENPINASGVDAKAILSARLSKSRRLENLIAQLPGEKKNGLFGNLIALSLGLTPNFKSNFDLAEDAKLQLSKDTYDDDLDNLLAQIGDQYADLFLAAKNLSDAILLSDILRVNTEITKAPLSASMIKRYDEHHQDLTLLKALVRQQLPEKYKEIFFDQSKNGYAGYIDGGASQEEFYKFIKPILEKMDGTEELLVKLNREDLLRKQRTFDNGSIPHQIHLGELHAILRRQEDFYPFLKDNREKIEKILTFRIPYYVGPLARGNSRFAWMTRKSEETITPWNFEEVVDKGASAQSFIERMTNFDKNLPNEKVLPKHSLLYEYFTVYNELTKVKYVTEGMRKPAFLSGEQKKAIVDLLFKTNRKVTVKQLKEDYFKKIECFDSVEISGVEDRFNASLGTYHDLLKIIKDKDFLDNEENEDILEDIVLTLTLFEDREMIEERLKTYAHLFDDKVMKQLKRRRYTGWGRLSRKLINGIRDKQSGKTILDFLKSDGFANRNFMQLIHDDSLTFKEDIQKAQVSGQGDSLHEHIANLAGSPAIKKGILQTVKVVDELVKVMGRHKPENIVIEMARENQTTQKGQKNSRERMKRIEEGIKELGSQILKEHPVENTQLQNEKLYLYYLQNGRDMYVDQELDINRLSDYDVDHIVPQSFLKDDSIDNKVLTRSDKARGKSDNVPSEEVVKKMKNYWRQLLNAKLITQRKFDNLTKAERGGLSELDKAGFIKRQLVETRQITKHVAQILDSRMNTKYDENDKLIREVKVITLKSKLVSDFRKDFQFYKVREINNYHHAHDAYLNAVVGTALIKKYPKLESEFVYGDYKVYDVRKMIAKSEQEIGKATAKYFFYSNIMNFFKTEITLANGEIRKRPLIETNGETGEIVWDKGRDFATVRKVLSMPQVNIVKKTEVQTGGFSKESILPKRNSDKLIARKKDWDPKKYGGFDSPTVAYSVLVVAKVEKGKSKKLKSVKELLGITIMERSSFEKNPIDFLEAKGYKEVKKDLIIKLPKYSLFELENGRKRMLASAGELQKGNELALPSKYVNFLYLASHYEKLKGSPEDNEQKQLFVEQHKHYLDEIIEQISEFSKRVILADANLDKVLSAYNKHRDKPIREQAENIIHLFTLTNLGAPAAFKYFDTTIDRKRYTSTKEVLDATLIHQSITGLYETRIDLSQLGGDGGGSAGSAAGSGEFGGTAPLEEEYRLFLEAPIQNVTLLEQWKREIPKVWAEINPPGLASTQAPIHVQLLSTALPVRVRQYPITLEAKRSLRETIRKFRAAGILRPVHSPWNTPLLPVRKSGTSEYRMVQDLREVNKRVETIHPTVPNPYTLLSLLPPDRIWYSVLDLKDAFFCIPLAPESQLIFAFEWADAEEGESGQLTWTRLPQGFKNSPTLFNEALNRDLQGFRLDHPSVSLLQYVDDLLIAADTQAACLSATRDLLMTLAELGYRVSGKKAQLCQEEVTYLGFKIHKGSRSLSNSRTQAILQIPVPKTKRQVREFLGKIGYCRLFIPGFAELAQPLYAATRPGNDPLVWGEKEEEAFQSLKLALTQPPALALPSLDKPFQLFVEETSGAAKGVLTQALGPWKRPVAYLSKRLDPVAAGWPRCLRAIAAAALLTREASKLTFGQDIEITSSHNLESLLRSPPDKWLTNARITQYQVLLLDPPRVRFKQTAALNPATLLPETDDTLPIHHCLDTLDSLTSTRPDLTDQPLAQAEATLFTDGSSYIRDGKRYAGAAVVTLDSVIWAEPLPIGTSAQKAELIALTKALEWSKDKSVNIYTDSRYAFATLHVHGMIYRERGWLTAGGKAIKNAPEILALLTAVWLPKRVAVMHCKGHQKDDAPTSTGNRRADEVAREVAIRPLSTQATISAGKRTADGSEFEKRTADGSEFESPKKKAKVE

SEQ ID NO: 1409 - protein, 2096 aa, synthetic construct
MPAAKRVKLDGGDKKYSIGLDIGTNSVGWAVITDEYKVPSKKFKVLGNTDRHSIKKNLIGALLFDSGETAEATRLKRTARRRYTRRKNRICYLQEIFSNEMAKVDDSFFHRLEESFLVEEDKKHERHPIFGNIVDEVAYHEKYPTIYHLRKKLVDSTDKADLRLIYLALAHMIKFRGHFLIEGDLNPDNSDVDKLFIQLVQTYNQLFEENPINASGVDAKAILSARLSKSRRLENLIAQLPGEKKNGLFGNLIALSLGLTPNFKSNFDLAEDAKLQLSKDTYDDDLDNLLAQIGDQYADLFLAAKNLSDAILLSDILRVNTEITKAPLSASMIKRYDEHHQDLTLLKALVRQQLPEKYKEIFFDQSKNGYAGYIDGGASQEEFYKFIKPILEKMDGTEELLVKLNREDLLRKQRTFDNGSIPHQIHLGELHAILRRQEDFYPFLKDNREKIEKILTFRIPYYVGPLARGNSRFAWMTRKSEETITPWNFEEVVDKGASAQSFIERMTNFDKNLPNEKVLPKHSLLYEYFTVYNELTKVKYVTEGMRKPAFLSGEQKKAIVDLLFKTNRKVTVKQLKEDYFKKIECFDSVEISGVEDRFNASLGTYHDLLKIIKDKDFLDNEENEDILEDIVLTLTLFEDREMIEERLKTYAHLFDDKVMKQLKRRRYTGWGRLSRKLINGIRDKQSGKTILDFLKSDGFANRNFMQLIHDDSLTFKEDIQKAQVSGQGDSLHEHIANLAGSPAIKKGILQTVKVVDELVKVMGRHKPENIVIEMARENQTTQKGQKNSRERMKRIEEGIKELGSQILKEHPVENTQLQNEKLYLYYLQNGRDMYVDQELDINRLSDYDVDHIVPQSFLKDDSIDNKVLTRSDKARGKSDNVPSEEVVKKMKNYWRQLLNAKLITQRKFDNLTKAERGGLSELDKAGFIKRQLVETRQITKHVAQILDSRMNTKYDENDKLIREVKVITLKSKLVSDFRKDFQFYKVREINNYHHAHDAYLNAVVGTALIKKYPKLESEFVYGDYKVYDVRKMIAKSEQEIGKATAKYFFYSNIMNFFKTEITLANGEIRKRPLIETNGETGEIVWDKGRDFATVRKVLSMPQVNIVKKTEVQTGGFSKESILPKRNSDKLIARKKDWDPKKYGGFDSPTVAYSVLVVAKVEKGKSKKLKSVKELLGITIMERSSFEKNPIDFLEAKGYKEVKKDLIIKLPKYSLFELENGRKRMLASAGELQKGNELALPSKYVNFLYLASHYEKLKGSPEDNEQKQLFVEQHKHYLDEIIEQISEFSKRVILADANLDKVLSAYNKHRDKPIREQAENIIHLFTLTNLGAPAAFKYFDTTIDRKRYTSTKEVLDATLIHQSITGLYETRIDLSQLGGDGGGGSPAPGSSGGTAPLEEEYRLFLEAPIQNVTLLEQWKREIPKVWAEINPPGLASTQAPIHVQLLSTALPVRVRQYPITLEAKRSLRETIRKFRAAGILRPVHSPWNTPLLPVRKSGTSEYRMVQDLREVNKRVETIHPTVPNPYTLLSLLPPDRIWYSVLDLKDAFFCIPLAPESQLIFAFEWADAEEGESGQLTWTRLPQGFKNSPTLFNEALNRDLQGFRLDHPSVSLLQYVDDLLIAADTQAACLSATRDLLMTLAELGYRVSGKKAQLCQEEVTYLGFKIHKGSRSLSNSRTQAILQIPVPKTKRQVREFLGKIGYCRLFIPGFAELAQPLYAATRPGNDPLVWGEKEEEAFQSLKLALTQPPALALPSLDKPFQLFVEETSGAAKGVLTQALGPWKRPVAYLSKRLDPVAAGWPRCLRAIAAAALLTREASKLTFGQDIEITSSHNLESLLRSPPDKWLTNARITQYQVLLLDPPRVRFKQTAALNPATLLPETDDTLPIHHCLDTLDSLTSTRPDLTDQPLAQAEATLFTDGSSYIRDGKRYAGAAVVTLDSVIWAEPLPIGTSAQKAELIALTKALEWSKDKSVNIYTDSRYAFATLHVHGMIYRERGWLTAGGKAIKNAPEILALLTAVWLPKRVAVMHCKGHQKDDAPTSTGNRRADEVAREVAIRPLSTQATISAGKRTADGSEFEKRTADGSEFESPKKKAKVE

SEQ ID NO: 1410 - protein, 2093 aa, synthetic construct
MPAAKRVKLDGGDKKYSIGLDIGTNSVGWAVITDEYKVPSKKFKVLGNTDRHSIKKNLIGALLFDSGETAEATRLKRTARRRYTRRKNRICYLQEIFSNEMAKVDDSFFHRLEESFLVEEDKKHERHPIFGNIVDEVAYHEKYPTIYHLRKKLVDSTDKADLRLIYLALAHMIKFRGHFLIEGDLNPDNSDVDKLFIQLVQTYNQLFEENPINASGVDAKAILSARLSKSRRLENLIAQLPGEKKNGLFGNLIALSLGLTPNFKSNFDLAEDAKLQLSKDTYDDDLDNLLAQIGDQYADLFLAAKNLSDAILLSDILRVNTEITKAPLSASMIKRYDEHHQDLTLLKALVRQQLPEKYKEIFFDQSKNGYAGYIDGGASQEEFYKFIKPILEKMDGTEELLVKLNREDLLRKQRTFDNGSIPHQIHLGELHAILRRQEDFYPFLKDNREKIEKILTFRIPYYVGPLARGNSRFAWMTRKSEETITPWNFEEVVDKGASAQSFIERMTNFDKNLPNEKVLPKHSLLYEYFTVYNELTKVKYVTEGMRKPAFLSGEQKKAIVDLLFKTNRKVTVKQLKEDYFKKIECFDSVEISGVEDRFNASLGTYHDLLKIIKDKDFLDNEENEDILEDIVLTLTLFEDREMIEERLKTYAHLFDDKVMKQLKRRRYTGWGRLSRKLINGIRDKQSGKTILDFLKSDGFANRNFMQLIHDDSLTFKEDIQKAQVSGQGDSLHEHIANLAGSPAIKKGILQTVKVVDELVKVMGRHKPENIVIEMARENQTTQKGQKNSRERMKRIEEGIKELGSQILKEHPVENTQLQNEKLYLYYLQNGRDMYVDQELDINRLSDYDVDHIVPQSFLKDDSIDNKVLTRSDKARGKSDNVPSEEVVKKMKNYWRQLLNAKLITQRKFDNLTKAERGGLSELDKAGFIKRQLVETRQITKHVAQILDSRMNTKYDENDKLIREVKVITLKSKLVSDFRKDFQFYKVREINNYHHAHDAYLNAVVGTALIKKYPKLESEFVYGDYKVYDVRKMIAKSEQEIGKATAKYFFYSNIMNFFKTEITLANGEIRKRPLIETNGETGEIVWDKGRDFATVRKVLSMPQVNIVKKTEVQTGGFSKESILPKRNSDKLIARKKDWDPKKYGGFDSPTVAYSVLVVAKVEKGKSKKLKSVKELLGITIMERSSFEKNPIDFLEAKGYKEVKKDLIIKLPKYSLFELENGRKRMLASAGELQKGNELALPSKYVNFLYLASHYEKLKGSPEDNEQKQLFVEQHKHYLDEIIEQISEFSKRVILADANLDKVLSAYNKHRDKPIREQAENIIHLFTLTNLGAPAAFKYFDTTIDRKRYTSTKEVLDATLIHQSITGLYETRIDLSQLGGDGGPAPGGGGGTAPLEEEYRLFLEAPIQNVTLLEQWKREIPKVWAEINPPGLASTQAPIHVQLLSTALPVRVRQYPITLEAKRSLRETIRKFRAAGILRPVHSPWNTPLLPVRKSGTSEYRMVQDLREVNKRVETIHPTVPNPYTLLSLLPPDRIWYSVLDLKDAFFCIPLAPESQLIFAFEWADAEEGESGQLTWTRLPQGFKNSPTLFNEALNRDLQGFRLDHPSVSLLQYVDDLLIAADTQAACLSATRDLLMTLAELGYRVSGKKAQLCQEEVTYLGFKIHKGSRSLSNSRTQAILQIPVPKTKRQVREFLGKIGYCRLFIPGFAELAQPLYAATRPGNDPLVWGEKEEEAFQSLKLALTQPPALALPSLDKPFQLFVEETSGAAKGVLTQALGPWKRPVAYLSKRLDPVAAGWPRCLRAIAAAALLTREASKLTFGQDIEITSSHNLESLLRSPPDKWLTNARITQYQVLLLDPPRVRFKQTAALNPATLLPETDDTLPIHHCLDTLDSLTSTRPDLTDQPLAQAEATLFTDGSSYIRDGKRYAGAAVVTLDSVIWAEPLPIGTSAQKAELIALTKALEWSKDKSVNIYTDSRYAFATLHVHGMIYRERGWLTAGGKAIKNAPEILALLTAVWLPKRVAVMHCKGHQKDDAPTSTGNRRADEVAREVAIRPLSTQATISAGKRTADGSEFEKRTADGSEFESPKKKAKVE

SEQ ID NO: 1411 - protein, 2096 aa, synthetic construct
MPAAKRVKLDGGDKKYSIGLDIGTNSVGWAVITDEYKVPSKKFKVLGNTDRHSIKKNLIGALLFDSGETAEATRLKRTARRRYTRRKNRICYLQEIFSNEMAKVDDSFFHRLEESFLVEEDKKHERHPIFGNIVDEVAYHEKYPTIYHLRKKLVDSTDKADLRLIYLALAHMIKFRGHFLIEGDLNPDNSDVDKLFIQLVQTYNQLFEENPINASGVDAKAILSARLSKSRRLENLIAQLPGEKKNGLFGNLIALSLGLTPNFKSNFDLAEDAKLQLSKDTYDDDLDNLLAQIGDQYADLFLAAKNLSDAILLSDILRVNTEITKAPLSASMIKRYDEHHQDLTLLKALVRQQLPEKYKEIFFDQSKNGYAGYIDGGASQEEFYKFIKPILEKMDGTEELLVKLNREDLLRKQRTFDNGSIPHQIHLGELHAILRRQEDFYPFLKDNREKIEKILTFRIPYYVGPLARGNSRFAWMTRKSEETITPWNFEEVVDKGASAQSFIERMTNFDKNLPNEKVLPKHSLLYEYFTVYNELTKVKYVTEGMRKPAFLSGEQKKAIVDLLFKTNRKVTVKQLKEDYFKKIECFDSVEISGVEDRFNASLGTYHDLLKIIKDKDFLDNEENEDILEDIVLTLTLFEDREMIEERLKTYAHLFDDKVMKQLKRRRYTGWGRLSRKLINGIRDKQSGKTILDFLKSDGFANRNFMQLIHDDSLTFKEDIQKAQVSGQGDSLHEHIANLAGSPAIKKGILQTVKVVDELVKVMGRHKPENIVIEMARENQTTQKGQKNSRERMKRIEEGIKELGSQILKEHPVENTQLQNEKLYLYYLQNGRDMYVDQELDINRLSDYDVDHIVPQSFLKDDSIDNKVLTRSDKARGKSDNVPSEEVVKKMKNYWRQLLNAKLITQRKFDNLTKAERGGLSELDKAGFIKRQLVETRQITKHVAQILDSRMNTKYDENDKLIREVKVITLKSKLVSDFRKDFQFYKVREINNYHHAHDAYLNAVVGTALIKKYPKLESEFVYGDYKVYDVRKMIAKSEQEIGKATAKYFFYSNIMNFFKTEITLANGEIRKRPLIETNGETGEIVWDKGRDFATVRKVLSMPQVNIVKKTEVQTGGFSKESILPKRNSDKLIARKKDWDPKKYGGFDSPTVAYSVLVVAKVEKGKSKKLKSVKELLGITIMERSSFEKNPIDFLEAKGYKEVKKDLIIKLPKYSLFELENGRKRMLASAGELQKGNELALPSKYVNFLYLASHYEKLKGSPEDNEQKQLFVEQHKHYLDEIIEQISEFSKRVILADANLDKVLSAYNKHRDKPIREQAENIIHLFTLTNLGAPAAFKYFDTTIDRKRYTSTKEVLDATLIHQSITGLYETRIDLSQLGGDGGGGGPAPGSSGGTAPLEEEYRLFLEAPIQNVTLLEQWKREIPKVWAEINPPGLASTQAPIHVQLLSTALPVRVRQYPITLEAKRSLRETIRKFRAAGILRPVHSPWNTPLLPVRKSGTSEYRMVQDLREVNKRVETIHPTVPNPYTLLSLLPPDRIWYSVLDLKDAFFCIPLAPESQLIFAFEWADAEEGESGQLTWTRLPQGFKNSPTLFNEALNRDLQGFRLDHPSVSLLQYVDDLLIAADTQAACLSATRDLLMTLAELGYRVSGKKAQLCQEEVTYLGFKIHKGSRSLSNSRTQAILQIPVPKTKRQVREFLGKIGYCRLFIPGFAELAQPLYAATRPGNDPLVWGEKEEEAFQSLKLALTQPPALALPSLDKPFQLFVEETSGAAKGVLTQALGPWKRPVAYLSKRLDPVAAGWPRCLRAIAAAALLTREASKLTFGQDIEITSSHNLESLLRSPPDKWLTNARITQYQVLLLDPPRVRFKQTAALNPATLLPETDDTLPIHHCLDTLDSLTSTRPDLTDQPLAQAEATLFTDGSSYIRDGKRYAGAAVVTLDSVIWAEPLPIGTSAQKAELIALTKALEWSKDKSVNIYTDSRYAFATLHVHGMIYRERGWLTAGGKAIKNAPEILALLTAVWLPKRVAVMHCKGHQKDDAPTSTGNRRADEVAREVAIRPLSTQATISAGKRTADGSEFEKRTADGSEFESPKKKAKVE

SEQ ID NO: 1412 - protein, 2093 aa, synthetic construct
MPAAKRVKLDGGDKKYSIGLDIGTNSVGWAVITDEYKVPSKKFKVLGNTDRHSIKKNLIGALLFDSGETAEATRLKRTARRRYTRRKNRICYLQEIFSNEMAKVDDSFFHRLEESFLVEEDKKHERHPIFGNIVDEVAYHEKYPTIYHLRKKLVDSTDKADLRLIYLALAHMIKFRGHFLIEGDLNPDNSDVDKLFIQLVQTYNQLFEENPINASGVDAKAILSARLSKSRRLENLIAQLPGEKKNGLFGNLIALSLGLTPNFKSNFDLAEDAKLQLSKDTYDDDLDNLLAQIGDQYADLFLAAKNLSDAILLSDILRVNTEITKAPLSASMIKRYDEHHQDLTLLKALVRQQLPEKYKEIFFDQSKNGYAGYIDGGASQEEFYKFIKPILEKMDGTEELLVKLNREDLLRKQRTFDNGSIPHQIHLGELHAILRRQEDFYPFLKDNREKIEKILTFRIPYYVGPLARGNSRFAWMTRKSEETITPWNFEEVVDKGASAQSFIERMTNFDKNLPNEKVLPKHSLLYEYFTVYNELTKVKYVTEGMRKPAFLSGEQKKAIVDLLFKTNRKVTVKQLKEDYFKKIECFDSVEISGVEDRFNASLGTYHDLLKIIKDKDFLDNEENEDILEDIVLTLTLFEDREMIEERLKTYAHLFDDKVMKQLKRRRYTGWGRLSRKLINGIRDKQSGKTILDFLKSDGFANRNFMQLIHDDSLTFKEDIQKAQVSGQGDSLHEHIANLAGSPAIKKGILQTVKVVDELVKVMGRHKPENIVIEMARENQTTQKGQKNSRERMKRIEEGIKELGSQILKEHPVENTQLQNEKLYLYYLQNGRDMYVDQELDINRLSDYDVDHIVPQSFLKDDSIDNKVLTRSDKARGKSDNVPSEEVVKKMKNYWRQLLNAKLITQRKFDNLTKAERGGLSELDKAGFIKRQLVETRQITKHVAQILDSRMNTKYDENDKLIREVKVITLKSKLVSDFRKDFQFYKVREINNYHHAHDAYLNAVVGTALIKKYPKLESEFVYGDYKVYDVRKMIAKSEQEIGKATAKYFFYSNIMNFFKTEITLANGEIRKRPLIETNGETGEIVWDKGRDFATVRKVLSMPQVNIVKKTEVQTGGFSKESILPKRNSDKLIARKKDWDPKKYGGFDSPTVAYSVLVVAKVEKGKSKKLKSVKELLGITIMERSSFEKNPIDFLEAKGYKEVKKDLIIKLPKYSLFELENGRKRMLASAGELQKGNELALPSKYVNFLYLASHYEKLKGSPEDNEQKQLFVEQHKHYLDEIIEQISEFSKRVILADANLDKVLSAYNKHRDKPIREQAENIIHLFTLTNLGAPAAFKYFDTTIDRKRYTSTKEVLDATLIHQSITGLYETRIDLSQLGGDGGGGSGSSGGTAPLEEEYRLFLEAPIQNVTLLEQWKREIPKVWAEINPPGLASTQAPIHVQLLSTALPVRVRQYPITLEAKRSLRETIRKFRAAGILRPVHSPWNTPLLPVRKSGTSEYRMVQDLREVNKRVETIHPTVPNPYTLLSLLPPDRIWYSVLDLKDAFFCIPLAPESQLIFAFEWADAEEGESGQLTWTRLPQGFKNSPTLFNEALNRDLQGFRLDHPSVSLLQYVDDLLIAADTQAACLSATRDLLMTLAELGYRVSGKKAQLCQEEVTYLGFKIHKGSRSLSNSRTQAILQIPVPKTKRQVREFLGKIGYCRLFIPGFAELAQPLYAATRPGNDPLVWGEKEEEAFQSLKLALTQPPALALPSLDKPFQLFVEETSGAAKGVLTQALGPWKRPVAYLSKRLDPVAAGWPRCLRAIAAAALLTREASKLTFGQDIEITSSHNLESLLRSPPDKWLTNARITQYQVLLLDPPRVRFKQTAALNPATLLPETDDTLPIHHCLDTLDSLTSTRPDLTDQPLAQAEATLFTDGSSYIRDGKRYAGAAVVTLDSVIWAEPLPIGTSAQKAELIALTKALEWSKDKSVNIYTDSRYAFATLHVHGMIYRERGWLTAGGKAIKNAPEILALLTAVWLPKRVAVMHCKGHQKDDAPTSTGNRRADEVAREVAIRPLSTQATISAGKRTADGSEFEKRTADGSEFESPKKKAKVE

SEQ ID NO: 1413 - protein, 2096 aa, synthetic construct
MPAAKRVKLDGGDKKYSIGLDIGTNSVGWAVITDEYKVPSKKFKVLGNTDRHSIKKNLIGALLFDSGETAEATRLKRTARRRYTRRKNRICYLQEIFSNEMAKVDDSFFHRLEESFLVEEDKKHERHPIFGNIVDEVAYHEKYPTIYHLRKKLVDSTDKADLRLIYLALAHMIKFRGHFLIEGDLNPDNSDVDKLFIQLVQTYNQLFEENPINASGVDAKAILSARLSKSRRLENLIAQLPGEKKNGLFGNLIALSLGLTPNFKSNFDLAEDAKLQLSKDTYDDDLDNLLAQIGDQYADLFLAAKNLSDAILLSDILRVNTEITKAPLSASMIKRYDEHHQDLTLLKALVRQQLPEKYKEIFFDQSKNGYAGYIDGGASQEEFYKFIKPILEKMDGTEELLVKLNREDLLRKQRTFDNGSIPHQIHLGELHAILRRQEDFYPFLKDNREKIEKILTFRIPYYVGPLARGNSRFAWMTRKSEETITPWNFEEVVDKGASAQSFIERMTNFDKNLPNEKVLPKHSLLYEYFTVYNELTKVKYVTEGMRKPAFLSGEQKKAIVDLLFKTNRKVTVKQLKEDYFKKIECFDSVEISGVEDRFNASLGTYHDLLKIIKDKDFLDNEENEDILEDIVLTLTLFEDREMIEERLKTYAHLFDDKVMKQLKRRRYTGWGRLSRKLINGIRDKQSGKTILDFLKSDGFANRNFMQLIHDDSLTFKEDIQKAQVSGQGDSLHEHIANLAGSPAIKKGILQTVKVVDELVKVMGRHKPENIVIEMARENQTTQKGQKNSRERMKRIEEGIKELGSQILKEHPVENTQLQNEKLYLYYLQNGRDMYVDQELDINRLSDYDVDHIVPQSFLKDDSIDNKVLTRSDKARGKSDNVPSEEVVKKMKNYWRQLLNAKLITQRKFDNLTKAERGGLSELDKAGFIKRQLVETRQITKHVAQILDSRMNTKYDENDKLIREVKVITLKSKLVSDFRKDFQFYKVREINNYHHAHDAYLNAVVGTALIKKYPKLESEFVYGDYKVYDVRKMIAKSEQEIGKATAKYFFYSNIMNFFKTEITLANGEIRKRPLIETNGETGEIVWDKGRDFATVRKVLSMPQVNIVKKTEVQTGGFSKESILPKRNSDKLIARKKDWDPKKYGGFDSPTVAYSVLVVAKVEKGKSKKLKSVKELLGITIMERSSFEKNPIDFLEAKGYKEVKKDLIIKLPKYSLFELENGRKRMLASAGELQKGNELALPSKYVNFLYLASHYEKLKGSPEDNEQKQLFVEQHKHYLDEIIEQISEFSKRVILADANLDKVLSAYNKHRDKPIREQAENIIHLFTLTNLGAPAAFKYFDTTIDRKRYTSTKEVLDATLIHQSITGLYETRIDLSQLGGDGGGSSGGGGGSGGTAPLEEEYRLFLEAPIQNVTLLEQWKREIPKVWAEINPPGLASTQAPIHVQLLSTALPVRVRQYPITLEAKRSLRETIRKFRAAGILRPVHSPWNTPLLPVRKSGTSEYRMVQDLREVNKRVETIHPTVPNPYTLLSLLPPDRIWYSVLDLKDAFFCIPLAPESQLIFAFEWADAEEGESGQLTWTRLPQGFKNSPTLFNEALNRDLQGFRLDHPSVSLLQYVDDLLIAADTQAACLSATRDLLMTLAELGYRVSGKKAQLCQEEVTYLGFKIHKGSRSLSNSRTQAILQIPVPKTKRQVREFLGKIGYCRLFIPGFAELAQPLYAATRPGNDPLVWGEKEEEAFQSLKLALTQPPALALPSLDKPFQLFVEETSGAAKGVLTQALGPWKRPVAYLSKRLDPVAAGWPRCLRAIAAAALLTREASKLTFGQDIEITSSHNLESLLRSPPDKWLTNARITQYQVLLLDPPRVRFKQTAALNPATLLPETDDTLPIHHCLDTLDSLTSTRPDLTDQPLAQAEATLFTDGSSYIRDGKRYAGAAVVTLDSVIWAEPLPIGTSAQKAELIALTKALEWSKDKSVNIYTDSRYAFATLHVHGMIYRERGWLTAGGKAIKNAPEILALLTAVWLPKRVAVMHCKGHQKDDAPTSTGNRRADEVAREVAIRPLSTQATISAGKRTADGSEFEKRTADGSEFESPKKKAKVE

SEQ ID NO: 1414 - protein, 2090 aa, synthetic construct
MPAAKRVKLDGGDKKYSIGLDIGTNSVGWAVITDEYKVPSKKFKVLGNTDRHSIKKNLIGALLFDSGETAEATRLKRTARRRYTRRKNRICYLQEIFSNEMAKVDDSFFHRLEESFLVEEDKKHERHPIFGNIVDEVAYHEKYPTIYHLRKKLVDSTDKADLRLIYLALAHMIKFRGHFLIEGDLNPDNSDVDKLFIQLVQTYNQLFEENPINASGVDAKAILSARLSKSRRLENLIAQLPGEKKNGLFGNLIALSLGLTPNFKSNFDLAEDAKLQLSKDTYDDDLDNLLAQIGDQYADLFLAAKNLSDAILLSDILRVNTEITKAPLSASMIKRYDEHHQDLTLLKALVRQQLPEKYKEIFFDQSKNGYAGYIDGGASQEEFYKFIKPILEKMDGTEELLVKLNREDLLRKQRTFDNGSIPHQIHLGELHAILRRQEDFYPFLKDNREKIEKILTFRIPYYVGPLARGNSRFAWMTRKSEETITPWNFEEVVDKGASAQSFIERMTNFDKNLPNEKVLPKHSLLYEYFTVYNELTKVKYVTEGMRKPAFLSGEQKKAIVDLLFKTNRKVTVKQLKEDYFKKIECFDSVEISGVEDRFNASLGTYHDLLKIIKDKDFLDNEENEDILEDIVLTLTLFEDREMIEERLKTYAHLFDDKVMKQLKRRRYTGWGRLSRKLINGIRDKQSGKTILDFLKSDGFANRNFMQLIHDDSLTFKEDIQKAQVSGQGDSLHEHIANLAGSPAIKKGILQTVKVVDELVKVMGRHKPENIVIEMARENQTTQKGQKNSRERMKRIEEGIKELGSQILKEHPVENTQLQNEKLYLYYLQNGRDMYVDQELDINRLSDYDVDHIVPQSFLKDDSIDNKVLTRSDKARGKSDNVPSEEVVKKMKNYWRQLLNAKLITQRKFDNLTKAERGGLSELDKAGFIKRQLVETRQITKHVAQILDSRMNTKYDENDKLIREVKVITLKSKLVSDFRKDFQFYKVREINNYHHAHDAYLNAVVGTALIKKYPKLESEFVYGDYKVYDVRKMIAKSEQEIGKATAKYFFYSNIMNFFKTEITLANGEIRKRPLIETNGETGEIVWDKGRDFATVRKVLSMPQVNIVKKTEVQTGGFSKESILPKRNSDKLIARKKDWDPKKYGGFDSPTVAYSVLVVAKVEKGKSKKLKSVKELLGITIMERSSFEKNPIDFLEAKGYKEVKKDLIIKLPKYSLFELENGRKRMLASAGELQKGNELALPSKYVNFLYLASHYEKLKGSPEDNEQKQLFVEQHKHYLDEIIEQISEFSKRVILADANLDKVLSAYNKHRDKPIREQAENIIHLFTLTNLGAPAAFKYFDTTIDRKRYTSTKEVLDATLIHQSITGLYETRIDLSQLGGDGGPAPGGTAPLEEEYRLFLEAPIQNVTLLEQWKREIPKVWAEINPPGLASTQAPIHVQLLSTALPVRVRQYPITLEAKRSLRETIRKFRAAGILRPVHSPWNTPLLPVRKSGTSEYRMVQDLREVNKRVETIHPTVPNPYTLLSLLPPDRIWYSVLDLKDAFFCIPLAPESQLIFAFEWADAEEGESGQLTWTRLPQGFKNSPTLFNEALNRDLQGFRLDHPSVSLLQYVDDLLIAADTQAACLSATRDLLMTLAELGYRVSGKKAQLCQEEVTYLGFKIHKGSRSLSNSRTQAILQIPVPKTKRQVREFLGKIGYCRLFIPGFAELAQPLYAATRPGNDPLVWGEKEEEAFQSLKLALTQPPALALPSLDKPFQLFVEETSGAAKGVLTQALGPWKRPVAYLSKRLDPVAAGWPRCLRAIAAAALLTREASKLTFGQDIEITSSHNLESLLRSPPDKWLTNARITQYQVLLLDPPRVRFKQTAALNPATLLPETDDTLPIHHCLDTLDSLTSTRPDLTDQPLAQAEATLFTDGSSYIRDGKRYAGAAVVTLDSVIWAEPLPIGTSAQKAELIALTKALEWSKDKSVNIYTDSRYAFATLHVHGMIYRERGWLTAGGKAIKNAPEILALLTAVWLPKRVAVMHCKGHQKDDAPTSTGNRRADEVAREVAIRPLSTQATISAGKRTADGSEFEKRTADGSEFESPKKKAKVE

SEQ ID NO: 1415 - protein, 2098 aa, synthetic construct
MPAAKRVKLDGGDKKYSIGLDIGTNSVGWAVITDEYKVPSKKFKVLGNTDRHSIKKNLIGALLFDSGETAEATRLKRTARRRYTRRKNRICYLQEIFSNEMAKVDDSFFHRLEESFLVEEDKKHERHPIFGNIVDEVAYHEKYPTIYHLRKKLVDSTDKADLRLIYLALAHMIKFRGHFLIEGDLNPDNSDVDKLFIQLVQTYNQLFEENPINASGVDAKAILSARLSKSRRLENLIAQLPGEKKNGLFGNLIALSLGLTPNFKSNFDLAEDAKLQLSKDTYDDDLDNLLAQIGDQYADLFLAAKNLSDAILLSDILRVNTEITKAPLSASMIKRYDEHHQDLTLLKALVRQQLPEKYKEIFFDQSKNGYAGYIDGGASQEEFYKFIKPILEKMDGTEELLVKLNREDLLRKQRTFDNGSIPHQIHLGELHAILRRQEDFYPFLKDNREKIEKILTFRIPYYVGPLARGNSRFAWMTRKSEETITPWNFEEVVDKGASAQSFIERMTNFDKNLPNEKVLPKHSLLYEYFTVYNELTKVKYVTEGMRKPAFLSGEQKKAIVDLLFKTNRKVTVKQLKEDYFKKIECFDSVEISGVEDRFNASLGTYHDLLKIIKDKDFLDNEENEDILEDIVLTLTLFEDREMIEERLKTYAHLFDDKVMKQLKRRRYTGWGRLSRKLINGIRDKQSGKTILDFLKSDGFANRNFMQLIHDDSLTFKEDIQKAQVSGQGDSLHEHIANLAGSPAIKKGILQTVKVVDELVKVMGRHKPENIVIEMARENQTTQKGQKNSRERMKRIEEGIKELGSQILKEHPVENTQLQNEKLYLYYLQNGRDMYVDQELDINRLSDYDVDHIVPQSFLKDDSIDNKVLTRSDKARGKSDNVPSEEVVKKMKNYWRQLLNAKLITQRKFDNLTKAERGGLSELDKAGFIKRQLVETRQITKHVAQILDSRMNTKYDENDKLIREVKVITLKSKLVSDFRKDFQFYKVREINNYHHAHDAYLNAVVGTALIKKYPKLESEFVYGDYKVYDVRKMIAKSEQEIGKATAKYFFYSNIMNFFKTEITLANGEIRKRPLIETNGETGEIVWDKGRDFATVRKVLSMPQVNIVKKTEVQTGGFSKESILPKRNSDKLIARKKDWDPKKYGGFDSPTVAYSVLVVAKVEKGKSKKLKSVKELLGITIMERSSFEKNPIDFLEAKGYKEVKKDLIIKLPKYSLFELENGRKRMLASAGELQKGNELALPSKYVNFLYLASHYEKLKGSPEDNEQKQLFVEQHKHYLDEIIEQISEFSKRVILADANLDKVLSAYNKHRDKPIREQAENIIHLFTLTNLGAPAAFKYFDTTIDRKRYTSTKEVLDATLIHQSITGLYETRIDLSQLGGDGGGGGPAPEAAAKGGTAPLEEEYRLFLEAPIQNVTLLEQWKREIPKVWAEINPPGLASTQAPIHVQLLSTALPVRVRQYPITLEAKRSLRETIRKFRAAGILRPVHSPWNTPLLPVRKSGTSEYRMVQDLREVNKRVETIHPTVPNPYTLLSLLPPDRIWYSVLDLKDAFFCIPLAPESQLIFAFEWADAEEGESGQLTWTRLPQGFKNSPTLFNEALNRDLQGFRLDHPSVSLLQYVDDLLIAADTQAACLSATRDLLMTLAELGYRVSGKKAQLCQEEVTYLGFKIHKGSRSLSNSRTQAILQIPVPKTKRQVREFLGKIGYCRLFIPGFAELAQPLYAATRPGNDPLVWGEKEEEAFQSLKLALTQPPALALPSLDKPFQLFVEETSGAAKGVLTQALGPWKRPVAYLSKRLDPVAAGWPRCLRAIAAAALLTREASKLTFGQDIEITSSHNLESLLRSPPDKWLTNARITQYQVLLLDPPRVRFKQTAALNPATLLPETDDTLPIHHCLDTLDSLTSTRPDLTDQPLAQAEATLFTDGSSYIRDGKRYAGAAVVTLDSVIWAEPLPIGTSAQKAELIALTKALEWSKDKSVNIYTDSRYAFATLHVHGMIYRERGWLTAGGKAIKNAPEILALLTAVWLPKRVAVMHCKGHQKDDAPTSTGNRRADEVAREVAIRPLSTQATISAGKRTADGSEFEKRTADGSEFESPKKKAKVE

SEQ ID NO: 1416 - protein, 2098 aa, synthetic construct
MPAAKRVKLDGGDKKYSIGLDIGTNSVGWAVITDEYKVPSKKFKVLGNTDRHSIKKNLIGALLFDSGETAEATRLKRTARRRYTRRKNRICYLQEIFSNEMAKVDDSFFHRLEESFLVEEDKKHERHPIFGNIVDEVAYHEKYPTIYHLRKKLVDSTDKADLRLIYLALAHMIKFRGHFLIEGDLNPDNSDVDKLFIQLVQTYNQLFEENPINASGVDAKAILSARLSKSRRLENLIAQLPGEKKNGLFGNLIALSLGLTPNFKSNFDLAEDAKLQLSKDTYDDDLDNLLAQIGDQYADLFLAAKNLSDAILLSDILRVNTEITKAPLSASMIKRYDEHHQDLTLLKALVRQQLPEKYKEIFFDQSKNGYAGYIDGGASQEEFYKFIKPILEKMDGTEELLVKLNREDLLRKQRTFDNGSIPHQIHLGELHAILRRQEDFYPFLKDNREKIEKILTFRIPYYVGPLARGNSRFAWMTRKSEETITPWNFEEVVDKGASAQSFIERMTNFDKNLPNEKVLPKHSLLYEYFTVYNELTKVKYVTEGMRKPAFLSGEQKKAIVDLLFKTNRKVTVKQLKEDYFKKIECFDSVEISGVEDRFNASLGTYHDLLKIIKDKDFLDNEENEDILEDIVLTLTLFEDREMIEERLKTYAHLFDDKVMKQLKRRRYTGWGRLSRKLINGIRDKQSGKTILDFLKSDGFANRNFMQLIHDDSLTFKEDIQKAQVSGQGDSLHEHIANLAGSPAIKKGILQTVKVVDELVKVMGRHKPENIVIEMARENQTTQKGQKNSRERMKRIEEGIKELGSQILKEHPVENTQLQNEKLYLYYLQNGRDMYVDQELDINRLSDYDVDHIVPQSFLKDDSIDNKVLTRSDKARGKSDNVPSEEVVKKMKNYWRQLLNAKLITQRKFDNLTKAERGGLSELDKAGFIKRQLVETRQITKHVAQILDSRMNTKYDENDKLIREVKVITLKSKLVSDFRKDFQFYKVREINNYHHAHDAYLNAVVGTALIKKYPKLESEFVYGDYKVYDVRKMIAKSEQEIGKATAKYFFYSNIMNFFKTEITLANGEIRKRPLIETNGETGEIVWDKGRDFATVRKVLSMPQVNIVKKTEVQTGGFSKESILPKRNSDKLIARKKDWDPKKYGGFDSPTVAYSVLVVAKVEKGKSKKLKSVKELLGITIMERSSFEKNPIDFLEAKGYKEVKKDLIIKLPKYSLFELENGRKRMLASAGELQKGNELALPSKYVNFLYLASHYEKLKGSPEDNEQKQLFVEQHKHYLDEIIEQISEFSKRVILADANLDKVLSAYNKHRDKPIREQAENIIHLFTLTNLGAPAAFKYFDTTIDRKRYTSTKEVLDATLIHQSITGLYETRIDLSQLGGDGGEAAAKGSSPAPGGTAPLEEEYRLFLEAPIQNVTLLEQWKREIPKVWAEINPPGLASTQAPIHVQLLSTALPVRVRQYPITLEAKRSLRETIRKFRAAGILRPVHSPWNTPLLPVRKSGTSEYRMVQDLREVNKRVETIHPTVPNPYTLLSLLPPDRIWYSVLDLKDAFFCIPLAPESQLIFAFEWADAEEGESGQLTWTRLPQGFKNSPTLFNEALNRDLQGFRLDHPSVSLLQYVDDLLIAADTQAACLSATRDLLMTLAELGYRVSGKKAQLCQEEVTYLGFKIHKGSRSLSNSRTQAILQIPVPKTKRQVREFLGKIGYCRLFIPGFAELAQPLYAATRPGNDPLVWGEKEEEAFQSLKLALTQPPALALPSLDKPFQLFVEETSGAAKGVLTQALGPWKRPVAYLSKRLDPVAAGWPRCLRAIAAAALLTREASKLTFGQDIEITSSHNLESLLRSPPDKWLTNARITQYQVLLLDPPRVRFKQTAALNPATLLPETDDTLPIHHCLDTLDSLTSTRPDLTDQPLAQAEATLFTDGSSYIRDGKRYAGAAVVTLDSVIWAEPLPIGTSAQKAELIALTKALEWSKDKSVNIYTDSRYAFATLHVHGMIYRERGWLTAGGKAIKNAPEILALLTAVWLPKRVAVMHCKGHQKDDAPTSTGNRRADEVAREVAIRPLSTQATISAGKRTADGSEFEKRTADGSEFESPKKKAKVE

SEQ ID NO: 1417 - protein, 2090 aa, synthetic construct
MPAAKRVKLDGGDKKYSIGLDIGTNSVGWAVITDEYKVPSKKFKVLGNTDRHSIKKNLIGALLFDSGETAEATRLKRTARRRYTRRKNRICYLQEIFSNEMAKVDDSFFHRLEESFLVEEDKKHERHPIFGNIVDEVAYHEKYPTIYHLRKKLVDSTDKADLRLIYLALAHMIKFRGHFLIEGDLNPDNSDVDKLFIQLVQTYNQLFEENPINASGVDAKAILSARLSKSRRLENLIAQLPGEKKNGLFGNLIALSLGLTPNFKSNFDLAEDAKLQLSKDTYDDDLDNLLAQIGDQYADLFLAAKNLSDAILLSDILRVNTEITKAPLSASMIKRYDEHHQDLTLLKALVRQQLPEKYKEIFFDQSKNGYAGYIDGGASQEEFYKFIKPILEKMDGTEELLVKLNREDLLRKQRTFDNGSIPHQIHLGELHAILRRQEDFYPFLKDNREKIEKILTFRIPYYVGPLARGNSRFAWMTRKSEETITPWNFEEVVDKGASAQSFIERMTNFDKNLPNEKVLPKHSLLYEYFTVYNELTKVKYVTEGMRKPAFLSGEQKKAIVDLLFKTNRKVTVKQLKEDYFKKIECFDSVEISGVEDRFNASLGTYHDLLKIIKDKDFLDNEENEDILEDIVLTLTLFEDREMIEERLKTYAHLFDDKVMKQLKRRRYTGWGRLSRKLINGIRDKQSGKTILDFLKSDGFANRNFMQLIHDDSLTFKEDIQKAQVSGQGDSLHEHIANLAGSPAIKKGILQTVKVVDELVKVMGRHKPENIVIEMARENQTTQKGQKNSRERMKRIEEGIKELGSQILKEHPVENTQLQNEKLYLYYLQNGRDMYVDQELDINRLSDYDVDHIVPQSFLKDDSIDNKVLTRSDKARGKSDNVPSEEVVKKMKNYWRQLLNAKLITQRKFDNLTKAERGGLSELDKAGFIKRQLVETRQITKHVAQILDSRMNTKYDENDKLIREVKVITLKSKLVSDFRKDFQFYKVREINNYHHAHDAYLNAVVGTALIKKYPKLESEFVYGDYKVYDVRKMIAKSEQEIGKATAKYFFYSNIMNFFKTEITLANGEIRKRPLIETNGETGEIVWDKGRDFATVRKVLSMPQVNIVKKTEVQTGGFSKESILPKRNSDKLIARKKDWDPKKYGGFDSPTVAYSVLVVAKVEKGKSKKLKSVKELLGITIMERSSFEKNPIDFLEAKGYKEVKKDLIIKLPKYSLFELENGRKRMLASAGELQKGNELALPSKYVNFLYLASHYEKLKGSPEDNEQKQLFVEQHKHYLDEIIEQISEFSKRVILADANLDKVLSAYNKHRDKPIREQAENIIHLFTLTNLGAPAAFKYFDTTIDRKRYTSTKEVLDATLIHQSITGLYETRIDLSQLGGDGGGSSGGTAPLEEEYRLFLEAPIQNVTLLEQWKREIPKVWAEINPPGLASTQAPIHVQLLSTALPVRVRQYPITLEAKRSLRETIRKFRAAGILRPVHSPWNTPLLPVRKSGTSEYRMVQDLREVNKRVETIHPTVPNPYTLLSLLPPDRIWYSVLDLKDAFFCIPLAPESQLIFAFEWADAEEGESGQLTWTRLPQGFKNSPTLFNEALNRDLQGFRLDHPSVSLLQYVDDLLIAADTQAACLSATRDLLMTLAELGYRVSGKKAQLCQEEVTYLGFKIHKGSRSLSNSRTQAILQIPVPKTKRQVREFLGKIGYCRLFIPGFAELAQPLYAATRPGNDPLVWGEKEEEAFQSLKLALTQPPALALPSLDKPFQLFVEETSGAAKGVLTQALGPWKRPVAYLSKRLDPVAAGWPRCLRAIAAAALLTREASKLTFGQDIEITSSHNLESLLRSPPDKWLTNARITQYQVLLLDPPRVRFKQTAALNPATLLPETDDTLPIHHCLDTLDSLTSTRPDLTDQPLAQAEATLFTDGSSYIRDGKRYAGAAVVTLDSVIWAEPLPIGTSAQKAELIALTKALEWSKDKSVNIYTDSRYAFATLHVHGMIYRERGWLTAGGKAIKNAPEILALLTAVWLPKRVAVMHCKGHQKDDAPTSTGNRRADEVAREVAIRPLSTQATISAGKRTADGSEFEKRTADGSEFESPKKKAKVE

SEQ ID NO: 1418 - protein, 2096 aa, synthetic construct
MPAAKRVKLDGGDKKYSIGLDIGTNSVGWAVITDEYKVPSKKFKVLGNTDRHSIKKNLIGALLFDSGETAEATRLKRTARRRYTRRKNRICYLQEIFSNEMAKVDDSFFHRLEESFLVEEDKKHERHPIFGNIVDEVAYHEKYPTIYHLRKKLVDSTDKADLRLIYLALAHMIKFRGHFLIEGDLNPDNSDVDKLFIQLVQTYNQLFEENPINASGVDAKAILSARLSKSRRLENLIAQLPGEKKNGLFGNLIALSLGLTPNFKSNFDLAEDAKLQLSKDTYDDDLDNLLAQIGDQYADLFLAAKNLSDAILLSDILRVNTEITKAPLSASMIKRYDEHHQDLTLLKALVRQQLPEKYKEIFFDQSKNGYAGYIDGGASQEEFYKFIKPILEKMDGTEELLVKLNREDLLRKQRTFDNGSIPHQIHLGELHAILRRQEDFYPFLKDNREKIEKILTFRIPYYVGPLARGNSRFAWMTRKSEETITPWNFEEVVDKGASAQSFIERMTNFDKNLPNEKVLPKHSLLYEYFTVYNELTKVKYVTEGMRKPAFLSGEQKKAIVDLLFKTNRKVTVKQLKEDYFKKIECFDSVEISGVEDRFNASLGTYHDLLKIIKDKDFLDNEENEDILEDIVLTLTLFEDREMIEERLKTYAHLFDDKVMKQLKRRRYTGWGRLSRKLINGIRDKQSGKTILDFLKSDGFANRNFMQLIHDDSLTFKEDIQKAQVSGQGDSLHEHIANLAGSPAIKKGILQTVKVVDELVKVMGRHKPENIVIEMARENQTTQKGQKNSRERMKRIEEGIKELGSQILKEHPVENTQLQNEKLYLYYLQNGRDMYVDQELDINRLSDYDVDHIVPQSFLKDDSIDNKVLTRSDKARGKSDNVPSEEVVKKMKNYWRQLLNAKLITQRKFDNLTKAERGGLSELDKAGFIKRQLVETRQITKHVAQILDSRMNTKYDENDKLIREVKVITLKSKLVSDFRKDFQFYKVREINNYHHAHDAYLNAVVGTALIKKYPKLESEFVYGDYKVYDVRKMIAKSEQEIGKATAKYFFYSNIMNFFKTEITLANGEIRKRPLIETNGETGEIVWDKGRDFATVRKVLSMPQVNIVKKTEVQTGGFSKESILPKRNSDKLIARKKDWDPKKYGGFDSPTVAYSVLVVAKVEKGKSKKLKSVKELLGITIMERSSFEKNPIDFLEAKGYKEVKKDLIIKLPKYSLFELENGRKRMLASAGELQKGNELALPSKYVNFLYLASHYEKLKGSPEDNEQKQLFVEQHKHYLDEIIEQISEFSKRVILADANLDKVLSAYNKHRDKPIREQAENIIHLFTLTNLGAPAAFKYFDTTIDRKRYTSTKEVLDATLIHQSITGLYETRIDLSQLGGDGGGGSGSSGGGGGTAPLEEEYRLFLEAPIQNVTLLEQWKREIPKVWAEINPPGLASTQAPIHVQLLSTALPVRVRQYPITLEAKRSLRETIRKFRAAGILRPVHSPWNTPLLPVRKSGTSEYRMVQDLREVNKRVETIHPTVPNPYTLLSLLPPDRIWYSVLDLKDAFFCIPLAPESQLIFAFEWADAEEGESGQLTWTRLPQGFKNSPTLFNEALNRDLQGFRLDHPSVSLLQYVDDLLIAADTQAACLSATRDLLMTLAELGYRVSGKKAQLCQEEVTYLGFKIHKGSRSLSNSRTQAILQIPVPKTKRQVREFLGKIGYCRLFIPGFAELAQPLYAATRPGNDPLVWGEKEEEAFQSLKLALTQPPALALPSLDKPFQLFVEETSGAAKGVLTQALGPWKRPVAYLSKRLDPVAAGWPRCLRAIAAAALLTREASKLTFGQDIEITSSHNLESLLRSPPDKWLTNARITQYQVLLLDPPRVRFKQTAALNPATLLPETDDTLPIHHCLDTLDSLTSTRPDLTDQPLAQAEATLFTDGSSYIRDGKRYAGAAVVTLDSVIWAEPLPIGTSAQKAELIALTKALEWSKDKSVNIYTDSRYAFATLHVHGMIYRERGWLTAGGKAIKNAPEILALLTAVWLPKRVAVMHCKGHQKDDAPTSTGNRRADEVAREVAIRPLSTQATISAGKRTADGSEFEKRTADGSEFESPKKKAKVE

SEQ ID NO: 1419 - protein, 2098 aa, synthetic construct
MPAAKRVKLDGGDKKYSIGLDIGTNSVGWAVITDEYKVPSKKFKVLGNTDRHSIKKNLIGALLFDSGETAEATRLKRTARRRYTRRKNRICYLQEIFSNEMAKVDDSFFHRLEESFLVEEDKKHERHPIFGNIVDEVAYHEKYPTIYHLRKKLVDSTDKADLRLIYLALAHMIKFRGHFLIEGDLNPDNSDVDKLFIQLVQTYNQLFEENPINASGVDAKAILSARLSKSRRLENLIAQLPGEKKNGLFGNLIALSLGLTPNFKSNFDLAEDAKLQLSKDTYDDDLDNLLAQIGDQYADLFLAAKNLSDAILLSDILRVNTEITKAPLSASMIKRYDEHHQDLTLLKALVRQQLPEKYKEIFFDQSKNGYAGYIDGGASQEEFYKFIKPILEKMDGTEELLVKLNREDLLRKQRTFDNGSIPHQIHLGELHAILRRQEDFYPFLKDNREKIEKILTFRIPYYVGPLARGNSRFAWMTRKSEETITPWNFEEVVDKGASAQSFIERMTNFDKNLPNEKVLPKHSLLYEYFTVYNELTKVKYVTEGMRKPAFLSGEQKKAIVDLLFKTNRKVTVKQLKEDYFKKIECFDSVEISGVEDRFNASLGTYHDLLKIIKDKDFLDNEENEDILEDIVLTLTLFEDREMIEERLKTYAHLFDDKVMKQLKRRRYTGWGRLSRKLINGIRDKQSGKTILDFLKSDGFANRNFMQLIHDDSLTFKEDIQKAQVSGQGDSLHEHIANLAGSPAIKKGILQTVKVVDELVKVMGRHKPENIVIEMARENQTTQKGQKNSRERMKRIEEGIKELGSQILKEHPVENTQLQNEKLYLYYLQNGRDMYVDQELDINRLSDYDVDHIVPQSFLKDDSIDNKVLTRSDKARGKSDNVPSEEVVKKMKNYWRQLLNAKLITQRKFDNLTKAERGGLSELDKAGFIKRQLVETRQITKHVAQILDSRMNTKYDENDKLIREVKVITLKSKLVSDFRKDFQFYKVREINNYHHAHDAYLNAVVGTALIKKYPKLESEFVYGDYKVYDVRKMIAKSEQEIGKATAKYFFYSNIMNFFKTEITLANGEIRKRPLIETNGETGEIVWDKGRDFATVRKVLSMPQVNIVKKTEVQTGGFSKESILPKRNSDKLIARKKDWDPKKYGGFDSPTVAYSVLVVAKVEKGKSKKLKSVKELLGITIMERSSFEKNPIDFLEAKGYKEVKKDLIIKLPKYSLFELENGRKRMLASAGELQKGNELALPSKYVNFLYLASHYEKLKGSPEDNEQKQLFVEQHKHYLDEIIEQISEFSKRVILADANLDKVLSAYNKHRDKPIREQAENIIHLFTLTNLGAPAAFKYFDTTIDRKRYTSTKEVLDATLIHQSITGLYETRIDLSQLGGDGGEAAAKGSSGGGGGTAPLEEEYRLFLEAPIQNVTLLEQWKREIPKVWAEINPPGLASTQAPIHVQLLSTALPVRVRQYPITLEAKRSLRETIRKFRAAGILRPVHSPWNTPLLPVRKSGTSEYRMVQDLREVNKRVETIHPTVPNPYTLLSLLPPDRIWYSVLDLKDAFFCIPLAPESQLIFAFEWADAEEGESGQLTWTRLPQGFKNSPTLFNEALNRDLQGFRLDHPSVSLLQYVDDLLIAADTQAACLSATRDLLMTLAELGYRVSGKKAQLCQEEVTYLGFKIHKGSRSLSNSRTQAILQIPVPKTKRQVREFLGKIGYCRLFIPGFAELAQPLYAATRPGNDPLVWGEKEEEAFQSLKLALTQPPALALPSLDKPFQLFVEETSGAAKGVLTQALGPWKRPVAYLSKRLDPVAAGWPRCLRAIAAAALLTREASKLTFGQDIEITSSHNLESLLRSPPDKWLTNARITQYQVLLLDPPRVRFKQTAALNPATLLPETDDTLPIHHCLDTLDSLTSTRPDLTDQPLAQAEATLFTDGSSYIRDGKRYAGAAVVTLDSVIWAEPLPIGTSAQKAELIALTKALEWSKDKSVNIYTDSRYAFATLHVHGMIYRERGWLTAGGKAIKNAPEILALLTAVWLPKRVAVMHCKGHQKDDAPTSTGNRRADEVAREVAIRPLSTQATISAGKRTADGSEFEKRTADGSEFESPKKKAKVE

SEQ ID NO: 1420 - protein, 2096 aa, synthetic construct
MPAAKRVKLDGGDKKYSIGLDIGTNSVGWAVITDEYKVPSKKFKVLGNTDRHSIKKNLIGALLFDSGETAEATRLKRTARRRYTRRKNRICYLQEIFSNEMAKVDDSFFHRLEESFLVEEDKKHERHPIFGNIVDEVAYHEKYPTIYHLRKKLVDSTDKADLRLIYLALAHMIKFRGHFLIEGDLNPDNSDVDKLFIQLVQTYNQLFEENPINASGVDAKAILSARLSKSRRLENLIAQLPGEKKNGLFGNLIALSLGLTPNFKSNFDLAEDAKLQLSKDTYDDDLDNLLAQIGDQYADLFLAAKNLSDAILLSDILRVNTEITKAPLSASMIKRYDEHHQDLTLLKALVRQQLPEKYKEIFFDQSKNGYAGYIDGGASQEEFYKFIKPILEKMDGTEELLVKLNREDLLRKQRTFDNGSIPHQIHLGELHAILRRQEDFYPFLKDNREKIEKILTFRIPYYVGPLARGNSRFAWMTRKSEETITPWNFEEVVDKGASAQSFIERMTNFDKNLPNEKVLPKHSLLYEYFTVYNELTKVKYVTEGMRKPAFLSGEQKKAIVDLLFKTNRKVTVKQLKEDYFKKIECFDSVEISGVEDRFNASLGTYHDLLKIIKDKDFLDNEENEDILEDIVLTLTLFEDREMIEERLKTYAHLFDDKVMKQLKRRRYTGWGRLSRKLINGIRDKQSGKTILDFLKSDGFANRNFMQLIHDDSLTFKEDIQKAQVSGQGDSLHEHIANLAGSPAIKKGILQTVKVVDELVKVMGRHKPENIVIEMARENQTTQKGQKNSRERMKRIEEGIKELGSQILKEHPVENTQLQNEKLYLYYLQNGRDMYVDQELDINRLSDYDVDHIVPQSFLKDDSIDNKVLTRSDKARGKSDNVPSEEVVKKMKNYWRQLLNAKLITQRKFDNLTKAERGGLSELDKAGFIKRQLVETRQITKHVAQILDSRMNTKYDENDKLIREVKVITLKSKLVSDFRKDFQFYKVREINNYHHAHDAYLNAVVGTALIKKYPKLESEFVYGDYKVYDVRKMIAKSEQEIGKATAKYFFYSNIMNFFKTEITLANGEIRKRPLIETNGETGEIVWDKGRDFATVRKVLSMPQVNIVKKTEVQTGGFSKESILPKRNSDKLIARKKDWDPKKYGGFDSPTVAYSVLVVAKVEKGKSKKLKSVKELLGITIMERSSFEKNPIDFLEAKGYKEVKKDLIIKLPKYSLFELENGRKRMLASAGELQKGNELALPSKYVNFLYLASHYEKLKGSPEDNEQKQLFVEQHKHYLDEIIEQISEFSKRVILADANLDKVLSAYNKHRDKPIREQAENIIHLFTLTNLGAPAAFKYFDTTIDRKRYTSTKEVLDATLIHQSITGLYETRIDLSQLGGDGGGGGGSSGGSGGTAPLEEEYRLFLEAPIQNVTLLEQWKREIPKVWAEINPPGLASTQAPIHVQLLSTALPVRVRQYPITLEAKRSLRETIRKFRAAGILRPVHSPWNTPLLPVRKSGTSEYRMVQDLREVNKRVETIHPTVPNPYTLLSLLPPDRIWYSVLDLKDAFFCIPLAPESQLIFAFEWADAEEGESGQLTWTRLPQGFKNSPTLFNEALNRDLQGFRLDHPSVSLLQYVDDLLIAADTQAACLSATRDLLMTLAELGYRVSGKKAQLCQEEVTYLGFKIHKGSRSLSNSRTQAILQIPVPKTKRQVREFLGKIGYCRLFIPGFAELAQPLYAATRPGNDPLVWGEKEEEAFQSLKLALTQPPALALPSLDKPFQLFVEETSGAAKGVLTQALGPWKRPVAYLSKRLDPVAAGWPRCLRAIAAAALLTREASKLTFGQDIEITSSHNLESLLRSPPDKWLTNARITQYQVLLLDPPRVRFKQTAALNPATLLPETDDTLPIHHCLDTLDSLTSTRPDLTDQPLAQAEATLFTDGSSYIRDGKRYAGAAVVTLDSVIWAEPLPIGTSAQKAELIALTKALEWSKDKSVNIYTDSRYAFATLHVHGMIYRERGWLTAGGKAIKNAPEILALLTAVWLPKRVAVMHCKGHQKDDAPTSTGNRRADEVAREVAIRPLSTQATISAGKRTADGSEFEKRTADGSEFESPKKKAKVE

SEQ ID NO: 1421 - protein, 2100 aa, synthetic construct
MPAAKRVKLDGGDKKYSIGLDIGTNSVGWAVITDEYKVPSKKFKVLGNTDRHSIKKNLIGALLFDSGETAEATRLKRTARRRYTRRKNRICYLQEIFSNEMAKVDDSFFHRLEESFLVEEDKKHERHPIFGNIVDEVAYHEKYPTIYHLRKKLVDSTDKADLRLIYLALAHMIKFRGHFLIEGDLNPDNSDVDKLFIQLVQTYNQLFEENPINASGVDAKAILSARLSKSRRLENLIAQLPGEKKNGLFGNLIALSLGLTPNFKSNFDLAEDAKLQLSKDTYDDDLDNLLAQIGDQYADLFLAAKNLSDAILLSDILRVNTEITKAPLSASMIKRYDEHHQDLTLLKALVRQQLPEKYKEIFFDQSKNGYAGYIDGGASQEEFYKFIKPILEKMDGTEELLVKLNREDLLRKQRTFDNGSIPHQIHLGELHAILRRQEDFYPFLKDNREKIEKILTFRIPYYVGPLARGNSRFAWMTRKSEETITPWNFEEVVDKGASAQSFIERMTNFDKNLPNEKVLPKHSLLYEYFTVYNELTKVKYVTEGMRKPAFLSGEQKKAIVDLLFKTNRKVTVKQLKEDYFKKIECFDSVEISGVEDRFNASLGTYHDLLKIIKDKDFLDNEENEDILEDIVLTLTLFEDREMIEERLKTYAHLFDDKVMKQLKRRRYTGWGRLSRKLINGIRDKQSGKTILDFLKSDGFANRNFMQLIHDDSLTFKEDIQKAQVSGQGDSLHEHIANLAGSPAIKKGILQTVKVVDELVKVMGRHKPENIVIEMARENQTTQKGQKNSRERMKRIEEGIKELGSQILKEHPVENTQLQNEKLYLYYLQNGRDMYVDQELDINRLSDYDVDHIVPQSFLKDDSIDNKVLTRSDKARGKSDNVPSEEVVKKMKNYWRQLLNAKLITQRKFDNLTKAERGGLSELDKAGFIKRQLVETRQITKHVAQILDSRMNTKYDENDKLIREVKVITLKSKLVSDFRKDFQFYKVREINNYHHAHDAYLNAVVGTALIKKYPKLESEFVYGDYKVYDVRKMIAKSEQEIGKATAKYFFYSNIMNFFKTEITLANGEIRKRPLIETNGETGEIVWDKGRDFATVRKVLSMPQVNIVKKTEVQTGGFSKESILPKRNSDKLIARKKDWDPKKYGGFDSPTVAYSVLVVAKVEKGKSKKLKSVKELLGITIMERSSFEKNPIDFLEAKGYKEVKKDLIIKLPKYSLFELENGRKRMLASAGELQKGNELALPSKYVNFLYLASHYEKLKGSPEDNEQKQLFVEQHKHYLDEIIEQISEFSKRVILADANLDKVLSAYNKHRDKPIREQAENIIHLFTLTNLGAPAAFKYFDTTIDRKRYTSTKEVLDATLIHQSITGLYETRIDLSQLGGDGGPAPAPAPAPAPAPGGTAPLEEEYRLFLEAPIQNVTLLEQWKREIPKVWAEINPPGLASTQAPIHVQLLSTALPVRVRQYPITLEAKRSLRETIRKFRAAGILRPVHSPWNTPLLPVRKSGTSEYRMVQDLREVNKRVETIHPTVPNPYTLLSLLPPDRIWYSVLDLKDAFFCIPLAPESQLIFAFEWADAEEGESGQLTWTRLPQGFKNSPTLFNEALNRDLQGFRLDHPSVSLLQYVDDLLIAADTQAACLSATRDLLMTLAELGYRVSGKKAQLCQEEVTYLGFKIHKGSRSLSNSRTQAILQIPVPKTKRQVREFLGKIGYCRLFIPGFAELAQPLYAATRPGNDPLVWGEKEEEAFQSLKLALTQPPALALPSLDKPFQLFVEETSGAAKGVLTQALGPWKRPVAYLSKRLDPVAAGWPRCLRAIAAAALLTREASKLTFGQDIEITSSHNLESLLRSPPDKWLTNARITQYQVLLLDPPRVRFKQTAALNPATLLPETDDTLPIHHCLDTLDSLTSTRPDLTDQPLAQAEATLFTDGSSYIRDGKRYAGAAVVTLDSVIWAEPLPIGTSAQKAELIALTKALEWSKDKSVNIYTDSRYAFATLHVHGMIYRERGWLTAGGKAIKNAPEILALLTAVWLPKRVAVMHCKGHQKDDAPTSTGNRRADEVAREVAIRPLSTQATISAGKRTADGSEFEKRTADGSEFESPKKKAKVE

SEQ ID NO: 1422 - protein, 2095 aa, synthetic construct
MPAAKRVKLDGGDKKYSIGLDIGTNSVGWAVITDEYKVPSKKFKVLGNTDRHSIKKNLIGALLFDSGETAEATRLKRTARRRYTRRKNRICYLQEIFSNEMAKVDDSFFHRLEESFLVEEDKKHERHPIFGNIVDEVAYHEKYPTIYHLRKKLVDSTDKADLRLIYLALAHMIKFRGHFLIEGDLNPDNSDVDKLFIQLVQTYNQLFEENPINASGVDAKAILSARLSKSRRLENLIAQLPGEKKNGLFGNLIALSLGLTPNFKSNFDLAEDAKLQLSKDTYDDDLDNLLAQIGDQYADLFLAAKNLSDAILLSDILRVNTEITKAPLSASMIKRYDEHHQDLTLLKALVRQQLPEKYKEIFFDQSKNGYAGYIDGGASQEEFYKFIKPILEKMDGTEELLVKLNREDLLRKQRTFDNGSIPHQIHLGELHAILRRQEDFYPFLKDNREKIEKILTFRIPYYVGPLARGNSRFAWMTRKSEETITPWNFEEVVDKGASAQSFIERMTNFDKNLPNEKVLPKHSLLYEYFTVYNELTKVKYVTEGMRKPAFLSGEQKKAIVDLLFKTNRKVTVKQLKEDYFKKIECFDSVEISGVEDRFNASLGTYHDLLKIIKDKDFLDNEENEDILEDIVLTLTLFEDREMIEERLKTYAHLFDDKVMKQLKRRRYTGWGRLSRKLINGIRDKQSGKTILDFLKSDGFANRNFMQLIHDDSLTFKEDIQKAQVSGQGDSLHEHIANLAGSPAIKKGILQTVKVVDELVKVMGRHKPENIVIEMARENQTTQKGQKNSRERMKRIEEGIKELGSQILKEHPVENTQLQNEKLYLYYLQNGRDMYVDQELDINRLSDYDVDHIVPQSFLKDDSIDNKVLTRSDKARGKSDNVPSEEVVKKMKNYWRQLLNAKLITQRKFDNLTKAERGGLSELDKAGFIKRQLVETRQITKHVAQILDSRMNTKYDENDKLIREVKVITLKSKLVSDFRKDFQFYKVREINNYHHAHDAYLNAVVGTALIKKYPKLESEFVYGDYKVYDVRKMIAKSEQEIGKATAKYFFYSNIMNFFKTEITLANGEIRKRPLIETNGETGEIVWDKGRDFATVRKVLSMPQVNIVKKTEVQTGGFSKESILPKRNSDKLIARKKDWDPKKYGGFDSPTVAYSVLVVAKVEKGKSKKLKSVKELLGITIMERSSFEKNPIDFLEAKGYKEVKKDLIIKLPKYSLFELENGRKRMLASAGELQKGNELALPSKYVNFLYLASHYEKLKGSPEDNEQKQLFVEQHKHYLDEIIEQISEFSKRVILADANLDKVLSAYNKHRDKPIREQAENIIHLFTLTNLGAPAAFKYFDTTIDRKRYTSTKEVLDATLIHQSITGLYETRIDLSQLGGDGGEAAAKGGGGGTAPLEEEYRLFLEAPIQNVTLLEQWKREIPKVWAEINPPGLASTQAPIHVQLLSTALPVRVRQYPITLEAKRSLRETIRKFRAAGILRPVHSPWNTPLLPVRKSGTSEYRMVQDLREVNKRVETIHPTVPNPYTLLSLLPPDRIWYSVLDLKDAFFCIPLAPESQLIFAFEWADAEEGESGQLTWTRLPQGFKNSPTLFNEALNRDLQGFRLDHPSVSLLQYVDDLLIAADTQAACLSATRDLLMTLAELGYRVSGKKAQLCQEEVTYLGFKIHKGSRSLSNSRTQAILQIPVPKTKRQVREFLGKIGYCRLFIPGFAELAQPLYAATRPGNDPLVWGEKEEEAFQSLKLALTQPPALALPSLDKPFQLFVEETSGAAKGVLTQALGPWKRPVAYLSKRLDPVAAGWPRCLRAIAAAALLTREASKLTFGQDIEITSSHNLESLLRSPPDKWLTNARITQYQVLLLDPPRVRFKQTAALNPATLLPETDDTLPIHHCLDTLDSLTSTRPDLTDQPLAQAEATLFTDGSSYIRDGKRYAGAAVVTLDSVIWAEPLPIGTSAQKAELIALTKALEWSKDKSVNIYTDSRYAFATLHVHGMIYRERGWLTAGGKAIKNAPEILALLTAVWLPKRVAVMHCKGHQKDDAPTSTGNRRADEVAREVAIRPLSTQATISAGKRTADGSEFEKRTADGSEFESPKKKAKVE

SEQ ID NO: 1423 - protein, 2097 aa, synthetic construct
MPAAKRVKLDGGDKKYSIGLDIGTNSVGWAVITDEYKVPSKKFKVLGNTDRHSIKKNLIGALLFDSGETAEATRLKRTARRRYTRRKNRICYLQEIFSNEMAKVDDSFFHRLEESFLVEEDKKHERHPIFGNIVDEVAYHEKYPTIYHLRKKLVDSTDKADLRLIYLALAHMIKFRGHFLIEGDLNPDNSDVDKLFIQLVQTYNQLFEENPINASGVDAKAILSARLSKSRRLENLIAQLPGEKKNGLFGNLIALSLGLTPNFKSNFDLAEDAKLQLSKDTYDDDLDNLLAQIGDQYADLFLAAKNLSDAILLSDILRVNTEITKAPLSASMIKRYDEHHQDLTLLKALVRQQLPEKYKEIFFDQSKNGYAGYIDGGASQEEFYKFIKPILEKMDGTEELLVKLNREDLLRKQRTFDNGSIPHQIHLGELHAILRRQEDFYPFLKDNREKIEKILTFRIPYYVGPLARGNSRFAWMTRKSEETITPWNFEEVVDKGASAQSFIERMTNFDKNLPNEKVLPKHSLLYEYFTVYNELTKVKYVTEGMRKPAFLSGEQKKAIVDLLFKTNRKVTVKQLKEDYFKKIECFDSVEISGVEDRFNASLGTYHDLLKIIKDKDFLDNEENEDILEDIVLTLTLFEDREMIEERLKTYAHLFDDKVMKQLKRRRYTGWGRLSRKLINGIRDKQSGKTILDFLKSDGFANRNFMQLIHDDSLTFKEDIQKAQVSGQGDSLHEHIANLAGSPAIKKGILQTVKVVDELVKVMGRHKPENIVIEMARENQTTQKGQKNSRERMKRIEEGIKELGSQILKEHPVENTQLQNEKLYLYYLQNGRDMYVDQELDINRLSDYDVDHIVPQSFLKDDSIDNKVLTRSDKARGKSDNVPSEEVVKKMKNYWRQLLNAKLITQRKFDNLTKAERGGLSELDKAGFIKRQLVETRQITKHVAQILDSRMNTKYDENDKLIREVKVITLKSKLVSDFRKDFQFYKVREINNYHHAHDAYLNAVVGTALIKKYPKLESEFVYGDYKVYDVRKMIAKSEQEIGKATAKYFFYSNIMNFFKTEITLANGEIRKRPLIETNGETGEIVWDKGRDFATVRKVLSMPQVNIVKKTEVQTGGFSKESILPKRNSDKLIARKKDWDPKKYGGFDSPTVAYSVLVVAKVEKGKSKKLKSVKELLGITIMERSSFEKNPIDFLEAKGYKEVKKDLIIKLPKYSLFELENGRKRMLASAGELQKGNELALPSKYVNFLYLASHYEKLKGSPEDNEQKQLFVEQHKHYLDEIIEQISEFSKRVILADANLDKVLSAYNKHRDKPIREQAENIIHLFTLTNLGAPAAFKYFDTTIDRKRYTSTKEVLDATLIHQSITGLYETRIDLSQLGGDGGGGGGSGGGGSGGTAPLEEEYRLFLEAPIQNVTLLEQWKREIPKVWAEINPPGLASTQAPIHVQLLSTALPVRVRQYPITLEAKRSLRETIRKFRAAGILRPVHSPWNTPLLPVRKSGTSEYRMVQDLREVNKRVETIHPTVPNPYTLLSLLPPDRIWYSVLDLKDAFFCIPLAPESQLIFAFEWADAEEGESGQLTWTRLPQGFKNSPTLFNEALNRDLQGFRLDHPSVSLLQYVDDLLIAADTQAACLSATRDLLMTLAELGYRVSGKKAQLCQEEVTYLGFKIHKGSRSLSNSRTQAILQIPVPKTKRQVREFLGKIGYCRLFIPGFAELAQPLYAATRPGNDPLVWGEKEEEAFQSLKLALTQPPALALPSLDKPFQLFVEETSGAAKGVLTQALGPWKRPVAYLSKRLDPVAAGWPRCLRAIAAAALLTREASKLTFGQDIEITSSHNLESLLRSPPDKWLTNARITQYQVLLLDPPRVRFKQTAALNPATLLPETDDTLPIHHCLDTLDSLTSTRPDLTDQPLAQAEATLFTDGSSYIRDGKRYAGAAVVTLDSVIWAEPLPIGTSAQKAELIALTKALEWSKDKSVNIYTDSRYAFATLHVHGMIYRERGWLTAGGKAIKNAPEILALLTAVWLPKRVAVMHCKGHQKDDAPTSTGNRRADEVAREVAIRPLSTQATISAGKRTADGSEFEKRTADGSEFESPKKKAKVE

SEQ ID NO: 1424 - protein, 2098 aa, synthetic construct
MPAAKRVKLDGGDKKYSIGLDIGTNSVGWAVITDEYKVPSKKFKVLGNTDRHSIKKNLIGALLFDSGETAEATRLKRTARRRYTRRKNRICYLQEIFSNEMAKVDDSFFHRLEESFLVEEDKKHERHPIFGNIVDEVAYHEKYPTIYHLRKKLVDSTDKADLRLIYLALAHMIKFRGHFLIEGDLNPDNSDVDKLFIQLVQTYNQLFEENPINASGVDAKAILSARLSKSRRLENLIAQLPGEKKNGLFGNLIALSLGLTPNFKSNFDLAEDAKLQLSKDTYDDDLDNLLAQIGDQYADLFLAAKNLSDAILLSDILRVNTEITKAPLSASMIKRYDEHHQDLTLLKALVRQQLPEKYKEIFFDQSKNGYAGYIDGGASQEEFYKFIKPILEKMDGTEELLVKLNREDLLRKQRTFDNGSIPHQIHLGELHAILRRQEDFYPFLKDNREKIEKILTFRIPYYVGPLARGNSRFAWMTRKSEETITPWNFEEVVDKGASAQSFIERMTNFDKNLPNEKVLPKHSLLYEYFTVYNELTKVKYVTEGMRKPAFLSGEQKKAIVDLLFKTNRKVTVKQLKEDYFKKIECFDSVEISGVEDRFNASLGTYHDLLKIIKDKDFLDNEENEDILEDIVLTLTLFEDREMIEERLKTYAHLFDDKVMKQLKRRRYTGWGRLSRKLINGIRDKQSGKTILDFLKSDGFANRNFMQLIHDDSLTFKEDIQKAQVSGQGDSLHEHIANLAGSPAIKKGILQTVKVVDELVKVMGRHKPENIVIEMARENQTTQKGQKNSRERMKRIEEGIKELGSQILKEHPVENTQLQNEKLYLYYLQNGRDMYVDQELDINRLSDYDVDHIVPQSFLKDDSIDNKVLTRSDKARGKSDNVPSEEVVKKMKNYWRQLLNAKLITQRKFDNLTKAERGGLSELDKAGFIKRQLVETRQITKHVAQILDSRMNTKYDENDKLIREVKVITLKSKLVSDFRKDFQFYKVREINNYHHAHDAYLNAVVGTALIKKYPKLESEFVYGDYKVYDVRKMIAKSEQEIGKATAKYFFYSNIMNFFKTEITLANGEIRKRPLIETNGETGEIVWDKGRDFATVRKVLSMPQVNIVKKTEVQTGGFSKESILPKRNSDKLIARKKDWDPKKYGGFDSPTVAYSVLVVAKVEKGKSKKLKSVKELLGITIMERSSFEKNPIDFLEAKGYKEVKKDLIIKLPKYSLFELENGRKRMLASAGELQKGNELALPSKYVNFLYLASHYEKLKGSPEDNEQKQLFVEQHKHYLDEIIEQISEFSKRVILADANLDKVLSAYNKHRDKPIREQAENIIHLFTLTNLGAPAAFKYFDTTIDRKRYTSTKEVLDATLIHQSITGLYETRIDLSQLGGDGGGSSGGGEAAAKGGTAPLEEEYRLFLEAPIQNVTLLEQWKREIPKVWAEINPPGLASTQAPIHVQLLSTALPVRVRQYPITLEAKRSLRETIRKFRAAGILRPVHSPWNTPLLPVRKSGTSEYRMVQDLREVNKRVETIHPTVPNPYTLLSLLPPDRIWYSVLDLKDAFFCIPLAPESQLIFAFEWADAEEGESGQLTWTRLPQGFKNSPTLFNEALNRDLQGFRLDHPSVSLLQYVDDLLIAADTQAACLSATRDLLMTLAELGYRVSGKKAQLCQEEVTYLGFKIHKGSRSLSNSRTQAILQIPVPKTKRQVREFLGKIGYCRLFIPGFAELAQPLYAATRPGNDPLVWGEKEEEAFQSLKLALTQPPALALPSLDKPFQLFVEETSGAAKGVLTQALGPWKRPVAYLSKRLDPVAAGWPRCLRAIAAAALLTREASKLTFGQDIEITSSHNLESLLRSPPDKWLTNARITQYQVLLLDPPRVRFKQTAALNPATLLPETDDTLPIHHCLDTLDSLTSTRPDLTDQPLAQAEATLFTDGSSYIRDGKRYAGAAVVTLDSVIWAEPLPIGTSAQKAELIALTKALEWSKDKSVNIYTDSRYAFATLHVHGMIYRERGWLTAGGKAIKNAPEILALLTAVWLPKRVAVMHCKGHQKDDAPTSTGNRRADEVAREVAIRPLSTQATISAGKRTADGSEFEKRTADGSEFESPKKKAKVE

SEQ ID NO: 1425 - protein, 2098 aa, synthetic construct
MPAAKRVKLDGGDKKYSIGLDIGTNSVGWAVITDEYKVPSKKFKVLGNTDRHSIKKNLIGALLFDSGETAEATRLKRTARRRYTRRKNRICYLQEIFSNEMAKVDDSFFHRLEESFLVEEDKKHERHPIFGNIVDEVAYHEKYPTIYHLRKKLVDSTDKADLRLIYLALAHMIKFRGHFLIEGDLNPDNSDVDKLFIQLVQTYNQLFEENPINASGVDAKAILSARLSKSRRLENLIAQLPGEKKNGLFGNLIALSLGLTPNFKSNFDLAEDAKLQLSKDTYDDDLDNLLAQIGDQYADLFLAAKNLSDAILLSDILRVNTEITKAPLSASMIKRYDEHHQDLTLLKALVRQQLPEKYKEIFFDQSKNGYAGYIDGGASQEEFYKFIKPILEKMDGTEELLVKLNREDLLRKQRTFDNGSIPHQIHLGELHAILRRQEDFYPFLKDNREKIEKILTFRIPYYVGPLARGNSRFAWMTRKSEETITPWNFEEVVDKGASAQSFIERMTNFDKNLPNEKVLPKHSLLYEYFTVYNELTKVKYVTEGMRKPAFLSGEQKKAIVDLLFKTNRKVTVKQLKEDYFKKIECFDSVEISGVEDRFNASLGTYHDLLKIIKDKDFLDNEENEDILEDIVLTLTLFEDREMIEERLKTYAHLFDDKVMKQLKRRRYTGWGRLSRKLINGIRDKQSGKTILDFLKSDGFANRNFMQLIHDDSLTFKEDIQKAQVSGQGDSLHEHIANLAGSPAIKKGILQTVKVVDELVKVMGRHKPENIVIEMARENQTTQKGQKNSRERMKRIEEGIKELGSQILKEHPVENTQLQNEKLYLYYLQNGRDMYVDQELDINRLSDYDVDHIVPQSFLKDDSIDNKVLTRSDKARGKSDNVPSEEVVKKMKNYWRQLLNAKLITQRKFDNLTKAERGGLSELDKAGFIKRQLVETRQITKHVAQILDSRMNTKYDENDKLIREVKVITLKSKLVSDFRKDFQFYKVREINNYHHAHDAYLNAVVGTALIKKYPKLESEFVYGDYKVYDVRKMIAKSEQEIGKATAKYFFYSNIMNFFKTEITLANGEIRKRPLIETNGETGEIVWDKGRDFATVRKVLSMPQVNIVKKTEVQTGGFSKESILPKRNSDKLIARKKDWDPKKYGGFDSPTVAYSVLVVAKVEKGKSKKLKSVKELLGITIMERSSFEKNPIDFLEAKGYKEVKKDLIIKLPKYSLFELENGRKRMLASAGELQKGNELALPSKYVNFLYLASHYEKLKGSPEDNEQKQLFVEQHKHYLDEIIEQISEFSKRVILADANLDKVLSAYNKHRDKPIREQAENIIHLFTLTNLGAPAAFKYFDTTIDRKRYTSTKEVLDATLIHQSITGLYETRIDLSQLGGDGGGGSEAAAKGGGGGTAPLEEEYRLFLEAPIQNVTLLEQWKREIPKVWAEINPPGLASTQAPIHVQLLSTALPVRVRQYPITLEAKRSLRETIRKFRAAGILRPVHSPWNTPLLPVRKSGTSEYRMVQDLREVNKRVETIHPTVPNPYTLLSLLPPDRIWYSVLDLKDAFFCIPLAPESQLIFAFEWADAEEGESGQLTWTRLPQGFKNSPTLFNEALNRDLQGFRLDHPSVSLLQYVDDLLIAADTQAACLSATRDLLMTLAELGYRVSGKKAQLCQEEVTYLGFKIHKGSRSLSNSRTQAILQIPVPKTKRQVREFLGKIGYCRLFIPGFAELAQPLYAATRPGNDPLVWGEKEEEAFQSLKLALTQPPALALPSLDKPFQLFVEETSGAAKGVLTQALGPWKRPVAYLSKRLDPVAAGWPRCLRAIAAAALLTREASKLTFGQDIEITSSHNLESLLRSPPDKWLTNARITQYQVLLLDPPRVRFKQTAALNPATLLPETDDTLPIHHCLDTLDSLTSTRPDLTDQPLAQAEATLFTDGSSYIRDGKRYAGAAVVTLDSVIWAEPLPIGTSAQKAELIALTKALEWSKDKSVNIYTDSRYAFATLHVHGMIYRERGWLTAGGKAIKNAPEILALLTAVWLPKRVAVMHCKGHQKDDAPTSTGNRRADEVAREVAIRPLSTQATISAGKRTADGSEFEKRTADGSEFESPKKKAKVE

SEQ ID NO: 1426 - protein, 2117 aa, synthetic construct
MPAAKRVKLDGGDKKYSIGLDIGTNSVGWAVITDEYKVPSKKFKVLGNTDRHSIKKNLIGALLFDSGETAEATRLKRTARRRYTRRKNRICYLQEIFSNEMAKVDDSFFHRLEESFLVEEDKKHERHPIFGNIVDEVAYHEKYPTIYHLRKKLVDSTDKADLRLIYLALAHMIKFRGHFLIEGDLNPDNSDVDKLFIQLVQTYNQLFEENPINASGVDAKAILSARLSKSRRLENLIAQLPGEKKNGLFGNLIALSLGLTPNFKSNFDLAEDAKLQLSKDTYDDDLDNLLAQIGDQYADLFLAAKNLSDAILLSDILRVNTEITKAPLSASMIKRYDEHHQDLTLLKALVRQQLPEKYKEIFFDQSKNGYAGYIDGGASQEEFYKFIKPILEKMDGTEELLVKLNREDLLRKQRTFDNGSIPHQIHLGELHAILRRQEDFYPFLKDNREKIEKILTFRIPYYVGPLARGNSRFAWMTRKSEETITPWNFEEVVDKGASAQSFIERMTNFDKNLPNEKVLPKHSLLYEYFTVYNELTKVKYVTEGMRKPAFLSGEQKKAIVDLLFKTNRKVTVKQLKEDYFKKIECFDSVEISGVEDRFNASLGTYHDLLKIIKDKDFLDNEENEDILEDIVLTLTLFEDREMIEERLKTYAHLFDDKVMKQLKRRRYTGWGRLSRKLINGIRDKQSGKTILDFLKSDGFANRNFMQLIHDDSLTFKEDIQKAQVSGQGDSLHEHIANLAGSPAIKKGILQTVKVVDELVKVMGRHKPENIVIEMARENQTTQKGQKNSRERMKRIEEGIKELGSQILKEHPVENTQLQNEKLYLYYLQNGRDMYVDQELDINRLSDYDVDHIVPQSFLKDDSIDNKVLTRSDKARGKSDNVPSEEVVKKMKNYWRQLLNAKLITQRKFDNLTKAERGGLSELDKAGFIKRQLVETRQITKHVAQILDSRMNTKYDENDKLIREVKVITLKSKLVSDFRKDFQFYKVREINNYHHAHDAYLNAVVGTALIKKYPKLESEFVYGDYKVYDVRKMIAKSEQEIGKATAKYFFYSNIMNFFKTEITLANGEIRKRPLIETNGETGEIVWDKGRDFATVRKVLSMPQVNIVKKTEVQTGGFSKESILPKRNSDKLIARKKDWDPKKYGGFDSPTVAYSVLVVAKVEKGKSKKLKSVKELLGITIMERSSFEKNPIDFLEAKGYKEVKKDLIIKLPKYSLFELENGRKRMLASAGELQKGNELALPSKYVNFLYLASHYEKLKGSPEDNEQKQLFVEQHKHYLDEIIEQISEFSKRVILADANLDKVLSAYNKHRDKPIREQAENIIHLFTLTNLGAPAAFKYFDTTIDRKRYTSTKEVLDATLIHQSITGLYETRIDLSQLGGDGGEAAAKEAAAKEAAAKEAAAKEAAAKEAAAKGGTAPLEEEYRLFLEAPIQNVTLLEQWKREIPKVWAEINPPGLASTQAPIHVQLLSTALPVRVRQYPITLEAKRSLRETIRKFRAAGILRPVHSPWNTPLLPVRKSGTSEYRMVQDLREVNKRVETIHPTVPNPYTLLSLLPPDRIWYSVLDLKDAFFCIPLAPESQLIFAFEWADAEEGESGQLTWTRLPQGFKNSPTLFNEALNRDLQGFRLDHPSVSLLQYVDDLLIAADTQAACLSATRDLLMTLAELGYRVSGKKAQLCQEEVTYLGFKIHKGSRSLSNSRTQAILQIPVPKTKRQVREFLGKIGYCRLFIPGFAELAQPLYAATRPGNDPLVWGEKEEEAFQSLKLALTQPPALALPSLDKPFQLFVEETSGAAKGVLTQALGPWKRPVAYLSKRLDPVAAGWPRCLRAIAAAALLTREASKLTFGQDIEITSSHNLESLLRSPPDKWLTNARITQYQVLLLDPPRVRFKQTAALNPATLLPETDDTLPIHHCLDTLDSLTSTRPDLTDQPLAQAEATLFTDGSSYIRDGKRYAGAAVVTLDSVIWAEPLPIGTSAQKAELIALTKALEWSKDKSVNIYTDSRYAFATLHVHGMIYRERGWLTAGGKAIKNAPEILALLTAVWLPKRVAVMHCKGHQKDDAPTSTGNRRADEVAREVAIRPLSTQATISAGKRTADGSEFEKRTADGSEFESPKKKAKVE

SEQ ID NO: 1427 - protein, 2098 aa, synthetic construct
MPAAKRVKLDGGDKKYSIGLDIGTNSVGWAVITDEYKVPSKKFKVLGNTDRHSIKKNLIGALLFDSGETAEATRLKRTARRRYTRRKNRICYLQEIFSNEMAKVDDSFFHRLEESFLVEEDKKHERHPIFGNIVDEVAYHEKYPTIYHLRKKLVDSTDKADLRLIYLALAHMIKFRGHFLIEGDLNPDNSDVDKLFIQLVQTYNQLFEENPINASGVDAKAILSARLSKSRRLENLIAQLPGEKKNGLFGNLIALSLGLTPNFKSNFDLAEDAKLQLSKDTYDDDLDNLLAQIGDQYADLFLAAKNLSDAILLSDILRVNTEITKAPLSASMIKRYDEHHQDLTLLKALVRQQLPEKYKEIFFDQSKNGYAGYIDGGASQEEFYKFIKPILEKMDGTEELLVKLNREDLLRKQRTFDNGSIPHQIHLGELHAILRRQEDFYPFLKDNREKIEKILTFRIPYYVGPLARGNSRFAWMTRKSEETITPWNFEEVVDKGASAQSFIERMTNFDKNLPNEKVLPKHSLLYEYFTVYNELTKVKYVTEGMRKPAFLSGEQKKAIVDLLFKTNRKVTVKQLKEDYFKKIECFDSVEISGVEDRFNASLGTYHDLLKIIKDKDFLDNEENEDILEDIVLTLTLFEDREMIEERLKTYAHLFDDKVMKQLKRRRYTGWGRLSRKLINGIRDKQSGKTILDFLKSDGFANRNFMQLIHDDSLTFKEDIQKAQVSGQGDSLHEHIANLAGSPAIKKGILQTVKVVDELVKVMGRHKPENIVIEMARENQTTQKGQKNSRERMKRIEEGIKELGSQILKEHPVENTQLQNEKLYLYYLQNGRDMYVDQELDINRLSDYDVDHIVPQSFLKDDSIDNKVLTRSDKARGKSDNVPSEEVVKKMKNYWRQLLNAKLITQRKFDNLTKAERGGLSELDKAGFIKRQLVETRQITKHVAQILDSRMNTKYDENDKLIREVKVITLKSKLVSDFRKDFQFYKVREINNYHHAHDAYLNAVVGTALIKKYPKLESEFVYGDYKVYDVRKMIAKSEQEIGKATAKYFFYSNIMNFFKTEITLANGEIRKRPLIETNGETGEIVWDKGRDFATVRKVLSMPQVNIVKKTEVQTGGFSKESILPKRNSDKLIARKKDWDPKKYGGFDSPTVAYSVLVVAKVEKGKSKKLKSVKELLGITIMERSSFEKNPIDFLEAKGYKEVKKDLIIKLPKYSLFELENGRKRMLASAGELQKGNELALPSKYVNFLYLASHYEKLKGSPEDNEQKQLFVEQHKHYLDEIIEQISEFSKRVILADANLDKVLSAYNKHRDKPIREQAENIIHLFTLTNLGAPAAFKYFDTTIDRKRYTSTKEVLDATLIHQSITGLYETRIDLSQLGGDGGGGGGGSEAAAKGGTAPLEEEYRLFLEAPIQNVTLLEQWKREIPKVWAEINPPGLASTQAPIHVQLLSTALPVRVRQYPITLEAKRSLRETIRKFRAAGILRPVHSPWNTPLLPVRKSGTSEYRMVQDLREVNKRVETIHPTVPNPYTLLSLLPPDRIWYSVLDLKDAFFCIPLAPESQLIFAFEWADAEEGESGQLTWTRLPQGFKNSPTLFNEALNRDLQGFRLDHPSVSLLQYVDDLLIAADTQAACLSATRDLLMTLAELGYRVSGKKAQLCQEEVTYLGFKIHKGSRSLSNSRTQAILQIPVPKTKRQVREFLGKIGYCRLFIPGFAELAQPLYAATRPGNDPLVWGEKEEEAFQSLKLALTQPPALALPSLDKPFQLFVEETSGAAKGVLTQALGPWKRPVAYLSKRLDPVAAGWPRCLRAIAAAALLTREASKLTFGQDIEITSSHNLESLLRSPPDKWLTNARITQYQVLLLDPPRVRFKQTAALNPATLLPETDDTLPIHHCLDTLDSLTSTRPDLTDQPLAQAEATLFTDGSSYIRDGKRYAGAAVVTLDSVIWAEPLPIGTSAQKAELIALTKALEWSKDKSVNIYTDSRYAFATLHVHGMIYRERGWLTAGGKAIKNAPEILALLTAVWLPKRVAVMHCKGHQKDDAPTSTGNRRADEVAREVAIRPLSTQATISAGKRTADGSEFEKRTADGSEFESPKKKAKVE

SEQ ID NO: 1428 - protein, 2095 aa, synthetic construct
MPAAKRVKLDGGDKKYSIGLDIGTNSVGWAVITDEYKVPSKKFKVLGNTDRHSIKKNLIGALLFDSGETAEATRLKRTARRRYTRRKNRICYLQEIFSNEMAKVDDSFFHRLEESFLVEEDKKHERHPIFGNIVDEVAYHEKYPTIYHLRKKLVDSTDKADLRLIYLALAHMIKFRGHFLIEGDLNPDNSDVDKLFIQLVQTYNQLFEENPINASGVDAKAILSARLSKSRRLENLIAQLPGEKKNGLFGNLIALSLGLTPNFKSNFDLAEDAKLQLSKDTYDDDLDNLLAQIGDQYADLFLAAKNLSDAILLSDILRVNTEITKAPLSASMIKRYDEHHQDLTLLKALVRQQLPEKYKEIFFDQSKNGYAGYIDGGASQEEFYKFIKPILEKMDGTEELLVKLNREDLLRKQRTFDNGSIPHQIHLGELHAILRRQEDFYPFLKDNREKIEKILTFRIPYYVGPLARGNSRFAWMTRKSEETITPWNFEEVVDKGASAQSFIERMTNFDKNLPNEKVLPKHSLLYEYFTVYNELTKVKYVTEGMRKPAFLSGEQKKAIVDLLFKTNRKVTVKQLKEDYFKKIECFDSVEISGVEDRFNASLGTYHDLLKIIKDKDFLDNEENEDILEDIVLTLTLFEDREMIEERLKTYAHLFDDKVMKQLKRRRYTGWGRLSRKLINGIRDKQSGKTILDFLKSDGFANRNFMQLIHDDSLTFKEDIQKAQVSGQGDSLHEHIANLAGSPAIKKGILQTVKVVDELVKVMGRHKPENIVIEMARENQTTQKGQKNSRERMKRIEEGIKELGSQILKEHPVENTQLQNEKLYLYYLQNGRDMYVDQELDINRLSDYDVDHIVPQSFLKDDSIDNKVLTRSDKARGKSDNVPSEEVVKKMKNYWRQLLNAKLITQRKFDNLTKAERGGLSELDKAGFIKRQLVETRQITKHVAQILDSRMNTKYDENDKLIREVKVITLKSKLVSDFRKDFQFYKVREINNYHHAHDAYLNAVVGTALIKKYPKLESEFVYGDYKVYDVRKMIAKSEQEIGKATAKYFFYSNIMNFFKTEITLANGEIRKRPLIETNGETGEIVWDKGRDFATVRKVLSMPQVNIVKKTEVQTGGFSKESILPKRNSDKLIARKKDWDPKKYGGFDSPTVAYSVLVVAKVEKGKSKKLKSVKELLGITIMERSSFEKNPIDFLEAKGYKEVKKDLIIKLPKYSLFELENGRKRMLASAGELQKGNELALPSKYVNFLYLASHYEKLKGSPEDNEQKQLFVEQHKHYLDEIIEQISEFSKRVILADANLDKVLSAYNKHRDKPIREQAENIIHLFTLTNLGAPAAFKYFDTTIDRKRYTSTKEVLDATLIHQSITGLYETRIDLSQLGGDGGEAAAKGGSGGTAPLEEEYRLFLEAPIQNVTLLEQWKREIPKVWAEINPPGLASTQAPIHVQLLSTALPVRVRQYPITLEAKRSLRETIRKFRAAGILRPVHSPWNTPLLPVRKSGTSEYRMVQDLREVNKRVETIHPTVPNPYTLLSLLPPDRIWYSVLDLKDAFFCIPLAPESQLIFAFEWADAEEGESGQLTWTRLPQGFKNSPTLFNEALNRDLQGFRLDHPSVSLLQYVDDLLIAADTQAACLSATRDLLMTLAELGYRVSGKKAQLCQEEVTYLGFKIHKGSRSLSNSRTQAILQIPVPKTKRQVREFLGKIGYCRLFIPGFAELAQPLYAATRPGNDPLVWGEKEEEAFQSLKLALTQPPALALPSLDKPFQLFVEETSGAAKGVLTQALGPWKRPVAYLSKRLDPVAAGWPRCLRAIAAAALLTREASKLTFGQDIEITSSHNLESLLRSPPDKWLTNARITQYQVLLLDPPRVRFKQTAALNPATLLPETDDTLPIHHCLDTLDSLTSTRPDLTDQPLAQAEATLFTDGSSYIRDGKRYAGAAVVTLDSVIWAEPLPIGTSAQKAELIALTKALEWSKDKSVNIYTDSRYAFATLHVHGMIYRERGWLTAGGKAIKNAPEILALLTAVWLPKRVAVMHCKGHQKDDAPTSTGNRRADEVAREVAIRPLSTQATISAGKRTADGSEFEKRTADGSEFESPKKKAKVE

SEQ ID NO: 1429 - protein, 2096 aa, synthetic construct
MPAAKRVKLDGGDKKYSIGLDIGTNSVGWAVITDEYKVPSKKFKVLGNTDRHSIKKNLIGALLFDSGETAEATRLKRTARRRYTRRKNRICYLQEIFSNEMAKVDDSFFHRLEESFLVEEDKKHERHPIFGNIVDEVAYHEKYPTIYHLRKKLVDSTDKADLRLIYLALAHMIKFRGHFLIEGDLNPDNSDVDKLFIQLVQTYNQLFEENPINASGVDAKAILSARLSKSRRLENLIAQLPGEKKNGLFGNLIALSLGLTPNFKSNFDLAEDAKLQLSKDTYDDDLDNLLAQIGDQYADLFLAAKNLSDAILLSDILRVNTEITKAPLSASMIKRYDEHHQDLTLLKALVRQQLPEKYKEIFFDQSKNGYAGYIDGGASQEEFYKFIKPILEKMDGTEELLVKLNREDLLRKQRTFDNGSIPHQIHLGELHAILRRQEDFYPFLKDNREKIEKILTFRIPYYVGPLARGNSRFAWMTRKSEETITPWNFEEVVDKGASAQSFIERMTNFDKNLPNEKVLPKHSLLYEYFTVYNELTKVKYVTEGMRKPAFLSGEQKKAIVDLLFKTNRKVTVKQLKEDYFKKIECFDSVEISGVEDRFNASLGTYHDLLKIIKDKDFLDNEENEDILEDIVLTLTLFEDREMIEERLKTYAHLFDDKVMKQLKRRRYTGWGRLSRKLINGIRDKQSGKTILDFLKSDGFANRNFMQLIHDDSLTFKEDIQKAQVSGQGDSLHEHIANLAGSPAIKKGILQTVKVVDELVKVMGRHKPENIVIEMARENQTTQKGQKNSRERMKRIEEGIKELGSQILKEHPVENTQLQNEKLYLYYLQNGRDMYVDQELDINRLSDYDVDHIVPQSFLKDDSIDNKVLTRSDKARGKSDNVPSEEVVKKMKNYWRQLLNAKLITQRKFDNLTKAERGGLSELDKAGFIKRQLVETRQITKHVAQILDSRMNTKYDENDKLIREVKVITLKSKLVSDFRKDFQFYKVREINNYHHAHDAYLNAVVGTALIKKYPKLESEFVYGDYKVYDVRKMIAKSEQEIGKATAKYFFYSNIMNFFKTEITLANGEIRKRPLIETNGETGEIVWDKGRDFATVRKVLSMPQVNIVKKTEVQTGGFSKESILPKRNSDKLIARKKDWDPKKYGGFDSPTVAYSVLVVAKVEKGKSKKLKSVKELLGITIMERSSFEKNPIDFLEAKGYKEVKKDLIIKLPKYSLFELENGRKRMLASAGELQKGNELALPSKYVNFLYLASHYEKLKGSPEDNEQKQLFVEQHKHYLDEIIEQISEFSKRVILADANLDKVLSAYNKHRDKPIREQAENIIHLFTLTNLGAPAAFKYFDTTIDRKRYTSTKEVLDATLIHQSITGLYETRIDLSQLGGDGGPAPAPAPAPGGTAPLEEEYRLFLEAPIQNVTLLEQWKREIPKVWAEINPPGLASTQAPIHVQLLSTALPVRVRQYPITLEAKRSLRETIRKFRAAGILRPVHSPWNTPLLPVRKSGTSEYRMVQDLREVNKRVETIHPTVPNPYTLLSLLPPDRIWYSVLDLKDAFFCIPLAPESQLIFAFEWADAEEGESGQLTWTRLPQGFKNSPTLFNEALNRDLQGFRLDHPSVSLLQYVDDLLIAADTQAACLSATRDLLMTLAELGYRVSGKKAQLCQEEVTYLGFKIHKGSRSLSNSRTQAILQIPVPKTKRQVREFLGKIGYCRLFIPGFAELAQPLYAATRPGNDPLVWGEKEEEAFQSLKLALTQPPALALPSLDKPFQLFVEETSGAAKGVLTQALGPWKRPVAYLSKRLDPVAAGWPRCLRAIAAAALLTREASKLTFGQDIEITSSHNLESLLRSPPDKWLTNARITQYQVLLLDPPRVRFKQTAALNPATLLPETDDTLPIHHCLDTLDSLTSTRPDLTDQPLAQAEATLFTDGSSYIRDGKRYAGAAVVTLDSVIWAEPLPIGTSAQKAELIALTKALEWSKDKSVNIYTDSRYAFATLHVHGMIYRERGWLTAGGKAIKNAPEILALLTAVWLPKRVAVMHCKGHQKDDAPTSTGNRRADEVAREVAIRPLSTQATISAGKRTADGSEFEKRTADGSEFESPKKKAKVE

SEQ ID NO: 1430 - protein, 2093 aa, synthetic construct
MPAAKRVKLDGGDKKYSIGLDIGTNSVGWAVITDEYKVPSKKFKVLGNTDRHSIKKNLIGALLFDSGETAEATRLKRTARRRYTRRKNRICYLQEIFSNEMAKVDDSFFHRLEESFLVEEDKKHERHPIFGNIVDEVAYHEKYPTIYHLRKKLVDSTDKADLRLIYLALAHMIKFRGHFLIEGDLNPDNSDVDKLFIQLVQTYNQLFEENPINASGVDAKAILSARLSKSRRLENLIAQLPGEKKNGLFGNLIALSLGLTPNFKSNFDLAEDAKLQLSKDTYDDDLDNLLAQIGDQYADLFLAAKNLSDAILLSDILRVNTEITKAPLSASMIKRYDEHHQDLTLLKALVRQQLPEKYKEIFFDQSKNGYAGYIDGGASQEEFYKFIKPILEKMDGTEELLVKLNREDLLRKQRTFDNGSIPHQIHLGELHAILRRQEDFYPFLKDNREKIEKILTFRIPYYVGPLARGNSRFAWMTRKSEETITPWNFEEVVDKGASAQSFIERMTNFDKNLPNEKVLPKHSLLYEYFTVYNELTKVKYVTEGMRKPAFLSGEQKKAIVDLLFKTNRKVTVKQLKEDYFKKIECFDSVEISGVEDRFNASLGTYHDLLKIIKDKDFLDNEENEDILEDIVLTLTLFEDREMIEERLKTYAHLFDDKVMKQLKRRRYTGWGRLSRKLINGIRDKQSGKTILDFLKSDGFANRNFMQLIHDDSLTFKEDIQKAQVSGQGDSLHEHIANLAGSPAIKKGILQTVKVVDELVKVMGRHKPENIVIEMARENQTTQKGQKNSRERMKRIEEGIKELGSQILKEHPVENTQLQNEKLYLYYLQNGRDMYVDQELDINRLSDYDVDHIVPQSFLKDDSIDNKVLTRSDKARGKSDNVPSEEVVKKMKNYWRQLLNAKLITQRKFDNLTKAERGGLSELDKAGFIKRQLVETRQITKHVAQILDSRMNTKYDENDKLIREVKVITLKSKLVSDFRKDFQFYKVREINNYHHAHDAYLNAVVGTALIKKYPKLESEFVYGDYKVYDVRKMIAKSEQEIGKATAKYFFYSNIMNFFKTEITLANGEIRKRPLIETNGETGEIVWDKGRDFATVRKVLSMPQVNIVKKTEVQTGGFSKESILPKRNSDKLIARKKDWDPKKYGGFDSPTVAYSVLVVAKVEKGKSKKLKSVKELLGITIMERSSFEKNPIDFLEAKGYKEVKKDLIIKLPKYSLFELENGRKRMLASAGELQKGNELALPSKYVNFLYLASHYEKLKGSPEDNEQKQLFVEQHKHYLDEIIEQISEFSKRVILADANLDKVLSAYNKHRDKPIREQAENIIHLFTLTNLGAPAAFKYFDTTIDRKRYTSTKEVLDATLIHQSITGLYETRIDLSQLGGDGGGSSGGGGGTAPLEEEYRLFLEAPIQNVTLLEQWKREIPKVWAEINPPGLASTQAPIHVQLLSTALPVRVRQYPITLEAKRSLRETIRKFRAAGILRPVHSPWNTPLLPVRKSGTSEYRMVQDLREVNKRVETIHPTVPNPYTLLSLLPPDRIWYSVLDLKDAFFCIPLAPESQLIFAFEWADAEEGESGQLTWTRLPQGFKNSPTLFNEALNRDLQGFRLDHPSVSLLQYVDDLLIAADTQAACLSATRDLLMTLAELGYRVSGKKAQLCQEEVTYLGFKIHKGSRSLSNSRTQAILQIPVPKTKRQVREFLGKIGYCRLFIPGFAELAQPLYAATRPGNDPLVWGEKEEEAFQSLKLALTQPPALALPSLDKPFQLFVEETSGAAKGVLTQALGPWKRPVAYLSKRLDPVAAGWPRCLRAIAAAALLTREASKLTFGQDIEITSSHNLESLLRSPPDKWLTNARITQYQVLLLDPPRVRFKQTAALNPATLLPETDDTLPIHHCLDTLDSLTSTRPDLTDQPLAQAEATLFTDGSSYIRDGKRYAGAAVVTLDSVIWAEPLPIGTSAQKAELIALTKALEWSKDKSVNIYTDSRYAFATLHVHGMIYRERGWLTAGGKAIKNAPEILALLTAVWLPKRVAVMHCKGHQKDDAPTSTGNRRADEVAREVAIRPLSTQATISAGKRTADGSEFEKRTADGSEFESPKKKAKVE

SEQ ID NO: 1431 - protein, 2098 aa, synthetic construct
MPAAKRVKLDGGDKKYSIGLDIGTNSVGWAVITDEYKVPSKKFKVLGNTDRHSIKKNLIGALLFDSGETAEATRLKRTARRRYTRRKNRICYLQEIFSNEMAKVDDSFFHRLEESFLVEEDKKHERHPIFGNIVDEVAYHEKYPTIYHLRKKLVDSTDKADLRLIYLALAHMIKFRGHFLIEGDLNPDNSDVDKLFIQLVQTYNQLFEENPINASGVDAKAILSARLSKSRRLENLIAQLPGEKKNGLFGNLIALSLGLTPNFKSNFDLAEDAKLQLSKDTYDDDLDNLLAQIGDQYADLFLAAKNLSDAILLSDILRVNTEITKAPLSASMIKRYDEHHQDLTLLKALVRQQLPEKYKEIFFDQSKNGYAGYIDGGASQEEFYKFIKPILEKMDGTEELLVKLNREDLLRKQRTFDNGSIPHQIHLGELHAILRRQEDFYPFLKDNREKIEKILTFRIPYYVGPLARGNSRFAWMTRKSEETITPWNFEEVVDKGASAQSFIERMTNFDKNLPNEKVLPKHSLLYEYFTVYNELTKVKYVTEGMRKPAFLSGEQKKAIVDLLFKTNRKVTVKQLKEDYFKKIECFDSVEISGVEDRFNASLGTYHDLLKIIKDKDFLDNEENEDILEDIVLTLTLFEDREMIEERLKTYAHLFDDKVMKQLKRRRYTGWGRLSRKLINGIRDKQSGKTILDFLKSDGFANRNFMQLIHDDSLTFKEDIQKAQVSGQGDSLHEHIANLAGSPAIKKGILQTVKVVDELVKVMGRHKPENIVIEMARENQTTQKGQKNSRERMKRIEEGIKELGSQILKEHPVENTQLQNEKLYLYYLQNGRDMYVDQELDINRLSDYDVDHIVPQSFLKDDSIDNKVLTRSDKARGKSDNVPSEEVVKKMKNYWRQLLNAKLITQRKFDNLTKAERGGLSELDKAGFIKRQLVETRQITKHVAQILDSRMNTKYDENDKLIREVKVITLKSKLVSDFRKDFQFYKVREINNYHHAHDAYLNAVVGTALIKKYPKLESEFVYGDYKVYDVRKMIAKSEQEIGKATAKYFFYSNIMNFFKTEITLANGEIRKRPLIETNGETGEIVWDKGRDFATVRKVLSMPQVNIVKKTEVQTGGFSKESILPKRNSDKLIARKKDWDPKKYGGFDSPTVAYSVLVVAKVEKGKSKKLKSVKELLGITIMERSSFEKNPIDFLEAKGYKEVKKDLIIKLPKYSLFELENGRKRMLASAGELQKGNELALPSKYVNFLYLASHYEKLKGSPEDNEQKQLFVEQHKHYLDEIIEQISEFSKRVILADANLDKVLSAYNKHRDKPIREQAENIIHLFTLTNLGAPAAFKYFDTTIDRKRYTSTKEVLDATLIHQSITGLYETRIDLSQLGGDGGEAAAKGGSPAPGGTAPLEEEYRLFLEAPIQNVTLLEQWKREIPKVWAEINPPGLASTQAPIHVQLLSTALPVRVRQYPITLEAKRSLRETIRKFRAAGILRPVHSPWNTPLLPVRKSGTSEYRMVQDLREVNKRVETIHPTVPNPYTLLSLLPPDRIWYSVLDLKDAFFCIPLAPESQLIFAFEWADAEEGESGQLTWTRLPQGFKNSPTLFNEALNRDLQGFRLDHPSVSLLQYVDDLLIAADTQAACLSATRDLLMTLAELGYRVSGKKAQLCQEEVTYLGFKIHKGSRSLSNSRTQAILQIPVPKTKRQVREFLGKIGYCRLFIPGFAELAQPLYAATRPGNDPLVWGEKEEEAFQSLKLALTQPPALALPSLDKPFQLFVEETSGAAKGVLTQALGPWKRPVAYLSKRLDPVAAGWPRCLRAIAAAALLTREASKLTFGQDIEITSSHNLESLLRSPPDKWLTNARITQYQVLLLDPPRVRFKQTAALNPATLLPETDDTLPIHHCLDTLDSLTSTRPDLTDQPLAQAEATLFTDGSSYIRDGKRYAGAAVVTLDSVIWAEPLPIGTSAQKAELIALTKALEWSKDKSVNIYTDSRYAFATLHVHGMIYRERGWLTAGGKAIKNAPEILALLTAVWLPKRVAVMHCKGHQKDDAPTSTGNRRADEVAREVAIRPLSTQATISAGKRTADGSEFEKRTADGSEFESPKKKAKVE

SEQ ID NO: 1432 - protein, 2096 aa, synthetic construct
MPAAKRVKLDGGDKKYSIGLDIGTNSVGWAVITDEYKVPSKKFKVLGNTDRHSIKKNLIGALLFDSGETAEATRLKRTARRRYTRRKNRICYLQEIFSNEMAKVDDSFFHRLEESFLVEEDKKHERHPIFGNIVDEVAYHEKYPTIYHLRKKLVDSTDKADLRLIYLALAHMIKFRGHFLIEGDLNPDNSDVDKLFIQLVQTYNQLFEENPINASGVDAKAILSARLSKSRRLENLIAQLPGEKKNGLFGNLIALSLGLTPNFKSNFDLAEDAKLQLSKDTYDDDLDNLLAQIGDQYADLFLAAKNLSDAILLSDILRVNTEITKAPLSASMIKRYDEHHQDLTLLKALVRQQLPEKYKEIFFDQSKNGYAGYIDGGASQEEFYKFIKPILEKMDGTEELLVKLNREDLLRKQRTFDNGSIPHQIHLGELHAILRRQEDFYPFLKDNREKIEKILTFRIPYYVGPLARGNSRFAWMTRKSEETITPWNFEEVVDKGASAQSFIERMTNFDKNLPNEKVLPKHSLLYEYFTVYNELTKVKYVTEGMRKPAFLSGEQKKAIVDLLFKTNRKVTVKQLKEDYFKKIECFDSVEISGVEDRFNASLGTYHDLLKIIKDKDFLDNEENEDILEDIVLTLTLFEDREMIEERLKTYAHLFDDKVMKQLKRRRYTGWGRLSRKLINGIRDKQSGKTILDFLKSDGFANRNFMQLIHDDSLTFKEDIQKAQVSGQGDSLHEHIANLAGSPAIKKGILQTVKVVDELVKVMGRHKPENIVIEMARENQTTQKGQKNSRERMKRIEEGIKELGSQILKEHPVENTQLQNEKLYLYYLQNGRDMYVDQELDINRLSDYDVDHIVPQSFLKDDSIDNKVLTRSDKARGKSDNVPSEEVVKKMKNYWRQLLNAKLITQRKFDNLTKAERGGLSELDKAGFIKRQLVETRQITKHVAQILDSRMNTKYDENDKLIREVKVITLKSKLVSDFRKDFQFYKVREINNYHHAHDAYLNAVVGTALIKKYPKLESEFVYGDYKVYDVRKMIAKSEQEIGKATAKYFFYSNIMNFFKTEITLANGEIRKRPLIETNGETGEIVWDKGRDFATVRKVLSMPQVNIVKKTEVQTGGFSKESILPKRNSDKLIARKKDWDPKKYGGFDSPTVAYSVLVVAKVEKGKSKKLKSVKELLGITIMERSSFEKNPIDFLEAKGYKEVKKDLIIKLPKYSLFELENGRKRMLASAGELQKGNELALPSKYVNFLYLASHYEKLKGSPEDNEQKQLFVEQHKHYLDEIIEQISEFSKRVILADANLDKVLSAYNKHRDKPIREQAENIIHLFTLTNLGAPAAFKYFDTTIDRKRYTSTKEVLDATLIHQSITGLYETRIDLSQLGGDGGGGGGGSPAPGGTAPLEEEYRLFLEAPIQNVTLLEQWKREIPKVWAEINPPGLASTQAPIHVQLLSTALPVRVRQYPITLEAKRSLRETIRKFRAAGILRPVHSPWNTPLLPVRKSGTSEYRMVQDLREVNKRVETIHPTVPNPYTLLSLLPPDRIWYSVLDLKDAFFCIPLAPESQLIFAFEWADAEEGESGQLTWTRLPQGFKNSPTLFNEALNRDLQGFRLDHPSVSLLQYVDDLLIAADTQAACLSATRDLLMTLAELGYRVSGKKAQLCQEEVTYLGFKIHKGSRSLSNSRTQAILQIPVPKTKRQVREFLGKIGYCRLFIPGFAELAQPLYAATRPGNDPLVWGEKEEEAFQSLKLALTQPPALALPSLDKPFQLFVEETSGAAKGVLTQALGPWKRPVAYLSKRLDPVAAGWPRCLRAIAAAALLTREASKLTFGQDIEITSSHNLESLLRSPPDKWLTNARITQYQVLLLDPPRVRFKQTAALNPATLLPETDDTLPIHHCLDTLDSLTSTRPDLTDQPLAQAEATLFTDGSSYIRDGKRYAGAAVVTLDSVIWAEPLPIGTSAQKAELIALTKALEWSKDKSVNIYTDSRYAFATLHVHGMIYRERGWLTAGGKAIKNAPEILALLTAVWLPKRVAVMHCKGHQKDDAPTSTGNRRADEVAREVAIRPLSTQATISAGKRTADGSEFEKRTADGSEFESPKKKAKVE

SEQ ID NO: 1433 - protein, 2098 aa, synthetic construct
MPAAKRVKLDGGDKKYSIGLDIGTNSVGWAVITDEYKVPSKKFKVLGNTDRHSIKKNLIGALLFDSGETAEATRLKRTARRRYTRRKNRICYLQEIFSNEMAKVDDSFFHRLEESFLVEEDKKHERHPIFGNIVDEVAYHEKYPTIYHLRKKLVDSTDKADLRLIYLALAHMIKFRGHFLIEGDLNPDNSDVDKLFIQLVQTYNQLFEENPINASGVDAKAILSARLSKSRRLENLIAQLPGEKKNGLFGNLIALSLGLTPNFKSNFDLAEDAKLQLSKDTYDDDLDNLLAQIGDQYADLFLAAKNLSDAILLSDILRVNTEITKAPLSASMIKRYDEHHQDLTLLKALVRQQLPEKYKEIFFDQSKNGYAGYIDGGASQEEFYKFIKPILEKMDGTEELLVKLNREDLLRKQRTFDNGSIPHQIHLGELHAILRRQEDFYPFLKDNREKIEKILTFRIPYYVGPLARGNSRFAWMTRKSEETITPWNFEEVVDKGASAQSFIERMTNFDKNLPNEKVLPKHSLLYEYFTVYNELTKVKYVTEGMRKPAFLSGEQKKAIVDLLFKTNRKVTVKQLKEDYFKKIECFDSVEISGVEDRFNASLGTYHDLLKIIKDKDFLDNEENEDILEDIVLTLTLFEDREMIEERLKTYAHLFDDKVMKQLKRRRYTGWGRLSRKLINGIRDKQSGKTILDFLKSDGFANRNFMQLIHDDSLTFKEDIQKAQVSGQGDSLHEHIANLAGSPAIKKGILQTVKVVDELVKVMGRHKPENIVIEMARENQTTQKGQKNSRERMKRIEEGIKELGSQILKEHPVENTQLQNEKLYLYYLQNGRDMYVDQELDINRLSDYDVDHIVPQSFLKDDSIDNKVLTRSDKARGKSDNVPSEEVVKKMKNYWRQLLNAKLITQRKFDNLTKAERGGLSELDKAGFIKRQLVETRQITKHVAQILDSRMNTKYDENDKLIREVKVITLKSKLVSDFRKDFQFYKVREINNYHHAHDAYLNAVVGTALIKKYPKLESEFVYGDYKVYDVRKMIAKSEQEIGKATAKYFFYSNIMNFFKTEITLANGEIRKRPLIETNGETGEIVWDKGRDFATVRKVLSMPQVNIVKKTEVQTGGFSKESILPKRNSDKLIARKKDWDPKKYGGFDSPTVAYSVLVVAKVEKGKSKKLKSVKELLGITIMERSSFEKNPIDFLEAKGYKEVKKDLIIKLPKYSLFELENGRKRMLASAGELQKGNELALPSKYVNFLYLASHYEKLKGSPEDNEQKQLFVEQHKHYLDEIIEQISEFSKRVILADANLDKVLSAYNKHRDKPIREQAENIIHLFTLTNLGAPAAFKYFDTTIDRKRYTSTKEVLDATLIHQSITGLYETRIDLSQLGGDGGGGSEAAAKPAPGGTAPLEEEYRLFLEAPIQNVTLLEQWKREIPKVWAEINPPGLASTQAPIHVQLLSTALPVRVRQYPITLEAKRSLRETIRKFRAAGILRPVHSPWNTPLLPVRKSGTSEYRMVQDLREVNKRVETIHPTVPNPYTLLSLLPPDRIWYSVLDLKDAFFCIPLAPESQLIFAFEWADAEEGESGQLTWTRLPQGFKNSPTLFNEALNRDLQGFRLDHPSVSLLQYVDDLLIAADTQAACLSATRDLLMTLAELGYRVSGKKAQLCQEEVTYLGFKIHKGSRSLSNSRTQAILQIPVPKTKRQVREFLGKIGYCRLFIPGFAELAQPLYAATRPGNDPLVWGEKEEEAFQSLKLALTQPPALALPSLDKPFQLFVEETSGAAKGVLTQALGPWKRPVAYLSKRLDPVAAGWPRCLRAIAAAALLTREASKLTFGQDIEITSSHNLESLLRSPPDKWLTNARITQYQVLLLDPPRVRFKQTAALNPATLLPETDDTLPIHHCLDTLDSLTSTRPDLTDQPLAQAEATLFTDGSSYIRDGKRYAGAAVVTLDSVIWAEPLPIGTSAQKAELIALTKALEWSKDKSVNIYTDSRYAFATLHVHGMIYRERGWLTAGGKAIKNAPEILALLTAVWLPKRVAVMHCKGHQKDDAPTSTGNRRADEVAREVAIRPLSTQATISAGKRTADGSEFEKRTADGSEFESPKKKAKVE

SEQ ID NO: 1434 - protein, 2093 aa, synthetic construct
MPAAKRVKLDGGDKKYSIGLDIGTNSVGWAVITDEYKVPSKKFKVLGNTDRHSIKKNLIGALLFDSGETAEATRLKRTARRRYTRRKNRICYLQEIFSNEMAKVDDSFFHRLEESFLVEEDKKHERHPIFGNIVDEVAYHEKYPTIYHLRKKLVDSTDKADLRLIYLALAHMIKFRGHFLIEGDLNPDNSDVDKLFIQLVQTYNQLFEENPINASGVDAKAILSARLSKSRRLENLIAQLPGEKKNGLFGNLIALSLGLTPNFKSNFDLAEDAKLQLSKDTYDDDLDNLLAQIGDQYADLFLAAKNLSDAILLSDILRVNTEITKAPLSASMIKRYDEHHQDLTLLKALVRQQLPEKYKEIFFDQSKNGYAGYIDGGASQEEFYKFIKPILEKMDGTEELLVKLNREDLLRKQRTFDNGSIPHQIHLGELHAILRRQEDFYPFLKDNREKIEKILTFRIPYYVGPLARGNSRFAWMTRKSEETITPWNFEEVVDKGASAQSFIERMTNFDKNLPNEKVLPKHSLLYEYFTVYNELTKVKYVTEGMRKPAFLSGEQKKAIVDLLFKTNRKVTVKQLKEDYFKKIECFDSVEISGVEDRFNASLGTYHDLLKIIKDKDFLDNEENEDILEDIVLTLTLFEDREMIEERLKTYAHLFDDKVMKQLKRRRYTGWGRLSRKLINGIRDKQSGKTILDFLKSDGFANRNFMQLIHDDSLTFKEDIQKAQVSGQGDSLHEHIANLAGSPAIKKGILQTVKVVDELVKVMGRHKPENIVIEMARENQTTQKGQKNSRERMKRIEEGIKELGSQILKEHPVENTQLQNEKLYLYYLQNGRDMYVDQELDINRLSDYDVDHIVPQSFLKDDSIDNKVLTRSDKARGKSDNVPSEEVVKKMKNYWRQLLNAKLITQRKFDNLTKAERGGLSELDKAGFIKRQLVETRQITKHVAQILDSRMNTKYDENDKLIREVKVITLKSKLVSDFRKDFQFYKVREINNYHHAHDAYLNAVVGTALIKKYPKLESEFVYGDYKVYDVRKMIAKSEQEIGKATAKYFFYSNIMNFFKTEITLANGEIRKRPLIETNGETGEIVWDKGRDFATVRKVLSMPQVNIVKKTEVQTGGFSKESILPKRNSDKLIARKKDWDPKKYGGFDSPTVAYSVLVVAKVEKGKSKKLKSVKELLGITIMERSSFEKNPIDFLEAKGYKEVKKDLIIKLPKYSLFELENGRKRMLASAGELQKGNELALPSKYVNFLYLASHYEKLKGSPEDNEQKQLFVEQHKHYLDEIIEQISEFSKRVILADANLDKVLSAYNKHRDKPIREQAENIIHLFTLTNLGAPAAFKYFDTTIDRKRYTSTKEVLDATLIHQSITGLYETRIDLSQLGGDGGGGSGGSGGTAPLEEEYRLFLEAPIQNVTLLEQWKREIPKVWAEINPPGLASTQAPIHVQLLSTALPVRVRQYPITLEAKRSLRETIRKFRAAGILRPVHSPWNTPLLPVRKSGTSEYRMVQDLREVNKRVETIHPTVPNPYTLLSLLPPDRIWYSVLDLKDAFFCIPLAPESQLIFAFEWADAEEGESGQLTWTRLPQGFKNSPTLFNEALNRDLQGFRLDHPSVSLLQYVDDLLIAADTQAACLSATRDLLMTLAELGYRVSGKKAQLCQEEVTYLGFKIHKGSRSLSNSRTQAILQIPVPKTKRQVREFLGKIGYCRLFIPGFAELAQPLYAATRPGNDPLVWGEKEEEAFQSLKLALTQPPALALPSLDKPFQLFVEETSGAAKGVLTQALGPWKRPVAYLSKRLDPVAAGWPRCLRAIAAAALLTREASKLTFGQDIEITSSHNLESLLRSPPDKWLTNARITQYQVLLLDPPRVRFKQTAALNPATLLPETDDTLPIHHCLDTLDSLTSTRPDLTDQPLAQAEATLFTDGSSYIRDGKRYAGAAVVTLDSVIWAEPLPIGTSAQKAELIALTKALEWSKDKSVNIYTDSRYAFATLHVHGMIYRERGWLTAGGKAIKNAPEILALLTAVWLPKRVAVMHCKGHQKDDAPTSTGNRRADEVAREVAIRPLSTQATISAGKRTADGSEFEKRTADGSEFESPKKKAKVE

SEQ ID NO: 1435 - protein, 2091 aa, synthetic construct
MPAAKRVKLDGGDKKYSIGLDIGTNSVGWAVITDEYKVPSKKFKVLGNTDRHSIKKNLIGALLFDSGETAEATRLKRTARRRYTRRKNRICYLQEIFSNEMAKVDDSFFHRLEESFLVEEDKKHERHPIFGNIVDEVAYHEKYPTIYHLRKKLVDSTDKADLRLIYLALAHMIKFRGHFLIEGDLNPDNSDVDKLFIQLVQTYNQLFEENPINASGVDAKAILSARLSKSRRLENLIAQLPGEKKNGLFGNLIALSLGLTPNFKSNFDLAEDAKLQLSKDTYDDDLDNLLAQIGDQYADLFLAAKNLSDAILLSDILRVNTEITKAPLSASMIKRYDEHHQDLTLLKALVRQQLPEKYKEIFFDQSKNGYAGYIDGGASQEEFYKFIKPILEKMDGTEELLVKLNREDLLRKQRTFDNGSIPHQIHLGELHAILRRQEDFYPFLKDNREKIEKILTFRIPYYVGPLARGNSRFAWMTRKSEETITPWNFEEVVDKGASAQSFIERMTNFDKNLPNEKVLPKHSLLYEYFTVYNELTKVKYVTEGMRKPAFLSGEQKKAIVDLLFKTNRKVTVKQLKEDYFKKIECFDSVEISGVEDRFNASLGTYHDLLKIIKDKDFLDNEENEDILEDIVLTLTLFEDREMIEERLKTYAHLFDDKVMKQLKRRRYTGWGRLSRKLINGIRDKQSGKTILDFLKSDGFANRNFMQLIHDDSLTFKEDIQKAQVSGQGDSLHEHIANLAGSPAIKKGILQTVKVVDELVKVMGRHKPENIVIEMARENQTTQKGQKNSRERMKRIEEGIKELGSQILKEHPVENTQLQNEKLYLYYLQNGRDMYVDQELDINRLSDYDVDHIVPQSFLKDDSIDNKVLTRSDKARGKSDNVPSEEVVKKMKNYWRQLLNAKLITQRKFDNLTKAERGGLSELDKAGFIKRQLVETRQITKHVAQILDSRMNTKYDENDKLIREVKVITLKSKLVSDFRKDFQFYKVREINNYHHAHDAYLNAVVGTALIKKYPKLESEFVYGDYKVYDVRKMIAKSEQEIGKATAKYFFYSNIMNFFKTEITLANGEIRKRPLIETNGETGEIVWDKGRDFATVRKVLSMPQVNIVKKTEVQTGGFSKESILPKRNSDKLIARKKDWDPKKYGGFDSPTVAYSVLVVAKVEKGKSKKLKSVKELLGITIMERSSFEKNPIDFLEAKGYKEVKKDLIIKLPKYSLFELENGRKRMLASAGELQKGNELALPSKYVNFLYLASHYEKLKGSPEDNEQKQLFVEQHKHYLDEIIEQISEFSKRVILADANLDKVLSAYNKHRDKPIREQAENIIHLFTLTNLGAPAAFKYFDTTIDRKRYTSTKEVLDATLIHQSITGLYETRIDLSQLGGDGGGGGGGGTAPLEEEYRLFLEAPIQNVTLLEQWKREIPKVWAEINPPGLASTQAPIHVQLLSTALPVRVRQYPITLEAKRSLRETIRKFRAAGILRPVHSPWNTPLLPVRKSGTSEYRMVQDLREVNKRVETIHPTVPNPYTLLSLLPPDRIWYSVLDLKDAFFCIPLAPESQLIFAFEWADAEEGESGQLTWTRLPQGFKNSPTLFNEALNRDLQGFRLDHPSVSLLQYVDDLLIAADTQAACLSATRDLLMTLAELGYRVSGKKAQLCQEEVTYLGFKIHKGSRSLSNSRTQAILQIPVPKTKRQVREFLGKIGYCRLFIPGFAELAQPLYAATRPGNDPLVWGEKEEEAFQSLKLALTQPPALALPSLDKPFQLFVEETSGAAKGVLTQALGPWKRPVAYLSKRLDPVAAGWPRCLRAIAAAALLTREASKLTFGQDIEITSSHNLESLLRSPPDKWLTNARITQYQVLLLDPPRVRFKQTAALNPATLLPETDDTLPIHHCLDTLDSLTSTRPDLTDQPLAQAEATLFTDGSSYIRDGKRYAGAAVVTLDSVIWAEPLPIGTSAQKAELIALTKALEWSKDKSVNIYTDSRYAFATLHVHGMIYRERGWLTAGGKAIKNAPEILALLTAVWLPKRVAVMHCKGHQKDDAPTSTGNRRADEVAREVAIRPLSTQATISAGKRTADGSEFEKRTADGSEFESPKKKAKVE

SEQ ID NO: 1436 - protein, 2096 aa, synthetic construct
MPAAKRVKLDGGDKKYSIGLDIGTNSVGWAVITDEYKVPSKKFKVLGNTDRHSIKKNLIGALLFDSGETAEATRLKRTARRRYTRRKNRICYLQEIFSNEMAKVDDSFFHRLEESFLVEEDKKHERHPIFGNIVDEVAYHEKYPTIYHLRKKLVDSTDKADLRLIYLALAHMIKFRGHFLIEGDLNPDNSDVDKLFIQLVQTYNQLFEENPINASGVDAKAILSARLSKSRRLENLIAQLPGEKKNGLFGNLIALSLGLTPNFKSNFDLAEDAKLQLSKDTYDDDLDNLLAQIGDQYADLFLAAKNLSDAILLSDILRVNTEITKAPLSASMIKRYDEHHQDLTLLKALVRQQLPEKYKEIFFDQSKNGYAGYIDGGASQEEFYKFIKPILEKMDGTEELLVKLNREDLLRKQRTFDNGSIPHQIHLGELHAILRRQEDFYPFLKDNREKIEKILTFRIPYYVGPLARGNSRFAWMTRKSEETITPWNFEEVVDKGASAQSFIERMTNFDKNLPNEKVLPKHSLLYEYFTVYNELTKVKYVTEGMRKPAFLSGEQKKAIVDLLFKTNRKVTVKQLKEDYFKKIECFDSVEISGVEDRFNASLGTYHDLLKIIKDKDFLDNEENEDILEDIVLTLTLFEDREMIEERLKTYAHLFDDKVMKQLKRRRYTGWGRLSRKLINGIRDKQSGKTILDFLKSDGFANRNFMQLIHDDSLTFKEDIQKAQVSGQGDSLHEHIANLAGSPAIKKGILQTVKVVDELVKVMGRHKPENIVIEMARENQTTQKGQKNSRERMKRIEEGIKELGSQILKEHPVENTQLQNEKLYLYYLQNGRDMYVDQELDINRLSDYDVDHIVPQSFLKDDSIDNKVLTRSDKARGKSDNVPSEEVVKKMKNYWRQLLNAKLITQRKFDNLTKAERGGLSELDKAGFIKRQLVETRQITKHVAQILDSRMNTKYDENDKLIREVKVITLKSKLVSDFRKDFQFYKVREINNYHHAHDAYLNAVVGTALIKKYPKLESEFVYGDYKVYDVRKMIAKSEQEIGKATAKYFFYSNIMNFFKTEITLANGEIRKRPLIETNGETGEIVWDKGRDFATVRKVLSMPQVNIVKKTEVQTGGFSKESILPKRNSDKLIARKKDWDPKKYGGFDSPTVAYSVLVVAKVEKGKSKKLKSVKELLGITIMERSSFEKNPIDFLEAKGYKEVKKDLIIKLPKYSLFELENGRKRMLASAGELQKGNELALPSKYVNFLYLASHYEKLKGSPEDNEQKQLFVEQHKHYLDEIIEQISEFSKRVILADANLDKVLSAYNKHRDKPIREQAENIIHLFTLTNLGAPAAFKYFDTTIDRKRYTSTKEVLDATLIHQSITGLYETRIDLSQLGGDGGPAPGGGGGSGGTAPLEEEYRLFLEAPIQNVTLLEQWKREIPKVWAEINPPGLASTQAPIHVQLLSTALPVRVRQYPITLEAKRSLRETIRKFRAAGILRPVHSPWNTPLLPVRKSGTSEYRMVQDLREVNKRVETIHPTVPNPYTLLSLLPPDRIWYSVLDLKDAFFCIPLAPESQLIFAFEWADAEEGESGQLTWTRLPQGFKNSPTLFNEALNRDLQGFRLDHPSVSLLQYVDDLLIAADTQAACLSATRDLLMTLAELGYRVSGKKAQLCQEEVTYLGFKIHKGSRSLSNSRTQAILQIPVPKTKRQVREFLGKIGYCRLFIPGFAELAQPLYAATRPGNDPLVWGEKEEEAFQSLKLALTQPPALALPSLDKPFQLFVEETSGAAKGVLTQALGPWKRPVAYLSKRLDPVAAGWPRCLRAIAAAALLTREASKLTFGQDIEITSSHNLESLLRSPPDKWLTNARITQYQVLLLDPPRVRFKQTAALNPATLLPETDDTLPIHHCLDTLDSLTSTRPDLTDQPLAQAEATLFTDGSSYIRDGKRYAGAAVVTLDSVIWAEPLPIGTSAQKAELIALTKALEWSKDKSVNIYTDSRYAFATLHVHGMIYRERGWLTAGGKAIKNAPEILALLTAVWLPKRVAVMHCKGHQKDDAPTSTGNRRADEVAREVAIRPLSTQATISAGKRTADGSEFEKRTADGSEFESPKKKAKVE

SEQ ID NO: 1437 - protein, 2096 aa, synthetic construct
MPAAKRVKLDGGDKKYSIGLDIGTNSVGWAVITDEYKVPSKKFKVLGNTDRHSIKKNLIGALLFDSGETAEATRLKRTARRRYTRRKNRICYLQEIFSNEMAKVDDSFFHRLEESFLVEEDKKHERHPIFGNIVDEVAYHEKYPTIYHLRKKLVDSTDKADLRLIYLALAHMIKFRGHFLIEGDLNPDNSDVDKLFIQLVQTYNQLFEENPINASGVDAKAILSARLSKSRRLENLIAQLPGEKKNGLFGNLIALSLGLTPNFKSNFDLAEDAKLQLSKDTYDDDLDNLLAQIGDQYADLFLAAKNLSDAILLSDILRVNTEITKAPLSASMIKRYDEHHQDLTLLKALVRQQLPEKYKEIFFDQSKNGYAGYIDGGASQEEFYKFIKPILEKMDGTEELLVKLNREDLLRKQRTFDNGSIPHQIHLGELHAILRRQEDFYPFLKDNREKIEKILTFRIPYYVGPLARGNSRFAWMTRKSEETITPWNFEEVVDKGASAQSFIERMTNFDKNLPNEKVLPKHSLLYEYFTVYNELTKVKYVTEGMRKPAFLSGEQKKAIVDLLFKTNRKVTVKQLKEDYFKKIECFDSVEISGVEDRFNASLGTYHDLLKIIKDKDFLDNEENEDILEDIVLTLTLFEDREMIEERLKTYAHLFDDKVMKQLKRRRYTGWGRLSRKLINGIRDKQSGKTILDFLKSDGFANRNFMQLIHDDSLTFKEDIQKAQVSGQGDSLHEHIANLAGSPAIKKGILQTVKVVDELVKVMGRHKPENIVIEMARENQTTQKGQKNSRERMKRIEEGIKELGSQILKEHPVENTQLQNEKLYLYYLQNGRDMYVDQELDINRLSDYDVDHIVPQSFLKDDSIDNKVLTRSDKARGKSDNVPSEEVVKKMKNYWRQLLNAKLITQRKFDNLTKAERGGLSELDKAGFIKRQLVETRQITKHVAQILDSRMNTKYDENDKLIREVKVITLKSKLVSDFRKDFQFYKVREINNYHHAHDAYLNAVVGTALIKKYPKLESEFVYGDYKVYDVRKMIAKSEQEIGKATAKYFFYSNIMNFFKTEITLANGEIRKRPLIETNGETGEIVWDKGRDFATVRKVLSMPQVNIVKKTEVQTGGFSKESILPKRNSDKLIARKKDWDPKKYGGFDSPTVAYSVLVVAKVEKGKSKKLKSVKELLGITIMERSSFEKNPIDFLEAKGYKEVKKDLIIKLPKYSLFELENGRKRMLASAGELQKGNELALPSKYVNFLYLASHYEKLKGSPEDNEQKQLFVEQHKHYLDEIIEQISEFSKRVILADANLDKVLSAYNKHRDKPIREQAENIIHLFTLTNLGAPAAFKYFDTTIDRKRYTSTKEVLDATLIHQSITGLYETRIDLSQLGGDGGGSSGGSGGGGGTAPLEEEYRLFLEAPIQNVTLLEQWKREIPKVWAEINPPGLASTQAPIHVQLLSTALPVRVRQYPITLEAKRSLRETIRKFRAAGILRPVHSPWNTPLLPVRKSGTSEYRMVQDLREVNKRVETIHPTVPNPYTLLSLLPPDRIWYSVLDLKDAFFCIPLAPESQLIFAFEWADAEEGESGQLTWTRLPQGFKNSPTLFNEALNRDLQGFRLDHPSVSLLQYVDDLLIAADTQAACLSATRDLLMTLAELGYRVSGKKAQLCQEEVTYLGFKIHKGSRSLSNSRTQAILQIPVPKTKRQVREFLGKIGYCRLFIPGFAELAQPLYAATRPGNDPLVWGEKEEEAFQSLKLALTQPPALALPSLDKPFQLFVEETSGAAKGVLTQALGPWKRPVAYLSKRLDPVAAGWPRCLRAIAAAALLTREASKLTFGQDIEITSSHNLESLLRSPPDKWLTNARITQYQVLLLDPPRVRFKQTAALNPATLLPETDDTLPIHHCLDTLDSLTSTRPDLTDQPLAQAEATLFTDGSSYIRDGKRYAGAAVVTLDSVIWAEPLPIGTSAQKAELIALTKALEWSKDKSVNIYTDSRYAFATLHVHGMIYRERGWLTAGGKAIKNAPEILALLTAVWLPKRVAVMHCKGHQKDDAPTSTGNRRADEVAREVAIRPLSTQATISAGKRTADGSEFEKRTADGSEFESPKKKAKVE

SEQ ID NO: 1438 - protein, 2092 aa, synthetic construct
MPAAKRVKLDGGDKKYSIGLDIGTNSVGWAVITDEYKVPSKKFKVLGNTDRHSIKKNLIGALLFDSGETAEATRLKRTARRRYTRRKNRICYLQEIFSNEMAKVDDSFFHRLEESFLVEEDKKHERHPIFGNIVDEVAYHEKYPTIYHLRKKLVDSTDKADLRLIYLALAHMIKFRGHFLIEGDLNPDNSDVDKLFIQLVQTYNQLFEENPINASGVDAKAILSARLSKSRRLENLIAQLPGEKKNGLFGNLIALSLGLTPNFKSNFDLAEDAKLQLSKDTYDDDLDNLLAQIGDQYADLFLAAKNLSDAILLSDILRVNTEITKAPLSASMIKRYDEHHQDLTLLKALVRQQLPEKYKEIFFDQSKNGYAGYIDGGASQEEFYKFIKPILEKMDGTEELLVKLNREDLLRKQRTFDNGSIPHQIHLGELHAILRRQEDFYPFLKDNREKIEKILTFRIPYYVGPLARGNSRFAWMTRKSEETITPWNFEEVVDKGASAQSFIERMTNFDKNLPNEKVLPKHSLLYEYFTVYNELTKVKYVTEGMRKPAFLSGEQKKAIVDLLFKTNRKVTVKQLKEDYFKKIECFDSVEISGVEDRFNASLGTYHDLLKIIKDKDFLDNEENEDILEDIVLTLTLFEDREMIEERLKTYAHLFDDKVMKQLKRRRYTGWGRLSRKLINGIRDKQSGKTILDFLKSDGFANRNFMQLIHDDSLTFKEDIQKAQVSGQGDSLHEHIANLAGSPAIKKGILQTVKVVDELVKVMGRHKPENIVIEMARENQTTQKGQKNSRERMKRIEEGIKELGSQILKEHPVENTQLQNEKLYLYYLQNGRDMYVDQELDINRLSDYDVDHIVPQSFLKDDSIDNKVLTRSDKARGKSDNVPSEEVVKKMKNYWRQLLNAKLITQRKFDNLTKAERGGLSELDKAGFIKRQLVETRQITKHVAQILDSRMNTKYDENDKLIREVKVITLKSKLVSDFRKDFQFYKVREINNYHHAHDAYLNAVVGTALIKKYPKLESEFVYGDYKVYDVRKMIAKSEQEIGKATAKYFFYSNIMNFFKTEITLANGEIRKRPLIETNGETGEIVWDKGRDFATVRKVLSMPQVNIVKKTEVQTGGFSKESILPKRNSDKLIARKKDWDPKKYGGFDSPTVAYSVLVVAKVEKGKSKKLKSVKELLGITIMERSSFEKNPIDFLEAKGYKEVKKDLIIKLPKYSLFELENGRKRMLASAGELQKGNELALPSKYVNFLYLASHYEKLKGSPEDNEQKQLFVEQHKHYLDEIIEQISEFSKRVILADANLDKVLSAYNKHRDKPIREQAENIIHLFTLTNLGAPAAFKYFDTTIDRKRYTSTKEVLDATLIHQSITGLYETRIDLSQLGGDGGGGGGGGGTAPLEEEYRLFLEAPIQNVTLLEQWKREIPKVWAEINPPGLASTQAPIHVQLLSTALPVRVRQYPITLEAKRSLRETIRKFRAAGILRPVHSPWNTPLLPVRKSGTSEYRMVQDLREVNKRVETIHPTVPNPYTLLSLLPPDRIWYSVLDLKDAFFCIPLAPESQLIFAFEWADAEEGESGQLTWTRLPQGFKNSPTLFNEALNRDLQGFRLDHPSVSLLQYVDDLLIAADTQAACLSATRDLLMTLAELGYRVSGKKAQLCQEEVTYLGFKIHKGSRSLSNSRTQAILQIPVPKTKRQVREFLGKIGYCRLFIPGFAELAQPLYAATRPGNDPLVWGEKEEEAFQSLKLALTQPPALALPSLDKPFQLFVEETSGAAKGVLTQALGPWKRPVAYLSKRLDPVAAGWPRCLRAIAAAALLTREASKLTFGQDIEITSSHNLESLLRSPPDKWLTNARITQYQVLLLDPPRVRFKQTAALNPATLLPETDDTLPIHHCLDTLDSLTSTRPDLTDQPLAQAEATLFTDGSSYIRDGKRYAGAAVVTLDSVIWAEPLPIGTSAQKAELIALTKALEWSKDKSVNIYTDSRYAFATLHVHGMIYRERGWLTAGGKAIKNAPEILALLTAVWLPKRVAVMHCKGHQKDDAPTSTGNRRADEVAREVAIRPLSTQATISAGKRTADGSEFEKRTADGSEFESPKKKAKVE

SEQ ID NO: 1439 - protein, 2098 aa, synthetic construct
MPAAKRVKLDGGDKKYSIGLDIGTNSVGWAVITDEYKVPSKKFKVLGNTDRHSIKKNLIGALLFDSGETAEATRLKRTARRRYTRRKNRICYLQEIFSNEMAKVDDSFFHRLEESFLVEEDKKHERHPIFGNIVDEVAYHEKYPTIYHLRKKLVDSTDKADLRLIYLALAHMIKFRGHFLIEGDLNPDNSDVDKLFIQLVQTYNQLFEENPINASGVDAKAILSARLSKSRRLENLIAQLPGEKKNGLFGNLIALSLGLTPNFKSNFDLAEDAKLQLSKDTYDDDLDNLLAQIGDQYADLFLAAKNLSDAILLSDILRVNTEITKAPLSASMIKRYDEHHQDLTLLKALVRQQLPEKYKEIFFDQSKNGYAGYIDGGASQEEFYKFIKPILEKMDGTEELLVKLNREDLLRKQRTFDNGSIPHQIHLGELHAILRRQEDFYPFLKDNREKIEKILTFRIPYYVGPLARGNSRFAWMTRKSEETITPWNFEEVVDKGASAQSFIERMTNFDKNLPNEKVLPKHSLLYEYFTVYNELTKVKYVTEGMRKPAFLSGEQKKAIVDLLFKTNRKVTVKQLKEDYFKKIECFDSVEISGVEDRFNASLGTYHDLLKIIKDKDFLDNEENEDILEDIVLTLTLFEDREMIEERLKTYAHLFDDKVMKQLKRRRYTGWGRLSRKLINGIRDKQSGKTILDFLKSDGFANRNFMQLIHDDSLTFKEDIQKAQVSGQGDSLHEHIANLAGSPAIKKGILQTVKVVDELVKVMGRHKPENIVIEMARENQTTQKGQKNSRERMKRIEEGIKELGSQILKEHPVENTQLQNEKLYLYYLQNGRDMYVDQELDINRLSDYDVDHIVPQSFLKDDSIDNKVLTRSDKARGKSDNVPSEEVVKKMKNYWRQLLNAKLITQRKFDNLTKAERGGLSELDKAGFIKRQLVETRQITKHVAQILDSRMNTKYDENDKLIREVKVITLKSKLVSDFRKDFQFYKVREINNYHHAHDAYLNAVVGTALIKKYPKLESEFVYGDYKVYDVRKMIAKSEQEIGKATAKYFFYSNIMNFFKTEITLANGEIRKRPLIETNGETGEIVWDKGRDFATVRKVLSMPQVNIVKKTEVQTGGFSKESILPKRNSDKLIARKKDWDPKKYGGFDSPTVAYSVLVVAKVEKGKSKKLKSVKELLGITIMERSSFEKNPIDFLEAKGYKEVKKDLIIKLPKYSLFELENGRKRMLASAGELQKGNELALPSKYVNFLYLASHYEKLKGSPEDNEQKQLFVEQHKHYLDEIIEQISEFSKRVILADANLDKVLSAYNKHRDKPIREQAENIIHLFTLTNLGAPAAFKYFDTTIDRKRYTSTKEVLDATLIHQSITGLYETRIDLSQLGGDGGEAAAKPAPGGSGGTAPLEEEYRLFLEAPIQNVTLLEQWKREIPKVWAEINPPGLASTQAPIHVQLLSTALPVRVRQYPITLEAKRSLRETIRKFRAAGILRPVHSPWNTPLLPVRKSGTSEYRMVQDLREVNKRVETIHPTVPNPYTLLSLLPPDRIWYSVLDLKDAFFCIPLAPESQLIFAFEWADAEEGESGQLTWTRLPQGFKNSPTLFNEALNRDLQGFRLDHPSVSLLQYVDDLLIAADTQAACLSATRDLLMTLAELGYRVSGKKAQLCQEEVTYLGFKIHKGSRSLSNSRTQAILQIPVPKTKRQVREFLGKIGYCRLFIPGFAELAQPLYAATRPGNDPLVWGEKEEEAFQSLKLALTQPPALALPSLDKPFQLFVEETSGAAKGVLTQALGPWKRPVAYLSKRLDPVAAGWPRCLRAIAAAALLTREASKLTFGQDIEITSSHNLESLLRSPPDKWLTNARITQYQVLLLDPPRVRFKQTAALNPATLLPETDDTLPIHHCLDTLDSLTSTRPDLTDQPLAQAEATLFTDGSSYIRDGKRYAGAAVVTLDSVIWAEPLPIGTSAQKAELIALTKALEWSKDKSVNIYTDSRYAFATLHVHGMIYRERGWLTAGGKAIKNAPEILALLTAVWLPKRVAVMHCKGHQKDDAPTSTGNRRADEVAREVAIRPLSTQATISAGKRTADGSEFEKRTADGSEFESPKKKAKVE

SEQ ID NO: 1440 - protein, 2094 aa, synthetic construct
MPAAKRVKLDGGDKKYSIGLDIGTNSVGWAVITDEYKVPSKKFKVLGNTDRHSIKKNLIGALLFDSGETAEATRLKRTARRRYTRRKNRICYLQEIFSNEMAKVDDSFFHRLEESFLVEEDKKHERHPIFGNIVDEVAYHEKYPTIYHLRKKLVDSTDKADLRLIYLALAHMIKFRGHFLIEGDLNPDNSDVDKLFIQLVQTYNQLFEENPINASGVDAKAILSARLSKSRRLENLIAQLPGEKKNGLFGNLIALSLGLTPNFKSNFDLAEDAKLQLSKDTYDDDLDNLLAQIGDQYADLFLAAKNLSDAILLSDILRVNTEITKAPLSASMIKRYDEHHQDLTLLKALVRQQLPEKYKEIFFDQSKNGYAGYIDGGASQEEFYKFIKPILEKMDGTEELLVKLNREDLLRKQRTFDNGSIPHQIHLGELHAILRRQEDFYPFLKDNREKIEKILTFRIPYYVGPLARGNSRFAWMTRKSEETITPWNFEEVVDKGASAQSFIERMTNFDKNLPNEKVLPKHSLLYEYFTVYNELTKVKYVTEGMRKPAFLSGEQKKAIVDLLFKTNRKVTVKQLKEDYFKKIECFDSVEISGVEDRFNASLGTYHDLLKIIKDKDFLDNEENEDILEDIVLTLTLFEDREMIEERLKTYAHLFDDKVMKQLKRRRYTGWGRLSRKLINGIRDKQSGKTILDFLKSDGFANRNFMQLIHDDSLTFKEDIQKAQVSGQGDSLHEHIANLAGSPAIKKGILQTVKVVDELVKVMGRHKPENIVIEMARENQTTQKGQKNSRERMKRIEEGIKELGSQILKEHPVENTQLQNEKLYLYYLQNGRDMYVDQELDINRLSDYDVDHIVPQSFLKDDSIDNKVLTRSDKARGKSDNVPSEEVVKKMKNYWRQLLNAKLITQRKFDNLTKAERGGLSELDKAGFIKRQLVETRQITKHVAQILDSRMNTKYDENDKLIREVKVITLKSKLVSDFRKDFQFYKVREINNYHHAHDAYLNAVVGTALIKKYPKLESEFVYGDYKVYDVRKMIAKSEQEIGKATAKYFFYSNIMNFFKTEITLANGEIRKRPLIETNGETGEIVWDKGRDFATVRKVLSMPQVNIVKKTEVQTGGFSKESILPKRNSDKLIARKKDWDPKKYGGFDSPTVAYSVLVVAKVEKGKSKKLKSVKELLGITIMERSSFEKNPIDFLEAKGYKEVKKDLIIKLPKYSLFELENGRKRMLASAGELQKGNELALPSKYVNFLYLASHYEKLKGSPEDNEQKQLFVEQHKHYLDEIIEQISEFSKRVILADANLDKVLSAYNKHRDKPIREQAENIIHLFTLTNLGAPAAFKYFDTTIDRKRYTSTKEVLDATLIHQSITGLYETRIDLSQLGGDGGPAPAPAPGGTAPLEEEYRLFLEAPIQNVTLLEQWKREIPKVWAEINPPGLASTQAPIHVQLLSTALPVRVRQYPITLEAKRSLRETIRKFRAAGILRPVHSPWNTPLLPVRKSGTSEYRMVQDLREVNKRVETIHPTVPNPYTLLSLLPPDRIWYSVLDLKDAFFCIPLAPESQLIFAFEWADAEEGESGQLTWTRLPQGFKNSPTLFNEALNRDLQGFRLDHPSVSLLQYVDDLLIAADTQAACLSATRDLLMTLAELGYRVSGKKAQLCQEEVTYLGFKIHKGSRSLSNSRTQAILQIPVPKTKRQVREFLGKIGYCRLFIPGFAELAQPLYAATRPGNDPLVWGEKEEEAFQSLKLALTQPPALALPSLDKPFQLFVEETSGAAKGVLTQALGPWKRPVAYLSKRLDPVAAGWPRCLRAIAAAALLTREASKLTFGQDIEITSSHNLESLLRSPPDKWLTNARITQYQVLLLDPPRVRFKQTAALNPATLLPETDDTLPIHHCLDTLDSLTSTRPDLTDQPLAQAEATLFTDGSSYIRDGKRYAGAAVVTLDSVIWAEPLPIGTSAQKAELIALTKALEWSKDKSVNIYTDSRYAFATLHVHGMIYRERGWLTAGGKAIKNAPEILALLTAVWLPKRVAVMHCKGHQKDDAPTSTGNRRADEVAREVAIRPLSTQATISAGKRTADGSEFEKRTADGSEFESPKKKAKVE

SEQ ID NO: 1441 - protein, 2098 aa, synthetic construct
MPAAKRVKLDGGDKKYSIGLDIGTNSVGWAVITDEYKVPSKKFKVLGNTDRHSIKKNLIGALLFDSGETAEATRLKRTARRRYTRRKNRICYLQEIFSNEMAKVDDSFFHRLEESFLVEEDKKHERHPIFGNIVDEVAYHEKYPTIYHLRKKLVDSTDKADLRLIYLALAHMIKFRGHFLIEGDLNPDNSDVDKLFIQLVQTYNQLFEENPINASGVDAKAILSARLSKSRRLENLIAQLPGEKKNGLFGNLIALSLGLTPNFKSNFDLAEDAKLQLSKDTYDDDLDNLLAQIGDQYADLFLAAKNLSDAILLSDILRVNTEITKAPLSASMIKRYDEHHQDLTLLKALVRQQLPEKYKEIFFDQSKNGYAGYIDGGASQEEFYKFIKPILEKMDGTEELLVKLNREDLLRKQRTFDNGSIPHQIHLGELHAILRRQEDFYPFLKDNREKIEKILTFRIPYYVGPLARGNSRFAWMTRKSEETITPWNFEEVVDKGASAQSFIERMTNFDKNLPNEKVLPKHSLLYEYFTVYNELTKVKYVTEGMRKPAFLSGEQKKAIVDLLFKTNRKVTVKQLKEDYFKKIECFDSVEISGVEDRFNASLGTYHDLLKIIKDKDFLDNEENEDILEDIVLTLTLFEDREMIEERLKTYAHLFDDKVMKQLKRRRYTGWGRLSRKLINGIRDKQSGKTILDFLKSDGFANRNFMQLIHDDSLTFKEDIQKAQVSGQGDSLHEHIANLAGSPAIKKGILQTVKVVDELVKVMGRHKPENIVIEMARENQTTQKGQKNSRERMKRIEEGIKELGSQILKEHPVENTQLQNEKLYLYYLQNGRDMYVDQELDINRLSDYDVDHIVPQSFLKDDSIDNKVLTRSDKARGKSDNVPSEEVVKKMKNYWRQLLNAKLITQRKFDNLTKAERGGLSELDKAGFIKRQLVETRQITKHVAQILDSRMNTKYDENDKLIREVKVITLKSKLVSDFRKDFQFYKVREINNYHHAHDAYLNAVVGTALIKKYPKLESEFVYGDYKVYDVRKMIAKSEQEIGKATAKYFFYSNIMNFFKTEITLANGEIRKRPLIETNGETGEIVWDKGRDFATVRKVLSMPQVNIVKKTEVQTGGFSKESILPKRNSDKLIARKKDWDPKKYGGFDSPTVAYSVLVVAKVEKGKSKKLKSVKELLGITIMERSSFEKNPIDFLEAKGYKEVKKDLIIKLPKYSLFELENGRKRMLASAGELQKGNELALPSKYVNFLYLASHYEKLKGSPEDNEQKQLFVEQHKHYLDEIIEQISEFSKRVILADANLDKVLSAYNKHRDKPIREQAENIIHLFTLTNLGAPAAFKYFDTTIDRKRYTSTKEVLDATLIHQSITGLYETRIDLSQLGGDGGEAAAKGGSGGGGGTAPLEEEYRLFLEAPIQNVTLLEQWKREIPKVWAEINPPGLASTQAPIHVQLLSTALPVRVRQYPITLEAKRSLRETIRKFRAAGILRPVHSPWNTPLLPVRKSGTSEYRMVQDLREVNKRVETIHPTVPNPYTLLSLLPPDRIWYSVLDLKDAFFCIPLAPESQLIFAFEWADAEEGESGQLTWTRLPQGFKNSPTLFNEALNRDLQGFRLDHPSVSLLQYVDDLLIAADTQAACLSATRDLLMTLAELGYRVSGKKAQLCQEEVTYLGFKIHKGSRSLSNSRTQAILQIPVPKTKRQVREFLGKIGYCRLFIPGFAELAQPLYAATRPGNDPLVWGEKEEEAFQSLKLALTQPPALALPSLDKPFQLFVEETSGAAKGVLTQALGPWKRPVAYLSKRLDPVAAGWPRCLRAIAAAALLTREASKLTFGQDIEITSSHNLESLLRSPPDKWLTNARITQYQVLLLDPPRVRFKQTAALNPATLLPETDDTLPIHHCLDTLDSLTSTRPDLTDQPLAQAEATLFTDGSSYIRDGKRYAGAAVVTLDSVIWAEPLPIGTSAQKAELIALTKALEWSKDKSVNIYTDSRYAFATLHVHGMIYRERGWLTAGGKAIKNAPEILALLTAVWLPKRVAVMHCKGHQKDDAPTSTGNRRADEVAREVAIRPLSTQATISAGKRTADGSEFEKRTADGSEFESPKKKAKVE

SEQ ID NO: 1442 - protein, 2098 aa, synthetic construct
MPAAKRVKLDGGDKKYSIGLDIGTNSVGWAVITDEYKVPSKKFKVLGNTDRHSIKKNLIGALLFDSGETAEATRLKRTARRRYTRRKNRICYLQEIFSNEMAKVDDSFFHRLEESFLVEEDKKHERHPIFGNIVDEVAYHEKYPTIYHLRKKLVDSTDKADLRLIYLALAHMIKFRGHFLIEGDLNPDNSDVDKLFIQLVQTYNQLFEENPINASGVDAKAILSARLSKSRRLENLIAQLPGEKKNGLFGNLIALSLGLTPNFKSNFDLAEDAKLQLSKDTYDDDLDNLLAQIGDQYADLFLAAKNLSDAILLSDILRVNTEITKAPLSASMIKRYDEHHQDLTLLKALVRQQLPEKYKEIFFDQSKNGYAGYIDGGASQEEFYKFIKPILEKMDGTEELLVKLNREDLLRKQRTFDNGSIPHQIHLGELHAILRRQEDFYPFLKDNREKIEKILTFRIPYYVGPLARGNSRFAWMTRKSEETITPWNFEEVVDKGASAQSFIERMTNFDKNLPNEKVLPKHSLLYEYFTVYNELTKVKYVTEGMRKPAFLSGEQKKAIVDLLFKTNRKVTVKQLKEDYFKKIECFDSVEISGVEDRFNASLGTYHDLLKIIKDKDFLDNEENEDILEDIVLTLTLFEDREMIEERLKTYAHLFDDKVMKQLKRRRYTGWGRLSRKLINGIRDKQSGKTILDFLKSDGFANRNFMQLIHDDSLTFKEDIQKAQVSGQGDSLHEHIANLAGSPAIKKGILQTVKVVDELVKVMGRHKPENIVIEMARENQTTQKGQKNSRERMKRIEEGIKELGSQILKEHPVENTQLQNEKLYLYYLQNGRDMYVDQELDINRLSDYDVDHIVPQSFLKDDSIDNKVLTRSDKARGKSDNVPSEEVVKKMKNYWRQLLNAKLITQRKFDNLTKAERGGLSELDKAGFIKRQLVETRQITKHVAQILDSRMNTKYDENDKLIREVKVITLKSKLVSDFRKDFQFYKVREINNYHHAHDAYLNAVVGTALIKKYPKLESEFVYGDYKVYDVRKMIAKSEQEIGKATAKYFFYSNIMNFFKTEITLANGEIRKRPLIETNGETGEIVWDKGRDFATVRKVLSMPQVNIVKKTEVQTGGFSKESILPKRNSDKLIARKKDWDPKKYGGFDSPTVAYSVLVVAKVEKGKSKKLKSVKELLGITIMERSSFEKNPIDFLEAKGYKEVKKDLIIKLPKYSLFELENGRKRMLASAGELQKGNELALPSKYVNFLYLASHYEKLKGSPEDNEQKQLFVEQHKHYLDEIIEQISEFSKRVILADANLDKVLSAYNKHRDKPIREQAENIIHLFTLTNLGAPAAFKYFDTTIDRKRYTSTKEVLDATLIHQSITGLYETRIDLSQLGGDGGGGSGGGEAAAKGGTAPLEEEYRLFLEAPIQNVTLLEQWKREIPKVWAEINPPGLASTQAPIHVQLLSTALPVRVRQYPITLEAKRSLRETIRKFRAAGILRPVHSPWNTPLLPVRKSGTSEYRMVQDLREVNKRVETIHPTVPNPYTLLSLLPPDRIWYSVLDLKDAFFCIPLAPESQLIFAFEWADAEEGESGQLTWTRLPQGFKNSPTLFNEALNRDLQGFRLDHPSVSLLQYVDDLLIAADTQAACLSATRDLLMTLAELGYRVSGKKAQLCQEEVTYLGFKIHKGSRSLSNSRTQAILQIPVPKTKRQVREFLGKIGYCRLFIPGFAELAQPLYAATRPGNDPLVWGEKEEEAFQSLKLALTQPPALALPSLDKPFQLFVEETSGAAKGVLTQALGPWKRPVAYLSKRLDPVAAGWPRCLRAIAAAALLTREASKLTFGQDIEITSSHNLESLLRSPPDKWLTNARITQYQVLLLDPPRVRFKQTAALNPATLLPETDDTLPIHHCLDTLDSLTSTRPDLTDQPLAQAEATLFTDGSSYIRDGKRYAGAAVVTLDSVIWAEPLPIGTSAQKAELIALTKALEWSKDKSVNIYTDSRYAFATLHVHGMIYRERGWLTAGGKAIKNAPEILALLTAVWLPKRVAVMHCKGHQKDDAPTSTGNRRADEVAREVAIRPLSTQATISAGKRTADGSEFEKRTADGSEFESPKKKAKVE

SEQ ID NO: 1443 - protein, 2093 aa, synthetic construct
MPAAKRVKLDGGDKKYSIGLDIGTNSVGWAVITDEYKVPSKKFKVLGNTDRHSIKKNLIGALLFDSGETAEATRLKRTARRRYTRRKNRICYLQEIFSNEMAKVDDSFFHRLEESFLVEEDKKHERHPIFGNIVDEVAYHEKYPTIYHLRKKLVDSTDKADLRLIYLALAHMIKFRGHFLIEGDLNPDNSDVDKLFIQLVQTYNQLFEENPINASGVDAKAILSARLSKSRRLENLIAQLPGEKKNGLFGNLIALSLGLTPNFKSNFDLAEDAKLQLSKDTYDDDLDNLLAQIGDQYADLFLAAKNLSDAILLSDILRVNTEITKAPLSASMIKRYDEHHQDLTLLKALVRQQLPEKYKEIFFDQSKNGYAGYIDGGASQEEFYKFIKPILEKMDGTEELLVKLNREDLLRKQRTFDNGSIPHQIHLGELHAILRRQEDFYPFLKDNREKIEKILTFRIPYYVGPLARGNSRFAWMTRKSEETITPWNFEEVVDKGASAQSFIERMTNFDKNLPNEKVLPKHSLLYEYFTVYNELTKVKYVTEGMRKPAFLSGEQKKAIVDLLFKTNRKVTVKQLKEDYFKKIECFDSVEISGVEDRFNASLGTYHDLLKIIKDKDFLDNEENEDILEDIVLTLTLFEDREMIEERLKTYAHLFDDKVMKQLKRRRYTGWGRLSRKLINGIRDKQSGKTILDFLKSDGFANRNFMQLIHDDSLTFKEDIQKAQVSGQGDSLHEHIANLAGSPAIKKGILQTVKVVDELVKVMGRHKPENIVIEMARENQTTQKGQKNSRERMKRIEEGIKELGSQILKEHPVENTQLQNEKLYLYYLQNGRDMYVDQELDINRLSDYDVDHIVPQSFLKDDSIDNKVLTRSDKARGKSDNVPSEEVVKKMKNYWRQLLNAKLITQRKFDNLTKAERGGLSELDKAGFIKRQLVETRQITKHVAQILDSRMNTKYDENDKLIREVKVITLKSKLVSDFRKDFQFYKVREINNYHHAHDAYLNAVVGTALIKKYPKLESEFVYGDYKVYDVRKMIAKSEQEIGKATAKYFFYSNIMNFFKTEITLANGEIRKRPLIETNGETGEIVWDKGRDFATVRKVLSMPQVNIVKKTEVQTGGFSKESILPKRNSDKLIARKKDWDPKKYGGFDSPTVAYSVLVVAKVEKGKSKKLKSVKELLGITIMERSSFEKNPIDFLEAKGYKEVKKDLIIKLPKYSLFELENGRKRMLASAGELQKGNELALPSKYVNFLYLASHYEKLKGSPEDNEQKQLFVEQHKHYLDEIIEQISEFSKRVILADANLDKVLSAYNKHRDKPIREQAENIIHLFTLTNLGAPAAFKYFDTTIDRKRYTSTKEVLDATLIHQSITGLYETRIDLSQLGGDGGGSSGSSGGTAPLEEEYRLFLEAPIQNVTLLEQWKREIPKVWAEINPPGLASTQAPIHVQLLSTALPVRVRQYPITLEAKRSLRETIRKFRAAGILRPVHSPWNTPLLPVRKSGTSEYRMVQDLREVNKRVETIHPTVPNPYTLLSLLPPDRIWYSVLDLKDAFFCIPLAPESQLIFAFEWADAEEGESGQLTWTRLPQGFKNSPTLFNEALNRDLQGFRLDHPSVSLLQYVDDLLIAADTQAACLSATRDLLMTLAELGYRVSGKKAQLCQEEVTYLGFKIHKGSRSLSNSRTQAILQIPVPKTKRQVREFLGKIGYCRLFIPGFAELAQPLYAATRPGNDPLVWGEKEEEAFQSLKLALTQPPALALPSLDKPFQLFVEETSGAAKGVLTQALGPWKRPVAYLSKRLDPVAAGWPRCLRAIAAAALLTREASKLTFGQDIEITSSHNLESLLRSPPDKWLTNARITQYQVLLLDPPRVRFKQTAALNPATLLPETDDTLPIHHCLDTLDSLTSTRPDLTDQPLAQAEATLFTDGSSYIRDGKRYAGAAVVTLDSVIWAEPLPIGTSAQKAELIALTKALEWSKDKSVNIYTDSRYAFATLHVHGMIYRERGWLTAGGKAIKNAPEILALLTAVWLPKRVAVMHCKGHQKDDAPTSTGNRRADEVAREVAIRPLSTQATISAGKRTADGSEFEKRTADGSEFESPKKKAKVE

SEQ ID NO: 1444 - protein, 2093 aa, synthetic construct
MPAAKRVKLDGGDKKYSIGLDIGTNSVGWAVITDEYKVPSKKFKVLGNTDRHSIKKNLIGALLFDSGETAEATRLKRTARRRYTRRKNRICYLQEIFSNEMAKVDDSFFHRLEESFLVEEDKKHERHPIFGNIVDEVAYHEKYPTIYHLRKKLVDSTDKADLRLIYLALAHMIKFRGHFLIEGDLNPDNSDVDKLFIQLVQTYNQLFEENPINASGVDAKAILSARLSKSRRLENLIAQLPGEKKNGLFGNLIALSLGLTPNFKSNFDLAEDAKLQLSKDTYDDDLDNLLAQIGDQYADLFLAAKNLSDAILLSDILRVNTEITKAPLSASMIKRYDEHHQDLTLLKALVRQQLPEKYKEIFFDQSKNGYAGYIDGGASQEEFYKFIKPILEKMDGTEELLVKLNREDLLRKQRTFDNGSIPHQIHLGELHAILRRQEDFYPFLKDNREKIEKILTFRIPYYVGPLARGNSRFAWMTRKSEETITPWNFEEVVDKGASAQSFIERMTNFDKNLPNEKVLPKHSLLYEYFTVYNELTKVKYVTEGMRKPAFLSGEQKKAIVDLLFKTNRKVTVKQLKEDYFKKIECFDSVEISGVEDRFNASLGTYHDLLKIIKDKDFLDNEENEDILEDIVLTLTLFEDREMIEERLKTYAHLFDDKVMKQLKRRRYTGWGRLSRKLINGIRDKQSGKTILDFLKSDGFANRNFMQLIHDDSLTFKEDIQKAQVSGQGDSLHEHIANLAGSPAIKKGILQTVKVVDELVKVMGRHKPENIVIEMARENQTTQKGQKNSRERMKRIEEGIKELGSQILKEHPVENTQLQNEKLYLYYLQNGRDMYVDQELDINRLSDYDVDHIVPQSFLKDDSIDNKVLTRSDKARGKSDNVPSEEVVKKMKNYWRQLLNAKLITQRKFDNLTKAERGGLSELDKAGFIKRQLVETRQITKHVAQILDSRMNTKYDENDKLIREVKVITLKSKLVSDFRKDFQFYKVREINNYHHAHDAYLNAVVGTALIKKYPKLESEFVYGDYKVYDVRKMIAKSEQEIGKATAKYFFYSNIMNFFKTEITLANGEIRKRPLIETNGETGEIVWDKGRDFATVRKVLSMPQVNIVKKTEVQTGGFSKESILPKRNSDKLIARKKDWDPKKYGGFDSPTVAYSVLVVAKVEKGKSKKLKSVKELLGITIMERSSFEKNPIDFLEAKGYKEVKKDLIIKLPKYSLFELENGRKRMLASAGELQKGNELALPSKYVNFLYLASHYEKLKGSPEDNEQKQLFVEQHKHYLDEIIEQISEFSKRVILADANLDKVLSAYNKHRDKPIREQAENIIHLFTLTNLGAPAAFKYFDTTIDRKRYTSTKEVLDATLIHQSITGLYETRIDLSQLGGDGGGGGGSSGGTAPLEEEYRLFLEAPIQNVTLLEQWKREIPKVWAEINPPGLASTQAPIHVQLLSTALPVRVRQYPITLEAKRSLRETIRKFRAAGILRPVHSPWNTPLLPVRKSGTSEYRMVQDLREVNKRVETIHPTVPNPYTLLSLLPPDRIWYSVLDLKDAFFCIPLAPESQLIFAFEWADAEEGESGQLTWTRLPQGFKNSPTLFNEALNRDLQGFRLDHPSVSLLQYVDDLLIAADTQAACLSATRDLLMTLAELGYRVSGKKAQLCQEEVTYLGFKIHKGSRSLSNSRTQAILQIPVPKTKRQVREFLGKIGYCRLFIPGFAELAQPLYAATRPGNDPLVWGEKEEEAFQSLKLALTQPPALALPSLDKPFQLFVEETSGAAKGVLTQALGPWKRPVAYLSKRLDPVAAGWPRCLRAIAAAALLTREASKLTFGQDIEITSSHNLESLLRSPPDKWLTNARITQYQVLLLDPPRVRFKQTAALNPATLLPETDDTLPIHHCLDTLDSLTSTRPDLTDQPLAQAEATLFTDGSSYIRDGKRYAGAAVVTLDSVIWAEPLPIGTSAQKAELIALTKALEWSKDKSVNIYTDSRYAFATLHVHGMIYRERGWLTAGGKAIKNAPEILALLTAVWLPKRVAVMHCKGHQKDDAPTSTGNRRADEVAREVAIRPLSTQATISAGKRTADGSEFEKRTADGSEFESPKKKAKVE

SEQ ID NO: 1445 - protein, 2093 aa, synthetic construct
MPAAKRVKLDGGDKKYSIGLDIGTNSVGWAVITDEYKVPSKKFKVLGNTDRHSIKKNLIGALLFDSGETAEATRLKRTARRRYTRRKNRICYLQEIFSNEMAKVDDSFFHRLEESFLVEEDKKHERHPIFGNIVDEVAYHEKYPTIYHLRKKLVDSTDKADLRLIYLALAHMIKFRGHFLIEGDLNPDNSDVDKLFIQLVQTYNQLFEENPINASGVDAKAILSARLSKSRRLENLIAQLPGEKKNGLFGNLIALSLGLTPNFKSNFDLAEDAKLQLSKDTYDDDLDNLLAQIGDQYADLFLAAKNLSDAILLSDILRVNTEITKAPLSASMIKRYDEHHQDLTLLKALVRQQLPEKYKEIFFDQSKNGYAGYIDGGASQEEFYKFIKPILEKMDGTEELLVKLNREDLLRKQRTFDNGSIPHQIHLGELHAILRRQEDFYPFLKDNREKIEKILTFRIPYYVGPLARGNSRFAWMTRKSEETITPWNFEEVVDKGASAQSFIERMTNFDKNLPNEKVLPKHSLLYEYFTVYNELTKVKYVTEGMRKPAFLSGEQKKAIVDLLFKTNRKVTVKQLKEDYFKKIECFDSVEISGVEDRFNASLGTYHDLLKIIKDKDFLDNEENEDILEDIVLTLTLFEDREMIEERLKTYAHLFDDKVMKQLKRRRYTGWGRLSRKLINGIRDKQSGKTILDFLKSDGFANRNFMQLIHDDSLTFKEDIQKAQVSGQGDSLHEHIANLAGSPAIKKGILQTVKVVDELVKVMGRHKPENIVIEMARENQTTQKGQKNSRERMKRIEEGIKELGSQILKEHPVENTQLQNEKLYLYYLQNGRDMYVDQELDINRLSDYDVDHIVPQSFLKDDSIDNKVLTRSDKARGKSDNVPSEEVVKKMKNYWRQLLNAKLITQRKFDNLTKAERGGLSELDKAGFIKRQLVETRQITKHVAQILDSRMNTKYDENDKLIREVKVITLKSKLVSDFRKDFQFYKVREINNYHHAHDAYLNAVVGTALIKKYPKLESEFVYGDYKVYDVRKMIAKSEQEIGKATAKYFFYSNIMNFFKTEITLANGEIRKRPLIETNGETGEIVWDKGRDFATVRKVLSMPQVNIVKKTEVQTGGFSKESILPKRNSDKLIARKKDWDPKKYGGFDSPTVAYSVLVVAKVEKGKSKKLKSVKELLGITIMERSSFEKNPIDFLEAKGYKEVKKDLIIKLPKYSLFELENGRKRMLASAGELQKGNELALPSKYVNFLYLASHYEKLKGSPEDNEQKQLFVEQHKHYLDEIIEQISEFSKRVILADANLDKVLSAYNKHRDKPIREQAENIIHLFTLTNLGAPAAFKYFDTTIDRKRYTSTKEVLDATLIHQSITGLYETRIDLSQLGGDGGGSSGGSGGTAPLEEEYRLFLEAPIQNVTLLEQWKREIPKVWAEINPPGLASTQAPIHVQLLSTALPVRVRQYPITLEAKRSLRETIRKFRAAGILRPVHSPWNTPLLPVRKSGTSEYRMVQDLREVNKRVETIHPTVPNPYTLLSLLPPDRIWYSVLDLKDAFFCIPLAPESQLIFAFEWADAEEGESGQLTWTRLPQGFKNSPTLFNEALNRDLQGFRLDHPSVSLLQYVDDLLIAADTQAACLSATRDLLMTLAELGYRVSGKKAQLCQEEVTYLGFKIHKGSRSLSNSRTQAILQIPVPKTKRQVREFLGKIGYCRLFIPGFAELAQPLYAATRPGNDPLVWGEKEEEAFQSLKLALTQPPALALPSLDKPFQLFVEETSGAAKGVLTQALGPWKRPVAYLSKRLDPVAAGWPRCLRAIAAAALLTREASKLTFGQDIEITSSHNLESLLRSPPDKWLTNARITQYQVLLLDPPRVRFKQTAALNPATLLPETDDTLPIHHCLDTLDSLTSTRPDLTDQPLAQAEATLFTDGSSYIRDGKRYAGAAVVTLDSVIWAEPLPIGTSAQKAELIALTKALEWSKDKSVNIYTDSRYAFATLHVHGMIYRERGWLTAGGKAIKNAPEILALLTAVWLPKRVAVMHCKGHQKDDAPTSTGNRRADEVAREVAIRPLSTQATISAGKRTADGSEFEKRTADGSEFESPKKKAKVE

SEQ ID NO: 1446 - protein, 2095 aa, synthetic construct
MPAAKRVKLDGGDKKYSIGLDIGTNSVGWAVITDEYKVPSKKFKVLGNTDRHSIKKNLIGALLFDSGETAEATRLKRTARRRYTRRKNRICYLQEIFSNEMAKVDDSFFHRLEESFLVEEDKKHERHPIFGNIVDEVAYHEKYPTIYHLRKKLVDSTDKADLRLIYLALAHMIKFRGHFLIEGDLNPDNSDVDKLFIQLVQTYNQLFEENPINASGVDAKAILSARLSKSRRLENLIAQLPGEKKNGLFGNLIALSLGLTPNFKSNFDLAEDAKLQLSKDTYDDDLDNLLAQIGDQYADLFLAAKNLSDAILLSDILRVNTEITKAPLSASMIKRYDEHHQDLTLLKALVRQQLPEKYKEIFFDQSKNGYAGYIDGGASQEEFYKFIKPILEKMDGTEELLVKLNREDLLRKQRTFDNGSIPHQIHLGELHAILRRQEDFYPFLKDNREKIEKILTFRIPYYVGPLARGNSRFAWMTRKSEETITPWNFEEVVDKGASAQSFIERMTNFDKNLPNEKVLPKHSLLYEYFTVYNELTKVKYVTEGMRKPAFLSGEQKKAIVDLLFKTNRKVTVKQLKEDYFKKIECFDSVEISGVEDRFNASLGTYHDLLKIIKDKDFLDNEENEDILEDIVLTLTLFEDREMIEERLKTYAHLFDDKVMKQLKRRRYTGWGRLSRKLINGIRDKQSGKTILDFLKSDGFANRNFMQLIHDDSLTFKEDIQKAQVSGQGDSLHEHIANLAGSPAIKKGILQTVKVVDELVKVMGRHKPENIVIEMARENQTTQKGQKNSRERMKRIEEGIKELGSQILKEHPVENTQLQNEKLYLYYLQNGRDMYVDQELDINRLSDYDVDHIVPQSFLKDDSIDNKVLTRSDKARGKSDNVPSEEVVKKMKNYWRQLLNAKLITQRKFDNLTKAERGGLSELDKAGFIKRQLVETRQITKHVAQILDSRMNTKYDENDKLIREVKVITLKSKLVSDFRKDFQFYKVREINNYHHAHDAYLNAVVGTALIKKYPKLESEFVYGDYKVYDVRKMIAKSEQEIGKATAKYFFYSNIMNFFKTEITLANGEIRKRPLIETNGETGEIVWDKGRDFATVRKVLSMPQVNIVKKTEVQTGGFSKESILPKRNSDKLIARKKDWDPKKYGGFDSPTVAYSVLVVAKVEKGKSKKLKSVKELLGITIMERSSFEKNPIDFLEAKGYKEVKKDLIIKLPKYSLFELENGRKRMLASAGELQKGNELALPSKYVNFLYLASHYEKLKGSPEDNEQKQLFVEQHKHYLDEIIEQISEFSKRVILADANLDKVLSAYNKHRDKPIREQAENIIHLFTLTNLGAPAAFKYFDTTIDRKRYTSTKEVLDATLIHQSITGLYETRIDLSQLGGDGGGGGEAAAKGGTAPLEEEYRLFLEAPIQNVTLLEQWKREIPKVWAEINPPGLASTQAPIHVQLLSTALPVRVRQYPITLEAKRSLRETIRKFRAAGILRPVHSPWNTPLLPVRKSGTSEYRMVQDLREVNKRVETIHPTVPNPYTLLSLLPPDRIWYSVLDLKDAFFCIPLAPESQLIFAFEWADAEEGESGQLTWTRLPQGFKNSPTLFNEALNRDLQGFRLDHPSVSLLQYVDDLLIAADTQAACLSATRDLLMTLAELGYRVSGKKAQLCQEEVTYLGFKIHKGSRSLSNSRTQAILQIPVPKTKRQVREFLGKIGYCRLFIPGFAELAQPLYAATRPGNDPLVWGEKEEEAFQSLKLALTQPPALALPSLDKPFQLFVEETSGAAKGVLTQALGPWKRPVAYLSKRLDPVAAGWPRCLRAIAAAALLTREASKLTFGQDIEITSSHNLESLLRSPPDKWLTNARITQYQVLLLDPPRVRFKQTAALNPATLLPETDDTLPIHHCLDTLDSLTSTRPDLTDQPLAQAEATLFTDGSSYIRDGKRYAGAAVVTLDSVIWAEPLPIGTSAQKAELIALTKALEWSKDKSVNIYTDSRYAFATLHVHGMIYRERGWLTAGGKAIKNAPEILALLTAVWLPKRVAVMHCKGHQKDDAPTSTGNRRADEVAREVAIRPLSTQATISAGKRTADGSEFEKRTADGSEFESPKKKAKVE

SEQ ID NO: 1447 - protein, 2096 aa, synthetic construct
MPAAKRVKLDGGDKKYSIGLDIGTNSVGWAVITDEYKVPSKKFKVLGNTDRHSIKKNLIGALLFDSGETAEATRLKRTARRRYTRRKNRICYLQEIFSNEMAKVDDSFFHRLEESFLVEEDKKHERHPIFGNIVDEVAYHEKYPTIYHLRKKLVDSTDKADLRLIYLALAHMIKFRGHFLIEGDLNPDNSDVDKLFIQLVQTYNQLFEENPINASGVDAKAILSARLSKSRRLENLIAQLPGEKKNGLFGNLIALSLGLTPNFKSNFDLAEDAKLQLSKDTYDDDLDNLLAQIGDQYADLFLAAKNLSDAILLSDILRVNTEITKAPLSASMIKRYDEHHQDLTLLKALVRQQLPEKYKEIFFDQSKNGYAGYIDGGASQEEFYKFIKPILEKMDGTEELLVKLNREDLLRKQRTFDNGSIPHQIHLGELHAILRRQEDFYPFLKDNREKIEKILTFRIPYYVGPLARGNSRFAWMTRKSEETITPWNFEEVVDKGASAQSFIERMTNFDKNLPNEKVLPKHSLLYEYFTVYNELTKVKYVTEGMRKPAFLSGEQKKAIVDLLFKTNRKVTVKQLKEDYFKKIECFDSVEISGVEDRFNASLGTYHDLLKIIKDKDFLDNEENEDILEDIVLTLTLFEDREMIEERLKTYAHLFDDKVMKQLKRRRYTGWGRLSRKLINGIRDKQSGKTILDFLKSDGFANRNFMQLIHDDSLTFKEDIQKAQVSGQGDSLHEHIANLAGSPAIKKGILQTVKVVDELVKVMGRHKPENIVIEMARENQTTQKGQKNSRERMKRIEEGIKELGSQILKEHPVENTQLQNEKLYLYYLQNGRDMYVDQELDINRLSDYDVDHIVPQSFLKDDSIDNKVLTRSDKARGKSDNVPSEEVVKKMKNYWRQLLNAKLITQRKFDNLTKAERGGLSELDKAGFIKRQLVETRQITKHVAQILDSRMNTKYDENDKLIREVKVITLKSKLVSDFRKDFQFYKVREINNYHHAHDAYLNAVVGTALIKKYPKLESEFVYGDYKVYDVRKMIAKSEQEIGKATAKYFFYSNIMNFFKTEITLANGEIRKRPLIETNGETGEIVWDKGRDFATVRKVLSMPQVNIVKKTEVQTGGFSKESILPKRNSDKLIARKKDWDPKKYGGFDSPTVAYSVLVVAKVEKGKSKKLKSVKELLGITIMERSSFEKNPIDFLEAKGYKEVKKDLIIKLPKYSLFELENGRKRMLASAGELQKGNELALPSKYVNFLYLASHYEKLKGSPEDNEQKQLFVEQHKHYLDEIIEQISEFSKRVILADANLDKVLSAYNKHRDKPIREQAENIIHLFTLTNLGAPAAFKYFDTTIDRKRYTSTKEVLDATLIHQSITGLYETRIDLSQLGGDGGPAPGGGGSSGGTAPLEEEYRLFLEAPIQNVTLLEQWKREIPKVWAEINPPGLASTQAPIHVQLLSTALPVRVRQYPITLEAKRSLRETIRKFRAAGILRPVHSPWNTPLLPVRKSGTSEYRMVQDLREVNKRVETIHPTVPNPYTLLSLLPPDRIWYSVLDLKDAFFCIPLAPESQLIFAFEWADAEEGESGQLTWTRLPQGFKNSPTLFNEALNRDLQGFRLDHPSVSLLQYVDDLLIAADTQAACLSATRDLLMTLAELGYRVSGKKAQLCQEEVTYLGFKIHKGSRSLSNSRTQAILQIPVPKTKRQVREFLGKIGYCRLFIPGFAELAQPLYAATRPGNDPLVWGEKEEEAFQSLKLALTQPPALALPSLDKPFQLFVEETSGAAKGVLTQALGPWKRPVAYLSKRLDPVAAGWPRCLRAIAAAALLTREASKLTFGQDIEITSSHNLESLLRSPPDKWLTNARITQYQVLLLDPPRVRFKQTAALNPATLLPETDDTLPIHHCLDTLDSLTSTRPDLTDQPLAQAEATLFTDGSSYIRDGKRYAGAAVVTLDSVIWAEPLPIGTSAQKAELIALTKALEWSKDKSVNIYTDSRYAFATLHVHGMIYRERGWLTAGGKAIKNAPEILALLTAVWLPKRVAVMHCKGHQKDDAPTSTGNRRADEVAREVAIRPLSTQATISAGKRTADGSEFEKRTADGSEFESPKKKAKVE

SEQ ID NO: 1448 - protein, 2129 aa, synthetic construct
MPAAKRVKLDGGDKKYSIGLDIGTNSVGWAVITDEYKVPSKKFKVLGNTDRHSIKKNLIGALLFDSGETAEATRLKRTARRRYTRRKNRICYLQEIFSNEMAKVDDSFFHRLEESFLVEEDKKHERHPIFGNIVDEVAYHEKYPTIYHLRKKLVDSTDKADLRLIYLALAHMIKFRGHFLIEGDLNPDNSDVDKLFIQLVQTYNQLFEENPINASGVDAKAILSARLSKSRRLENLIAQLPGEKKNGLFGNLIALSLGLTPNFKSNFDLAEDAKLQLSKDTYDDDLDNLLAQIGDQYADLFLAAKNLSDAILLSDILRVNTEITKAPLSASMIKRYDEHHQDLTLLKALVRQQLPEKYKEIFFDQSKNGYAGYIDGGASQEEFYKFIKPILEKMDGTEELLVKLNREDLLRKQRTFDNGSIPHQIHLGELHAILRRQEDFYPFLKDNREKIEKILTFRIPYYVGPLARGNSRFAWMTRKSEETITPWNFEEVVDKGASAQSFIERMTNFDKNLPNEKVLPKHSLLYEYFTVYNELTKVKYVTEGMRKPAFLSGEQKKAIVDLLFKTNRKVTVKQLKEDYFKKIECFDSVEISGVEDRFNASLGTYHDLLKIIKDKDFLDNEENEDILEDIVLTLTLFEDREMIEERLKTYAHLFDDKVMKQLKRRRYTGWGRLSRKLINGIRDKQSGKTILDFLKSDGFANRNFMQLIHDDSLTFKEDIQKAQVSGQGDSLHEHIANLAGSPAIKKGILQTVKVVDELVKVMGRHKPENIVIEMARENQTTQKGQKNSRERMKRIEEGIKELGSQILKEHPVENTQLQNEKLYLYYLQNGRDMYVDQELDINRLSDYDVDHIVPQSFLKDDSIDNKVLTRSDKARGKSDNVPSEEVVKKMKNYWRQLLNAKLITQRKFDNLTKAERGGLSELDKAGFIKRQLVETRQITKHVAQILDSRMNTKYDENDKLIREVKVITLKSKLVSDFRKDFQFYKVREINNYHHAHDAYLNAVVGTALIKKYPKLESEFVYGDYKVYDVRKMIAKSEQEIGKATAKYFFYSNIMNFFKTEITLANGEIRKRPLIETNGETGEIVWDKGRDFATVRKVLSMPQVNIVKKTEVQTGGFSKESILPKRNSDKLIARKKDWDPKKYGGFDSPTVAYSVLVVAKVEKGKSKKLKSVKELLGITIMERSSFEKNPIDFLEAKGYKEVKKDLIIKLPKYSLFELENGRKRMLASAGELQKGNELALPSKYVNFLYLASHYEKLKGSPEDNEQKQLFVEQHKHYLDEIIEQISEFSKRVILADANLDKVLSAYNKHRDKPIREQAENIIHLFTLTNLGAPAAFKYFDTTIDRKRYTSTKEVLDATLIHQSITGLYETRIDLSQLGGDGGAEAAAKEAAAKEAAAKEAAAKALEAEAAAKEAAAKEAAAKEAAAKAGGVLNLEEEYRLHEKPVPSSIDPSWLQLFPTVWAERAGMGLANQVPPVVVELRSGASPVAVRQYPMSKEAREGIRPHIQKFLDLGVLVPCRSPWNTPLLPVKKPGTNDYRPVQDLREINKRVQDIHPTVPNPYNLLSSLPPSYTWYSVLDLKDAFFCLRLHPNSQPLFAFEWKDPEKGNTGQLTWTRLPQGFKNSPTLFNEALHRDLAPFRALNPQVVLLQYVDDLLVAAPTYEDCKKGTQKLLQELSKLGYRVSAKKAQLCQREVTYLGYLLKEGKRWLTPARKATVMKIPVPTTPRQVREFLGKAGFCRLFIPGFASLAAPLYPLTKPSIPFIWTEEHQQAFDHIKKALLSAPALALPDLTKPFTLYIDERAGVARGVLTQTLGPWRRPVAYLSKKLDPVASGWPTCLKAVAAVALLLKDADKLTLGQNVTVIASHSLESIVRQPPDRWMTNARMTHYQSLLLNERVSFAPPAVLNPATLLPVESEATPVHRCSEILAEETGTRRDLEDQPLPGVPTWYTDGSSFITEGKRRAGAPIVDGKRTVWASSLPEGTSAQKAELVALTQALRLAEGKNINIYTDSRYAFATAHIHGAIYKQRGWLTSAGKDIKNKEEILALLEAIHLPRRVAIIHCPGHQRGSNPVATGNRRADEAAKQAALSTRVLAGTTKPAGKRTADGSEFEKRTADGSEFESPKKKAKVE

SEQ ID NO: 1449 - protein, 2092 aa, synthetic construct
MPAAKRVKLDGGDKKYSIGLDIGTNSVGWAVITDEYKVPSKKFKVLGNTDRHSIKKNLIGALLFDSGETAEATRLKRTARRRYTRRKNRICYLQEIFSNEMAKVDDSFFHRLEESFLVEEDKKHERHPIFGNIVDEVAYHEKYPTIYHLRKKLVDSTDKADLRLIYLALAHMIKFRGHFLIEGDLNPDNSDVDKLFIQLVQTYNQLFEENPINASGVDAKAILSARLSKSRRLENLIAQLPGEKKNGLFGNLIALSLGLTPNFKSNFDLAEDAKLQLSKDTYDDDLDNLLAQIGDQYADLFLAAKNLSDAILLSDILRVNTEITKAPLSASMIKRYDEHHQDLTLLKALVRQQLPEKYKEIFFDQSKNGYAGYIDGGASQEEFYKFIKPILEKMDGTEELLVKLNREDLLRKQRTFDNGSIPHQIHLGELHAILRRQEDFYPFLKDNREKIEKILTFRIPYYVGPLARGNSRFAWMTRKSEETITPWNFEEVVDKGASAQSFIERMTNFDKNLPNEKVLPKHSLLYEYFTVYNELTKVKYVTEGMRKPAFLSGEQKKAIVDLLFKTNRKVTVKQLKEDYFKKIECFDSVEISGVEDRFNASLGTYHDLLKIIKDKDFLDNEENEDILEDIVLTLTLFEDREMIEERLKTYAHLFDDKVMKQLKRRRYTGWGRLSRKLINGIRDKQSGKTILDFLKSDGFANRNFMQLIHDDSLTFKEDIQKAQVSGQGDSLHEHIANLAGSPAIKKGILQTVKVVDELVKVMGRHKPENIVIEMARENQTTQKGQKNSRERMKRIEEGIKELGSQILKEHPVENTQLQNEKLYLYYLQNGRDMYVDQELDINRLSDYDVDHIVPQSFLKDDSIDNKVLTRSDKARGKSDNVPSEEVVKKMKNYWRQLLNAKLITQRKFDNLTKAERGGLSELDKAGFIKRQLVETRQITKHVAQILDSRMNTKYDENDKLIREVKVITLKSKLVSDFRKDFQFYKVREINNYHHAHDAYLNAVVGTALIKKYPKLESEFVYGDYKVYDVRKMIAKSEQEIGKATAKYFFYSNIMNFFKTEITLANGEIRKRPLIETNGETGEIVWDKGRDFATVRKVLSMPQVNIVKKTEVQTGGFSKESILPKRNSDKLIARKKDWDPKKYGGFDSPTVAYSVLVVAKVEKGKSKKLKSVKELLGITIMERSSFEKNPIDFLEAKGYKEVKKDLIIKLPKYSLFELENGRKRMLASAGELQKGNELALPSKYVNFLYLASHYEKLKGSPEDNEQKQLFVEQHKHYLDEIIEQISEFSKRVILADANLDKVLSAYNKHRDKPIREQAENIIHLFTLTNLGAPAAFKYFDTTIDRKRYTSTKEVLDATLIHQSITGLYETRIDLSQLGGDGGGGSGGSGGSGGVLNLEEEYRLHEKPVPSSIDPSWLQLFPTVWAERAGMGLANQVPPVVVELRSGASPVAVRQYPMSKEAREGIRPHIQKFLDLGVLVPCRSPWNTPLLPVKKPGTNDYRPVQDLREINKRVQDIHPTVPNPYNLLSSLPPSYTWYSVLDLKDAFFCLRLHPNSQPLFAFEWKDPEKGNTGQLTWTRLPQGFKNSPTLFNEALHRDLAPFRALNPQVVLLQYVDDLLVAAPTYEDCKKGTQKLLQELSKLGYRVSAKKAQLCQREVTYLGYLLKEGKRWLTPARKATVMKIPVPTTPRQVREFLGKAGFCRLFIPGFASLAAPLYPLTKPSIPFIWTEEHQQAFDHIKKALLSAPALALPDLTKPFTLYIDERAGVARGVLTQTLGPWRRPVAYLSKKLDPVASGWPTCLKAVAAVALLLKDADKLTLGQNVTVIASHSLESIVRQPPDRWMTNARMTHYQSLLLNERVSFAPPAVLNPATLLPVESEATPVHRCSEILAEETGTRRDLEDQPLPGVPTWYTDGSSFITEGKRRAGAPIVDGKRTVWASSLPEGTSAQKAELVALTQALRLAEGKNINIYTDSRYAFATAHIHGAIYKQRGWLTSAGKDIKNKEEILALLEAIHLPRRVAIIHCPGHQRGSNPVATGNRRADEAAKQAALSTRVLAGTTKPAGKRTADGSEFEKRTADGSEFESPKKKAKVE

SEQ ID NO: 1450 - protein, 2089 aa, synthetic construct
MPAAKRVKLDGGDKKYSIGLDIGTNSVGWAVITDEYKVPSKKFKVLGNTDRHSIKKNLIGALLFDSGETAEATRLKRTARRRYTRRKNRICYLQEIFSNEMAKVDDSFFHRLEESFLVEEDKKHERHPIFGNIVDEVAYHEKYPTIYHLRKKLVDSTDKADLRLIYLALAHMIKFRGHFLIEGDLNPDNSDVDKLFIQLVQTYNQLFEENPINASGVDAKAILSARLSKSRRLENLIAQLPGEKKNGLFGNLIALSLGLTPNFKSNFDLAEDAKLQLSKDTYDDDLDNLLAQIGDQYADLFLAAKNLSDAILLSDILRVNTEITKAPLSASMIKRYDEHHQDLTLLKALVRQQLPEKYKEIFFDQSKNGYAGYIDGGASQEEFYKFIKPILEKMDGTEELLVKLNREDLLRKQRTFDNGSIPHQIHLGELHAILRRQEDFYPFLKDNREKIEKILTFRIPYYVGPLARGNSRFAWMTRKSEETITPWNFEEVVDKGASAQSFIERMTNFDKNLPNEKVLPKHSLLYEYFTVYNELTKVKYVTEGMRKPAFLSGEQKKAIVDLLFKTNRKVTVKQLKEDYFKKIECFDSVEISGVEDRFNASLGTYHDLLKIIKDKDFLDNEENEDILEDIVLTLTLFEDREMIEERLKTYAHLFDDKVMKQLKRRRYTGWGRLSRKLINGIRDKQSGKTILDFLKSDGFANRNFMQLIHDDSLTFKEDIQKAQVSGQGDSLHEHIANLAGSPAIKKGILQTVKVVDELVKVMGRHKPENIVIEMARENQTTQKGQKNSRERMKRIEEGIKELGSQILKEHPVENTQLQNEKLYLYYLQNGRDMYVDQELDINRLSDYDVDHIVPQSFLKDDSIDNKVLTRSDKARGKSDNVPSEEVVKKMKNYWRQLLNAKLITQRKFDNLTKAERGGLSELDKAGFIKRQLVETRQITKHVAQILDSRMNTKYDENDKLIREVKVITLKSKLVSDFRKDFQFYKVREINNYHHAHDAYLNAVVGTALIKKYPKLESEFVYGDYKVYDVRKMIAKSEQEIGKATAKYFFYSNIMNFFKTEITLANGEIRKRPLIETNGETGEIVWDKGRDFATVRKVLSMPQVNIVKKTEVQTGGFSKESILPKRNSDKLIARKKDWDPKKYGGFDSPTVAYSVLVVAKVEKGKSKKLKSVKELLGITIMERSSFEKNPIDFLEAKGYKEVKKDLIIKLPKYSLFELENGRKRMLASAGELQKGNELALPSKYVNFLYLASHYEKLKGSPEDNEQKQLFVEQHKHYLDEIIEQISEFSKRVILADANLDKVLSAYNKHRDKPIREQAENIIHLFTLTNLGAPAAFKYFDTTIDRKRYTSTKEVLDATLIHQSITGLYETRIDLSQLGGDGGGGSGSSGGVLNLEEEYRLHEKPVPSSIDPSWLQLFPTVWAERAGMGLANQVPPVVVELRSGASPVAVRQYPMSKEAREGIRPHIQKFLDLGVLVPCRSPWNTPLLPVKKPGTNDYRPVQDLREINKRVQDIHPTVPNPYNLLSSLPPSYTWYSVLDLKDAFFCLRLHPNSQPLFAFEWKDPEKGNTGQLTWTRLPQGFKNSPTLFNEALHRDLAPFRALNPQVVLLQYVDDLLVAAPTYEDCKKGTQKLLQELSKLGYRVSAKKAQLCQREVTYLGYLLKEGKRWLTPARKATVMKIPVPTTPRQVREFLGKAGFCRLFIPGFASLAAPLYPLTKPSIPFIWTEEHQQAFDHIKKALLSAPALALPDLTKPFTLYIDERAGVARGVLTQTLGPWRRPVAYLSKKLDPVASGWPTCLKAVAAVALLLKDADKLTLGQNVTVIASHSLESIVRQPPDRWMTNARMTHYQSLLLNERVSFAPPAVLNPATLLPVESEATPVHRCSEILAEETGTRRDLEDQPLPGVPTWYTDGSSFITEGKRRAGAPIVDGKRTVWASSLPEGTSAQKAELVALTQALRLAEGKNINIYTDSRYAFATAHIHGAIYKQRGWLTSAGKDIKNKEEILALLEAIHLPRRVAIIHCPGHQRGSNPVATGNRRADEAAKQAALSTRVLAGTTKPAGKRTADGSEFEKRTADGSEFESPKKKAKVE

SEQ ID NO: 1451 - protein, 2094 aa, synthetic construct
MPAAKRVKLDGGDKKYSIGLDIGTNSVGWAVITDEYKVPSKKFKVLGNTDRHSIKKNLIGALLFDSGETAEATRLKRTARRRYTRRKNRICYLQEIFSNEMAKVDDSFFHRLEESFLVEEDKKHERHPIFGNIVDEVAYHEKYPTIYHLRKKLVDSTDKADLRLIYLALAHMIKFRGHFLIEGDLNPDNSDVDKLFIQLVQTYNQLFEENPINASGVDAKAILSARLSKSRRLENLIAQLPGEKKNGLFGNLIALSLGLTPNFKSNFDLAEDAKLQLSKDTYDDDLDNLLAQIGDQYADLFLAAKNLSDAILLSDILRVNTEITKAPLSASMIKRYDEHHQDLTLLKALVRQQLPEKYKEIFFDQSKNGYAGYIDGGASQEEFYKFIKPILEKMDGTEELLVKLNREDLLRKQRTFDNGSIPHQIHLGELHAILRRQEDFYPFLKDNREKIEKILTFRIPYYVGPLARGNSRFAWMTRKSEETITPWNFEEVVDKGASAQSFIERMTNFDKNLPNEKVLPKHSLLYEYFTVYNELTKVKYVTEGMRKPAFLSGEQKKAIVDLLFKTNRKVTVKQLKEDYFKKIECFDSVEISGVEDRFNASLGTYHDLLKIIKDKDFLDNEENEDILEDIVLTLTLFEDREMIEERLKTYAHLFDDKVMKQLKRRRYTGWGRLSRKLINGIRDKQSGKTILDFLKSDGFANRNFMQLIHDDSLTFKEDIQKAQVSGQGDSLHEHIANLAGSPAIKKGILQTVKVVDELVKVMGRHKPENIVIEMARENQTTQKGQKNSRERMKRIEEGIKELGSQILKEHPVENTQLQNEKLYLYYLQNGRDMYVDQELDINRLSDYDVDHIVPQSFLKDDSIDNKVLTRSDKARGKSDNVPSEEVVKKMKNYWRQLLNAKLITQRKFDNLTKAERGGLSELDKAGFIKRQLVETRQITKHVAQILDSRMNTKYDENDKLIREVKVITLKSKLVSDFRKDFQFYKVREINNYHHAHDAYLNAVVGTALIKKYPKLESEFVYGDYKVYDVRKMIAKSEQEIGKATAKYFFYSNIMNFFKTEITLANGEIRKRPLIETNGETGEIVWDKGRDFATVRKVLSMPQVNIVKKTEVQTGGFSKESILPKRNSDKLIARKKDWDPKKYGGFDSPTVAYSVLVVAKVEKGKSKKLKSVKELLGITIMERSSFEKNPIDFLEAKGYKEVKKDLIIKLPKYSLFELENGRKRMLASAGELQKGNELALPSKYVNFLYLASHYEKLKGSPEDNEQKQLFVEQHKHYLDEIIEQISEFSKRVILADANLDKVLSAYNKHRDKPIREQAENIIHLFTLTNLGAPAAFKYFDTTIDRKRYTSTKEVLDATLIHQSITGLYETRIDLSQLGGDGGEAAAKGGGGGSGGVLNLEEEYRLHEKPVPSSIDPSWLQLFPTVWAERAGMGLANQVPPVVVELRSGASPVAVRQYPMSKEAREGIRPHIQKFLDLGVLVPCRSPWNTPLLPVKKPGTNDYRPVQDLREINKRVQDIHPTVPNPYNLLSSLPPSYTWYSVLDLKDAFFCLRLHPNSQPLFAFEWKDPEKGNTGQLTWTRLPQGFKNSPTLFNEALHRDLAPFRALNPQVVLLQYVDDLLVAAPTYEDCKKGTQKLLQELSKLGYRVSAKKAQLCQREVTYLGYLLKEGKRWLTPARKATVMKIPVPTTPRQVREFLGKAGFCRLFIPGFASLAAPLYPLTKPSIPFIWTEEHQQAFDHIKKALLSAPALALPDLTKPFTLYIDERAGVARGVLTQTLGPWRRPVAYLSKKLDPVASGWPTCLKAVAAVALLLKDADKLTLGQNVTVIASHSLESIVRQPPDRWMTNARMTHYQSLLLNERVSFAPPAVLNPATLLPVESEATPVHRCSEILAEETGTRRDLEDQPLPGVPTWYTDGSSFITEGKRRAGAPIVDGKRTVWASSLPEGTSAQKAELVALTQALRLAEGKNINIYTDSRYAFATAHIHGAIYKQRGWLTSAGKDIKNKEEILALLEAIHLPRRVAIIHCPGHQRGSNPVATGNRRADEAAKQAALSTRVLAGTTKPAGKRTADGSEFEKRTADGSEFESPKKKAKVE

SEQ ID NO: 1452 - protein, 2098 aa, synthetic construct
MPAAKRVKLDGGDKKYSIGLDIGTNSVGWAVITDEYKVPSKKFKVLGNTDRHSIKKNLIGALLFDSGETAEATRLKRTARRRYTRRKNRICYLQEIFSNEMAKVDDSFFHRLEESFLVEEDKKHERHPIFGNIVDEVAYHEKYPTIYHLRKKLVDSTDKADLRLIYLALAHMIKFRGHFLIEGDLNPDNSDVDKLFIQLVQTYNQLFEENPINASGVDAKAILSARLSKSRRLENLIAQLPGEKKNGLFGNLIALSLGLTPNFKSNFDLAEDAKLQLSKDTYDDDLDNLLAQIGDQYADLFLAAKNLSDAILLSDILRVNTEITKAPLSASMIKRYDEHHQDLTLLKALVRQQLPEKYKEIFFDQSKNGYAGYIDGGASQEEFYKFIKPILEKMDGTEELLVKLNREDLLRKQRTFDNGSIPHQIHLGELHAILRRQEDFYPFLKDNREKIEKILTFRIPYYVGPLARGNSRFAWMTRKSEETITPWNFEEVVDKGASAQSFIERMTNFDKNLPNEKVLPKHSLLYEYFTVYNELTKVKYVTEGMRKPAFLSGEQKKAIVDLLFKTNRKVTVKQLKEDYFKKIECFDSVEISGVEDRFNASLGTYHDLLKIIKDKDFLDNEENEDILEDIVLTLTLFEDREMIEERLKTYAHLFDDKVMKQLKRRRYTGWGRLSRKLINGIRDKQSGKTILDFLKSDGFANRNFMQLIHDDSLTFKEDIQKAQVSGQGDSLHEHIANLAGSPAIKKGILQTVKVVDELVKVMGRHKPENIVIEMARENQTTQKGQKNSRERMKRIEEGIKELGSQILKEHPVENTQLQNEKLYLYYLQNGRDMYVDQELDINRLSDYDVDHIVPQSFLKDDSIDNKVLTRSDKARGKSDNVPSEEVVKKMKNYWRQLLNAKLITQRKFDNLTKAERGGLSELDKAGFIKRQLVETRQITKHVAQILDSRMNTKYDENDKLIREVKVITLKSKLVSDFRKDFQFYKVREINNYHHAHDAYLNAVVGTALIKKYPKLESEFVYGDYKVYDVRKMIAKSEQEIGKATAKYFFYSNIMNFFKTEITLANGEIRKRPLIETNGETGEIVWDKGRDFATVRKVLSMPQVNIVKKTEVQTGGFSKESILPKRNSDKLIARKKDWDPKKYGGFDSPTVAYSVLVVAKVEKGKSKKLKSVKELLGITIMERSSFEKNPIDFLEAKGYKEVKKDLIIKLPKYSLFELENGRKRMLASAGELQKGNELALPSKYVNFLYLASHYEKLKGSPEDNEQKQLFVEQHKHYLDEIIEQISEFSKRVILADANLDKVLSAYNKHRDKPIREQAENIIHLFTLTNLGAPAAFKYFDTTIDRKRYTSTKEVLDATLIHQSITGLYETRIDLSQLGGDGGEAAAKEAAAKEAAAKGGVLNLEEEYRLHEKPVPSSIDPSWLQLFPTVWAERAGMGLANQVPPVVVELRSGASPVAVRQYPMSKEAREGIRPHIQKFLDLGVLVPCRSPWNTPLLPVKKPGTNDYRPVQDLREINKRVQDIHPTVPNPYNLLSSLPPSYTWYSVLDLKDAFFCLRLHPNSQPLFAFEWKDPEKGNTGQLTWTRLPQGFKNSPTLFNEALHRDLAPFRALNPQVVLLQYVDDLLVAAPTYEDCKKGTQKLLQELSKLGYRVSAKKAQLCQREVTYLGYLLKEGKRWLTPARKATVMKIPVPTTPRQVREFLGKAGFCRLFIPGFASLAAPLYPLTKPSIPFIWTEEHQQAFDHIKKALLSAPALALPDLTKPFTLYIDERAGVARGVLTQTLGPWRRPVAYLSKKLDPVASGWPTCLKAVAAVALLLKDADKLTLGQNVTVIASHSLESIVRQPPDRWMTNARMTHYQSLLLNERVSFAPPAVLNPATLLPVESEATPVHRCSEILAEETGTRRDLEDQPLPGVPTWYTDGSSFITEGKRRAGAPIVDGKRTVWASSLPEGTSAQKAELVALTQALRLAEGKNINIYTDSRYAFATAHIHGAIYKQRGWLTSAGKDIKNKEEILALLEAIHLPRRVAIIHCPGHQRGSNPVATGNRRADEAAKQAALSTRVLAGTTKPAGKRTADGSEFEKRTADGSEFESPKKKAKVE

SEQ ID NO: 1453 - protein, 2094 aa, synthetic construct
MPAAKRVKLDGGDKKYSIGLDIGTNSVGWAVITDEYKVPSKKFKVLGNTDRHSIKKNLIGALLFDSGETAEATRLKRTARRRYTRRKNRICYLQEIFSNEMAKVDDSFFHRLEESFLVEEDKKHERHPIFGNIVDEVAYHEKYPTIYHLRKKLVDSTDKADLRLIYLALAHMIKFRGHFLIEGDLNPDNSDVDKLFIQLVQTYNQLFEENPINASGVDAKAILSARLSKSRRLENLIAQLPGEKKNGLFGNLIALSLGLTPNFKSNFDLAEDAKLQLSKDTYDDDLDNLLAQIGDQYADLFLAAKNLSDAILLSDILRVNTEITKAPLSASMIKRYDEHHQDLTLLKALVRQQLPEKYKEIFFDQSKNGYAGYIDGGASQEEFYKFIKPILEKMDGTEELLVKLNREDLLRKQRTFDNGSIPHQIHLGELHAILRRQEDFYPFLKDNREKIEKILTFRIPYYVGPLARGNSRFAWMTRKSEETITPWNFEEVVDKGASAQSFIERMTNFDKNLPNEKVLPKHSLLYEYFTVYNELTKVKYVTEGMRKPAFLSGEQKKAIVDLLFKTNRKVTVKQLKEDYFKKIECFDSVEISGVEDRFNASLGTYHDLLKIIKDKDFLDNEENEDILEDIVLTLTLFEDREMIEERLKTYAHLFDDKVMKQLKRRRYTGWGRLSRKLINGIRDKQSGKTILDFLKSDGFANRNFMQLIHDDSLTFKEDIQKAQVSGQGDSLHEHIANLAGSPAIKKGILQTVKVVDELVKVMGRHKPENIVIEMARENQTTQKGQKNSRERMKRIEEGIKELGSQILKEHPVENTQLQNEKLYLYYLQNGRDMYVDQELDINRLSDYDVDHIVPQSFLKDDSIDNKVLTRSDKARGKSDNVPSEEVVKKMKNYWRQLLNAKLITQRKFDNLTKAERGGLSELDKAGFIKRQLVETRQITKHVAQILDSRMNTKYDENDKLIREVKVITLKSKLVSDFRKDFQFYKVREINNYHHAHDAYLNAVVGTALIKKYPKLESEFVYGDYKVYDVRKMIAKSEQEIGKATAKYFFYSNIMNFFKTEITLANGEIRKRPLIETNGETGEIVWDKGRDFATVRKVLSMPQVNIVKKTEVQTGGFSKESILPKRNSDKLIARKKDWDPKKYGGFDSPTVAYSVLVVAKVEKGKSKKLKSVKELLGITIMERSSFEKNPIDFLEAKGYKEVKKDLIIKLPKYSLFELENGRKRMLASAGELQKGNELALPSKYVNFLYLASHYEKLKGSPEDNEQKQLFVEQHKHYLDEIIEQISEFSKRVILADANLDKVLSAYNKHRDKPIREQAENIIHLFTLTNLGAPAAFKYFDTTIDRKRYTSTKEVLDATLIHQSITGLYETRIDLSQLGGDGGPAPAPAPAPAPGGVLNLEEEYRLHEKPVPSSIDPSWLQLFPTVWAERAGMGLANQVPPVVVELRSGASPVAVRQYPMSKEAREGIRPHIQKFLDLGVLVPCRSPWNTPLLPVKKPGTNDYRPVQDLREINKRVQDIHPTVPNPYNLLSSLPPSYTWYSVLDLKDAFFCLRLHPNSQPLFAFEWKDPEKGNTGQLTWTRLPQGFKNSPTLFNEALHRDLAPFRALNPQVVLLQYVDDLLVAAPTYEDCKKGTQKLLQELSKLGYRVSAKKAQLCQREVTYLGYLLKEGKRWLTPARKATVMKIPVPTTPRQVREFLGKAGFCRLFIPGFASLAAPLYPLTKPSIPFIWTEEHQQAFDHIKKALLSAPALALPDLTKPFTLYIDERAGVARGVLTQTLGPWRRPVAYLSKKLDPVASGWPTCLKAVAAVALLLKDADKLTLGQNVTVIASHSLESIVRQPPDRWMTNARMTHYQSLLLNERVSFAPPAVLNPATLLPVESEATPVHRCSEILAEETGTRRDLEDQPLPGVPTWYTDGSSFITEGKRRAGAPIVDGKRTVWASSLPEGTSAQKAELVALTQALRLAEGKNINIYTDSRYAFATAHIHGAIYKQRGWLTSAGKDIKNKEEILALLEAIHLPRRVAIIHCPGHQRGSNPVATGNRRADEAAKQAALSTRVLAGTTKPAGKRTADGSEFEKRTADGSEFESPKKKAKVE

SEQ ID NO: 1454 - protein, 2113 aa, synthetic construct
MPAAKRVKLDGGDKKYSIGLDIGTNSVGWAVITDEYKVPSKKFKVLGNTDRHSIKKNLIGALLFDSGETAEATRLKRTARRRYTRRKNRICYLQEIFSNEMAKVDDSFFHRLEESFLVEEDKKHERHPIFGNIVDEVAYHEKYPTIYHLRKKLVDSTDKADLRLIYLALAHMIKFRGHFLIEGDLNPDNSDVDKLFIQLVQTYNQLFEENPINASGVDAKAILSARLSKSRRLENLIAQLPGEKKNGLFGNLIALSLGLTPNFKSNFDLAEDAKLQLSKDTYDDDLDNLLAQIGDQYADLFLAAKNLSDAILLSDILRVNTEITKAPLSASMIKRYDEHHQDLTLLKALVRQQLPEKYKEIFFDQSKNGYAGYIDGGASQEEFYKFIKPILEKMDGTEELLVKLNREDLLRKQRTFDNGSIPHQIHLGELHAILRRQEDFYPFLKDNREKIEKILTFRIPYYVGPLARGNSRFAWMTRKSEETITPWNFEEVVDKGASAQSFIERMTNFDKNLPNEKVLPKHSLLYEYFTVYNELTKVKYVTEGMRKPAFLSGEQKKAIVDLLFKTNRKVTVKQLKEDYFKKIECFDSVEISGVEDRFNASLGTYHDLLKIIKDKDFLDNEENEDILEDIVLTLTLFEDREMIEERLKTYAHLFDDKVMKQLKRRRYTGWGRLSRKLINGIRDKQSGKTILDFLKSDGFANRNFMQLIHDDSLTFKEDIQKAQVSGQGDSLHEHIANLAGSPAIKKGILQTVKVVDELVKVMGRHKPENIVIEMARENQTTQKGQKNSRERMKRIEEGIKELGSQILKEHPVENTQLQNEKLYLYYLQNGRDMYVDQELDINRLSDYDVDHIVPQSFLKDDSIDNKVLTRSDKARGKSDNVPSEEVVKKMKNYWRQLLNAKLITQRKFDNLTKAERGGLSELDKAGFIKRQLVETRQITKHVAQILDSRMNTKYDENDKLIREVKVITLKSKLVSDFRKDFQFYKVREINNYHHAHDAYLNAVVGTALIKKYPKLESEFVYGDYKVYDVRKMIAKSEQEIGKATAKYFFYSNIMNFFKTEITLANGEIRKRPLIETNGETGEIVWDKGRDFATVRKVLSMPQVNIVKKTEVQTGGFSKESILPKRNSDKLIARKKDWDPKKYGGFDSPTVAYSVLVVAKVEKGKSKKLKSVKELLGITIMERSSFEKNPIDFLEAKGYKEVKKDLIIKLPKYSLFELENGRKRMLASAGELQKGNELALPSKYVNFLYLASHYEKLKGSPEDNEQKQLFVEQHKHYLDEIIEQISEFSKRVILADANLDKVLSAYNKHRDKPIREQAENIIHLFTLTNLGAPAAFKYFDTTIDRKRYTSTKEVLDATLIHQSITGLYETRIDLSQLGGDGGEAAAKEAAAKEAAAKEAAAKEAAAKEAAAKGGVLNLEEEYRLHEKPVPSSIDPSWLQLFPTVWAERAGMGLANQVPPVVVELRSGASPVAVRQYPMSKEAREGIRPHIQKFLDLGVLVPCRSPWNTPLLPVKKPGTNDYRPVQDLREINKRVQDIHPTVPNPYNLLSSLPPSYTWYSVLDLKDAFFCLRLHPNSQPLFAFEWKDPEKGNTGQLTWTRLPQGFKNSPTLFNEALHRDLAPFRALNPQVVLLQYVDDLLVAAPTYEDCKKGTQKLLQELSKLGYRVSAKKAQLCQREVTYLGYLLKEGKRWLTPARKATVMKIPVPTTPRQVREFLGKAGFCRLFIPGFASLAAPLYPLTKPSIPFIWTEEHQQAFDHIKKALLSAPALALPDLTKPFTLYIDERAGVARGVLTQTLGPWRRPVAYLSKKLDPVASGWPTCLKAVAAVALLLKDADKLTLGQNVTVIASHSLESIVRQPPDRWMTNARMTHYQSLLLNERVSFAPPAVLNPATLLPVESEATPVHRCSEILAEETGTRRDLEDQPLPGVPTWYTDGSSFITEGKRRAGAPIVDGKRTVWASSLPEGTSAQKAELVALTQALRLAEGKNINIYTDSRYAFATAHIHGAIYKQRGWLTSAGKDIKNKEEILALLEAIHLPRRVAIIHCPGHQRGSNPVATGNRRADEAAKQAALSTRVLAGTTKPAGKRTADGSEFEKRTADGSEFESPKKKAKVE

SEQ ID NO: 1455 - protein, 2094 aa, synthetic construct
MPAAKRVKLDGGDKKYSIGLDIGTNSVGWAVITDEYKVPSKKFKVLGNTDRHSIKKNLIGALLFDSGETAEATRLKRTARRRYTRRKNRICYLQEIFSNEMAKVDDSFFHRLEESFLVEEDKKHERHPIFGNIVDEVAYHEKYPTIYHLRKKLVDSTDKADLRLIYLALAHMIKFRGHFLIEGDLNPDNSDVDKLFIQLVQTYNQLFEENPINASGVDAKAILSARLSKSRRLENLIAQLPGEKKNGLFGNLIALSLGLTPNFKSNFDLAEDAKLQLSKDTYDDDLDNLLAQIGDQYADLFLAAKNLSDAILLSDILRVNTEITKAPLSASMIKRYDEHHQDLTLLKALVRQQLPEKYKEIFFDQSKNGYAGYIDGGASQEEFYKFIKPILEKMDGTEELLVKLNREDLLRKQRTFDNGSIPHQIHLGELHAILRRQEDFYPFLKDNREKIEKILTFRIPYYVGPLARGNSRFAWMTRKSEETITPWNFEEVVDKGASAQSFIERMTNFDKNLPNEKVLPKHSLLYEYFTVYNELTKVKYVTEGMRKPAFLSGEQKKAIVDLLFKTNRKVTVKQLKEDYFKKIECFDSVEISGVEDRFNASLGTYHDLLKIIKDKDFLDNEENEDILEDIVLTLTLFEDREMIEERLKTYAHLFDDKVMKQLKRRRYTGWGRLSRKLINGIRDKQSGKTILDFLKSDGFANRNFMQLIHDDSLTFKEDIQKAQVSGQGDSLHEHIANLAGSPAIKKGILQTVKVVDELVKVMGRHKPENIVIEMARENQTTQKGQKNSRERMKRIEEGIKELGSQILKEHPVENTQLQNEKLYLYYLQNGRDMYVDQELDINRLSDYDVDHIVPQSFLKDDSIDNKVLTRSDKARGKSDNVPSEEVVKKMKNYWRQLLNAKLITQRKFDNLTKAERGGLSELDKAGFIKRQLVETRQITKHVAQILDSRMNTKYDENDKLIREVKVITLKSKLVSDFRKDFQFYKVREINNYHHAHDAYLNAVVGTALIKKYPKLESEFVYGDYKVYDVRKMIAKSEQEIGKATAKYFFYSNIMNFFKTEITLANGEIRKRPLIETNGETGEIVWDKGRDFATVRKVLSMPQVNIVKKTEVQTGGFSKESILPKRNSDKLIARKKDWDPKKYGGFDSPTVAYSVLVVAKVEKGKSKKLKSVKELLGITIMERSSFEKNPIDFLEAKGYKEVKKDLIIKLPKYSLFELENGRKRMLASAGELQKGNELALPSKYVNFLYLASHYEKLKGSPEDNEQKQLFVEQHKHYLDEIIEQISEFSKRVILADANLDKVLSAYNKHRDKPIREQAENIIHLFTLTNLGAPAAFKYFDTTIDRKRYTSTKEVLDATLIHQSITGLYETRIDLSQLGGDGGEAAAKGGGGSSGGVLNLEEEYRLHEKPVPSSIDPSWLQLFPTVWAERAGMGLANQVPPVVVELRSGASPVAVRQYPMSKEAREGIRPHIQKFLDLGVLVPCRSPWNTPLLPVKKPGTNDYRPVQDLREINKRVQDIHPTVPNPYNLLSSLPPSYTWYSVLDLKDAFFCLRLHPNSQPLFAFEWKDPEKGNTGQLTWTRLPQGFKNSPTLFNEALHRDLAPFRALNPQVVLLQYVDDLLVAAPTYEDCKKGTQKLLQELSKLGYRVSAKKAQLCQREVTYLGYLLKEGKRWLTPARKATVMKIPVPTTPRQVREFLGKAGFCRLFIPGFASLAAPLYPLTKPSIPFIWTEEHQQAFDHIKKALLSAPALALPDLTKPFTLYIDERAGVARGVLTQTLGPWRRPVAYLSKKLDPVASGWPTCLKAVAAVALLLKDADKLTLGQNVTVIASHSLESIVRQPPDRWMTNARMTHYQSLLLNERVSFAPPAVLNPATLLPVESEATPVHRCSEILAEETGTRRDLEDQPLPGVPTWYTDGSSFITEGKRRAGAPIVDGKRTVWASSLPEGTSAQKAELVALTQALRLAEGKNINIYTDSRYAFATAHIHGAIYKQRGWLTSAGKDIKNKEEILALLEAIHLPRRVAIIHCPGHQRGSNPVATGNRRADEAAKQAALSTRVLAGTTKPAGKRTADGSEFEKRTADGSEFESPKKKAKVE

SEQ ID NO: 1456 - protein, 2094 aa, synthetic construct
MPAAKRVKLDGGDKKYSIGLDIGTNSVGWAVITDEYKVPSKKFKVLGNTDRHSIKKNLIGALLFDSGETAEATRLKRTARRRYTRRKNRICYLQEIFSNEMAKVDDSFFHRLEESFLVEEDKKHERHPIFGNIVDEVAYHEKYPTIYHLRKKLVDSTDKADLRLIYLALAHMIKFRGHFLIEGDLNPDNSDVDKLFIQLVQTYNQLFEENPINASGVDAKAILSARLSKSRRLENLIAQLPGEKKNGLFGNLIALSLGLTPNFKSNFDLAEDAKLQLSKDTYDDDLDNLLAQIGDQYADLFLAAKNLSDAILLSDILRVNTEITKAPLSASMIKRYDEHHQDLTLLKALVRQQLPEKYKEIFFDQSKNGYAGYIDGGASQEEFYKFIKPILEKMDGTEELLVKLNREDLLRKQRTFDNGSIPHQIHLGELHAILRRQEDFYPFLKDNREKIEKILTFRIPYYVGPLARGNSRFAWMTRKSEETITPWNFEEVVDKGASAQSFIERMTNFDKNLPNEKVLPKHSLLYEYFTVYNELTKVKYVTEGMRKPAFLSGEQKKAIVDLLFKTNRKVTVKQLKEDYFKKIECFDSVEISGVEDRFNASLGTYHDLLKIIKDKDFLDNEENEDILEDIVLTLTLFEDREMIEERLKTYAHLFDDKVMKQLKRRRYTGWGRLSRKLINGIRDKQSGKTILDFLKSDGFANRNFMQLIHDDSLTFKEDIQKAQVSGQGDSLHEHIANLAGSPAIKKGILQTVKVVDELVKVMGRHKPENIVIEMARENQTTQKGQKNSRERMKRIEEGIKELGSQILKEHPVENTQLQNEKLYLYYLQNGRDMYVDQELDINRLSDYDVDHIVPQSFLKDDSIDNKVLTRSDKARGKSDNVPSEEVVKKMKNYWRQLLNAKLITQRKFDNLTKAERGGLSELDKAGFIKRQLVETRQITKHVAQILDSRMNTKYDENDKLIREVKVITLKSKLVSDFRKDFQFYKVREINNYHHAHDAYLNAVVGTALIKKYPKLESEFVYGDYKVYDVRKMIAKSEQEIGKATAKYFFYSNIMNFFKTEITLANGEIRKRPLIETNGETGEIVWDKGRDFATVRKVLSMPQVNIVKKTEVQTGGFSKESILPKRNSDKLIARKKDWDPKKYGGFDSPTVAYSVLVVAKVEKGKSKKLKSVKELLGITIMERSSFEKNPIDFLEAKGYKEVKKDLIIKLPKYSLFELENGRKRMLASAGELQKGNELALPSKYVNFLYLASHYEKLKGSPEDNEQKQLFVEQHKHYLDEIIEQISEFSKRVILADANLDKVLSAYNKHRDKPIREQAENIIHLFTLTNLGAPAAFKYFDTTIDRKRYTSTKEVLDATLIHQSITGLYETRIDLSQLGGDGGGGGGGSEAAAKGGVLNLEEEYRLHEKPVPSSIDPSWLQLFPTVWAERAGMGLANQVPPVVVELRSGASPVAVRQYPMSKEAREGIRPHIQKFLDLGVLVPCRSPWNTPLLPVKKPGTNDYRPVQDLREINKRVQDIHPTVPNPYNLLSSLPPSYTWYSVLDLKDAFFCLRLHPNSQPLFAFEWKDPEKGNTGQLTWTRLPQGFKNSPTLFNEALHRDLAPFRALNPQVVLLQYVDDLLVAAPTYEDCKKGTQKLLQELSKLGYRVSAKKAQLCQREVTYLGYLLKEGKRWLTPARKATVMKIPVPTTPRQVREFLGKAGFCRLFIPGFASLAAPLYPLTKPSIPFIWTEEHQQAFDHIKKALLSAPALALPDLTKPFTLYIDERAGVARGVLTQTLGPWRRPVAYLSKKLDPVASGWPTCLKAVAAVALLLKDADKLTLGQNVTVIASHSLESIVRQPPDRWMTNARMTHYQSLLLNERVSFAPPAVLNPATLLPVESEATPVHRCSEILAEETGTRRDLEDQPLPGVPTWYTDGSSFITEGKRRAGAPIVDGKRTVWASSLPEGTSAQKAELVALTQALRLAEGKNINIYTDSRYAFATAHIHGAIYKQRGWLTSAGKDIKNKEEILALLEAIHLPRRVAIIHCPGHQRGSNPVATGNRRADEAAKQAALSTRVLAGTTKPAGKRTADGSEFEKRTADGSEFESPKKKAKVE

SEQ ID NO: 1457 - protein, 2094 aa, synthetic construct
MPAAKRVKLDGGDKKYSIGLDIGTNSVGWAVITDEYKVPSKKFKVLGNTDRHSIKKNLIGALLFDSGETAEATRLKRTARRRYTRRKNRICYLQEIFSNEMAKVDDSFFHRLEESFLVEEDKKHERHPIFGNIVDEVAYHEKYPTIYHLRKKLVDSTDKADLRLIYLALAHMIKFRGHFLIEGDLNPDNSDVDKLFIQLVQTYNQLFEENPINASGVDAKAILSARLSKSRRLENLIAQLPGEKKNGLFGNLIALSLGLTPNFKSNFDLAEDAKLQLSKDTYDDDLDNLLAQIGDQYADLFLAAKNLSDAILLSDILRVNTEITKAPLSASMIKRYDEHHQDLTLLKALVRQQLPEKYKEIFFDQSKNGYAGYIDGGASQEEFYKFIKPILEKMDGTEELLVKLNREDLLRKQRTFDNGSIPHQIHLGELHAILRRQEDFYPFLKDNREKIEKILTFRIPYYVGPLARGNSRFAWMTRKSEETITPWNFEEVVDKGASAQSFIERMTNFDKNLPNEKVLPKHSLLYEYFTVYNELTKVKYVTEGMRKPAFLSGEQKKAIVDLLFKTNRKVTVKQLKEDYFKKIECFDSVEISGVEDRFNASLGTYHDLLKIIKDKDFLDNEENEDILEDIVLTLTLFEDREMIEERLKTYAHLFDDKVMKQLKRRRYTGWGRLSRKLINGIRDKQSGKTILDFLKSDGFANRNFMQLIHDDSLTFKEDIQKAQVSGQGDSLHEHIANLAGSPAIKKGILQTVKVVDELVKVMGRHKPENIVIEMARENQTTQKGQKNSRERMKRIEEGIKELGSQILKEHPVENTQLQNEKLYLYYLQNGRDMYVDQELDINRLSDYDVDHIVPQSFLKDDSIDNKVLTRSDKARGKSDNVPSEEVVKKMKNYWRQLLNAKLITQRKFDNLTKAERGGLSELDKAGFIKRQLVETRQITKHVAQILDSRMNTKYDENDKLIREVKVITLKSKLVSDFRKDFQFYKVREINNYHHAHDAYLNAVVGTALIKKYPKLESEFVYGDYKVYDVRKMIAKSEQEIGKATAKYFFYSNIMNFFKTEITLANGEIRKRPLIETNGETGEIVWDKGRDFATVRKVLSMPQVNIVKKTEVQTGGFSKESILPKRNSDKLIARKKDWDPKKYGGFDSPTVAYSVLVVAKVEKGKSKKLKSVKELLGITIMERSSFEKNPIDFLEAKGYKEVKKDLIIKLPKYSLFELENGRKRMLASAGELQKGNELALPSKYVNFLYLASHYEKLKGSPEDNEQKQLFVEQHKHYLDEIIEQISEFSKRVILADANLDKVLSAYNKHRDKPIREQAENIIHLFTLTNLGAPAAFKYFDTTIDRKRYTSTKEVLDATLIHQSITGLYETRIDLSQLGGDGGGSSPAPEAAAKGGVLNLEEEYRLHEKPVPSSIDPSWLQLFPTVWAERAGMGLANQVPPVVVELRSGASPVAVRQYPMSKEAREGIRPHIQKFLDLGVLVPCRSPWNTPLLPVKKPGTNDYRPVQDLREINKRVQDIHPTVPNPYNLLSSLPPSYTWYSVLDLKDAFFCLRLHPNSQPLFAFEWKDPEKGNTGQLTWTRLPQGFKNSPTLFNEALHRDLAPFRALNPQVVLLQYVDDLLVAAPTYEDCKKGTQKLLQELSKLGYRVSAKKAQLCQREVTYLGYLLKEGKRWLTPARKATVMKIPVPTTPRQVREFLGKAGFCRLFIPGFASLAAPLYPLTKPSIPFIWTEEHQQAFDHIKKALLSAPALALPDLTKPFTLYIDERAGVARGVLTQTLGPWRRPVAYLSKKLDPVASGWPTCLKAVAAVALLLKDADKLTLGQNVTVIASHSLESIVRQPPDRWMTNARMTHYQSLLLNERVSFAPPAVLNPATLLPVESEATPVHRCSEILAEETGTRRDLEDQPLPGVPTWYTDGSSFITEGKRRAGAPIVDGKRTVWASSLPEGTSAQKAELVALTQALRLAEGKNINIYTDSRYAFATAHIHGAIYKQRGWLTSAGKDIKNKEEILALLEAIHLPRRVAIIHCPGHQRGSNPVATGNRRADEAAKQAALSTRVLAGTTKPAGKRTADGSEFEKRTADGSEFESPKKKAKVE

SEQ ID NO: 1458 - protein, 2098 aa, synthetic construct
MPAAKRVKLDGGDKKYSIGLDIGTNSVGWAVITDEYKVPSKKFKVLGNTDRHSIKKNLIGALLFDSGETAEATRLKRTARRRYTRRKNRICYLQEIFSNEMAKVDDSFFHRLEESFLVEEDKKHERHPIFGNIVDEVAYHEKYPTIYHLRKKLVDSTDKADLRLIYLALAHMIKFRGHFLIEGDLNPDNSDVDKLFIQLVQTYNQLFEENPINASGVDAKAILSARLSKSRRLENLIAQLPGEKKNGLFGNLIALSLGLTPNFKSNFDLAEDAKLQLSKDTYDDDLDNLLAQIGDQYADLFLAAKNLSDAILLSDILRVNTEITKAPLSASMIKRYDEHHQDLTLLKALVRQQLPEKYKEIFFDQSKNGYAGYIDGGASQEEFYKFIKPILEKMDGTEELLVKLNREDLLRKQRTFDNGSIPHQIHLGELHAILRRQEDFYPFLKDNREKIEKILTFRIPYYVGPLARGNSRFAWMTRKSEETITPWNFEEVVDKGASAQSFIERMTNFDKNLPNEKVLPKHSLLYEYFTVYNELTKVKYVTEGMRKPAFLSGEQKKAIVDLLFKTNRKVTVKQLKEDYFKKIECFDSVEISGVEDRFNASLGTYHDLLKIIKDKDFLDNEENEDILEDIVLTLTLFEDREMIEERLKTYAHLFDDKVMKQLKRRRYTGWGRLSRKLINGIRDKQSGKTILDFLKSDGFANRNFMQLIHDDSLTFKEDIQKAQVSGQGDSLHEHIANLAGSPAIKKGILQTVKVVDELVKVMGRHKPENIVIEMARENQTTQKGQKNSRERMKRIEEGIKELGSQILKEHPVENTQLQNEKLYLYYLQNGRDMYVDQELDINRLSDYDVDHIVPQSFLKDDSIDNKVLTRSDKARGKSDNVPSEEVVKKMKNYWRQLLNAKLITQRKFDNLTKAERGGLSELDKAGFIKRQLVETRQITKHVAQILDSRMNTKYDENDKLIREVKVITLKSKLVSDFRKDFQFYKVREINNYHHAHDAYLNAVVGTALIKKYPKLESEFVYGDYKVYDVRKMIAKSEQEIGKATAKYFFYSNIMNFFKTEITLANGEIRKRPLIETNGETGEIVWDKGRDFATVRKVLSMPQVNIVKKTEVQTGGFSKESILPKRNSDKLIARKKDWDPKKYGGFDSPTVAYSVLVVAKVEKGKSKKLKSVKELLGITIMERSSFEKNPIDFLEAKGYKEVKKDLIIKLPKYSLFELENGRKRMLASAGELQKGNELALPSKYVNFLYLASHYEKLKGSPEDNEQKQLFVEQHKHYLDEIIEQISEFSKRVILADANLDKVLSAYNKHRDKPIREQAENIIHLFTLTNLGAPAAFKYFDTTIDRKRYTSTKEVLDATLIHQSITGLYETRIDLSQLGGDGGGGGGSGGGGSGGGGSGGVLNLEEEYRLHEKPVPSSIDPSWLQLFPTVWAERAGMGLANQVPPVVVELRSGASPVAVRQYPMSKEAREGIRPHIQKFLDLGVLVPCRSPWNTPLLPVKKPGTNDYRPVQDLREINKRVQDIHPTVPNPYNLLSSLPPSYTWYSVLDLKDAFFCLRLHPNSQPLFAFEWKDPEKGNTGQLTWTRLPQGFKNSPTLFNEALHRDLAPFRALNPQVVLLQYVDDLLVAAPTYEDCKKGTQKLLQELSKLGYRVSAKKAQLCQREVTYLGYLLKEGKRWLTPARKATVMKIPVPTTPRQVREFLGKAGFCRLFIPGFASLAAPLYPLTKPSIPFIWTEEHQQAFDHIKKALLSAPALALPDLTKPFTLYIDERAGVARGVLTQTLGPWRRPVAYLSKKLDPVASGWPTCLKAVAAVALLLKDADKLTLGQNVTVIASHSLESIVRQPPDRWMTNARMTHYQSLLLNERVSFAPPAVLNPATLLPVESEATPVHRCSEILAEETGTRRDLEDQPLPGVPTWYTDGSSFITEGKRRAGAPIVDGKRTVWASSLPEGTSAQKAELVALTQALRLAEGKNINIYTDSRYAFATAHIHGAIYKQRGWLTSAGKDIKNKEEILALLEAIHLPRRVAIIHCPGHQRGSNPVATGNRRADEAAKQAALSTRVLAGTTKPAGKRTADGSEFEKRTADGSEFESPKKKAKVE

SEQ ID NO: 1459 - protein, 2094 aa, synthetic construct
MPAAKRVKLDGGDKKYSIGLDIGTNSVGWAVITDEYKVPSKKFKVLGNTDRHSIKKNLIGALLFDSGETAEATRLKRTARRRYTRRKNRICYLQEIFSNEMAKVDDSFFHRLEESFLVEEDKKHERHPIFGNIVDEVAYHEKYPTIYHLRKKLVDSTDKADLRLIYLALAHMIKFRGHFLIEGDLNPDNSDVDKLFIQLVQTYNQLFEENPINASGVDAKAILSARLSKSRRLENLIAQLPGEKKNGLFGNLIALSLGLTPNFKSNFDLAEDAKLQLSKDTYDDDLDNLLAQIGDQYADLFLAAKNLSDAILLSDILRVNTEITKAPLSASMIKRYDEHHQDLTLLKALVRQQLPEKYKEIFFDQSKNGYAGYIDGGASQEEFYKFIKPILEKMDGTEELLVKLNREDLLRKQRTFDNGSIPHQIHLGELHAILRRQEDFYPFLKDNREKIEKILTFRIPYYVGPLARGNSRFAWMTRKSEETITPWNFEEVVDKGASAQSFIERMTNFDKNLPNEKVLPKHSLLYEYFTVYNELTKVKYVTEGMRKPAFLSGEQKKAIVDLLFKTNRKVTVKQLKEDYFKKIECFDSVEISGVEDRFNASLGTYHDLLKIIKDKDFLDNEENEDILEDIVLTLTLFEDREMIEERLKTYAHLFDDKVMKQLKRRRYTGWGRLSRKLINGIRDKQSGKTILDFLKSDGFANRNFMQLIHDDSLTFKEDIQKAQVSGQGDSLHEHIANLAGSPAIKKGILQTVKVVDELVKVMGRHKPENIVIEMARENQTTQKGQKNSRERMKRIEEGIKELGSQILKEHPVENTQLQNEKLYLYYLQNGRDMYVDQELDINRLSDYDVDHIVPQSFLKDDSIDNKVLTRSDKARGKSDNVPSEEVVKKMKNYWRQLLNAKLITQRKFDNLTKAERGGLSELDKAGFIKRQLVETRQITKHVAQILDSRMNTKYDENDKLIREVKVITLKSKLVSDFRKDFQFYKVREINNYHHAHDAYLNAVVGTALIKKYPKLESEFVYGDYKVYDVRKMIAKSEQEIGKATAKYFFYSNIMNFFKTEITLANGEIRKRPLIETNGETGEIVWDKGRDFATVRKVLSMPQVNIVKKTEVQTGGFSKESILPKRNSDKLIARKKDWDPKKYGGFDSPTVAYSVLVVAKVEKGKSKKLKSVKELLGITIMERSSFEKNPIDFLEAKGYKEVKKDLIIKLPKYSLFELENGRKRMLASAGELQKGNELALPSKYVNFLYLASHYEKLKGSPEDNEQKQLFVEQHKHYLDEIIEQISEFSKRVILADANLDKVLSAYNKHRDKPIREQAENIIHLFTLTNLGAPAAFKYFDTTIDRKRYTSTKEVLDATLIHQSITGLYETRIDLSQLGGDGGPAPGGGEAAAKGGVLNLEEEYRLHEKPVPSSIDPSWLQLFPTVWAERAGMGLANQVPPVVVELRSGASPVAVRQYPMSKEAREGIRPHIQKFLDLGVLVPCRSPWNTPLLPVKKPGTNDYRPVQDLREINKRVQDIHPTVPNPYNLLSSLPPSYTWYSVLDLKDAFFCLRLHPNSQPLFAFEWKDPEKGNTGQLTWTRLPQGFKNSPTLFNEALHRDLAPFRALNPQVVLLQYVDDLLVAAPTYEDCKKGTQKLLQELSKLGYRVSAKKAQLCQREVTYLGYLLKEGKRWLTPARKATVMKIPVPTTPRQVREFLGKAGFCRLFIPGFASLAAPLYPLTKPSIPFIWTEEHQQAFDHIKKALLSAPALALPDLTKPFTLYIDERAGVARGVLTQTLGPWRRPVAYLSKKLDPVASGWPTCLKAVAAVALLLKDADKLTLGQNVTVIASHSLESIVRQPPDRWMTNARMTHYQSLLLNERVSFAPPAVLNPATLLPVESEATPVHRCSEILAEETGTRRDLEDQPLPGVPTWYTDGSSFITEGKRRAGAPIVDGKRTVWASSLPEGTSAQKAELVALTQALRLAEGKNINIYTDSRYAFATAHIHGAIYKQRGWLTSAGKDIKNKEEILALLEAIHLPRRVAIIHCPGHQRGSNPVATGNRRADEAAKQAALSTRVLAGTTKPAGKRTADGSEFEKRTADGSEFESPKKKAKVE

SEQ ID NO: 1460 - protein, 2092 aa, synthetic construct
MPAAKRVKLDGGDKKYSIGLDIGTNSVGWAVITDEYKVPSKKFKVLGNTDRHSIKKNLIGALLFDSGETAEATRLKRTARRRYTRRKNRICYLQEIFSNEMAKVDDSFFHRLEESFLVEEDKKHERHPIFGNIVDEVAYHEKYPTIYHLRKKLVDSTDKADLRLIYLALAHMIKFRGHFLIEGDLNPDNSDVDKLFIQLVQTYNQLFEENPINASGVDAKAILSARLSKSRRLENLIAQLPGEKKNGLFGNLIALSLGLTPNFKSNFDLAEDAKLQLSKDTYDDDLDNLLAQIGDQYADLFLAAKNLSDAILLSDILRVNTEITKAPLSASMIKRYDEHHQDLTLLKALVRQQLPEKYKEIFFDQSKNGYAGYIDGGASQEEFYKFIKPILEKMDGTEELLVKLNREDLLRKQRTFDNGSIPHQIHLGELHAILRRQEDFYPFLKDNREKIEKILTFRIPYYVGPLARGNSRFAWMTRKSEETITPWNFEEVVDKGASAQSFIERMTNFDKNLPNEKVLPKHSLLYEYFTVYNELTKVKYVTEGMRKPAFLSGEQKKAIVDLLFKTNRKVTVKQLKEDYFKKIECFDSVEISGVEDRFNASLGTYHDLLKIIKDKDFLDNEENEDILEDIVLTLTLFEDREMIEERLKTYAHLFDDKVMKQLKRRRYTGWGRLSRKLINGIRDKQSGKTILDFLKSDGFANRNFMQLIHDDSLTFKEDIQKAQVSGQGDSLHEHIANLAGSPAIKKGILQTVKVVDELVKVMGRHKPENIVIEMARENQTTQKGQKNSRERMKRIEEGIKELGSQILKEHPVENTQLQNEKLYLYYLQNGRDMYVDQELDINRLSDYDVDHIVPQSFLKDDSIDNKVLTRSDKARGKSDNVPSEEVVKKMKNYWRQLLNAKLITQRKFDNLTKAERGGLSELDKAGFIKRQLVETRQITKHVAQILDSRMNTKYDENDKLIREVKVITLKSKLVSDFRKDFQFYKVREINNYHHAHDAYLNAVVGTALIKKYPKLESEFVYGDYKVYDVRKMIAKSEQEIGKATAKYFFYSNIMNFFKTEITLANGEIRKRPLIETNGETGEIVWDKGRDFATVRKVLSMPQVNIVKKTEVQTGGFSKESILPKRNSDKLIARKKDWDPKKYGGFDSPTVAYSVLVVAKVEKGKSKKLKSVKELLGITIMERSSFEKNPIDFLEAKGYKEVKKDLIIKLPKYSLFELENGRKRMLASAGELQKGNELALPSKYVNFLYLASHYEKLKGSPEDNEQKQLFVEQHKHYLDEIIEQISEFSKRVILADANLDKVLSAYNKHRDKPIREQAENIIHLFTLTNLGAPAAFKYFDTTIDRKRYTSTKEVLDATLIHQSITGLYETRIDLSQLGGDGGPAPGGGGGSGGVLNLEEEYRLHEKPVPSSIDPSWLQLFPTVWAERAGMGLANQVPPVVVELRSGASPVAVRQYPMSKEAREGIRPHIQKFLDLGVLVPCRSPWNTPLLPVKKPGTNDYRPVQDLREINKRVQDIHPTVPNPYNLLSSLPPSYTWYSVLDLKDAFFCLRLHPNSQPLFAFEWKDPEKGNTGQLTWTRLPQGFKNSPTLFNEALHRDLAPFRALNPQVVLLQYVDDLLVAAPTYEDCKKGTQKLLQELSKLGYRVSAKKAQLCQREVTYLGYLLKEGKRWLTPARKATVMKIPVPTTPRQVREFLGKAGFCRLFIPGFASLAAPLYPLTKPSIPFIWTEEHQQAFDHIKKALLSAPALALPDLTKPFTLYIDERAGVARGVLTQTLGPWRRPVAYLSKKLDPVASGWPTCLKAVAAVALLLKDADKLTLGQNVTVIASHSLESIVRQPPDRWMTNARMTHYQSLLLNERVSFAPPAVLNPATLLPVESEATPVHRCSEILAEETGTRRDLEDQPLPGVPTWYTDGSSFITEGKRRAGAPIVDGKRTVWASSLPEGTSAQKAELVALTQALRLAEGKNINIYTDSRYAFATAHIHGAIYKQRGWLTSAGKDIKNKEEILALLEAIHLPRRVAIIHCPGHQRGSNPVATGNRRADEAAKQAALSTRVLAGTTKPAGKRTADGSEFEKRTADGSEFESPKKKAKVE

SEQ ID NO: 1461 - protein, 2094 aa, synthetic construct
MPAAKRVKLDGGDKKYSIGLDIGTNSVGWAVITDEYKVPSKKFKVLGNTDRHSIKKNLIGALLFDSGETAEATRLKRTARRRYTRRKNRICYLQEIFSNEMAKVDDSFFHRLEESFLVEEDKKHERHPIFGNIVDEVAYHEKYPTIYHLRKKLVDSTDKADLRLIYLALAHMIKFRGHFLIEGDLNPDNSDVDKLFIQLVQTYNQLFEENPINASGVDAKAILSARLSKSRRLENLIAQLPGEKKNGLFGNLIALSLGLTPNFKSNFDLAEDAKLQLSKDTYDDDLDNLLAQIGDQYADLFLAAKNLSDAILLSDILRVNTEITKAPLSASMIKRYDEHHQDLTLLKALVRQQLPEKYKEIFFDQSKNGYAGYIDGGASQEEFYKFIKPILEKMDGTEELLVKLNREDLLRKQRTFDNGSIPHQIHLGELHAILRRQEDFYPFLKDNREKIEKILTFRIPYYVGPLARGNSRFAWMTRKSEETITPWNFEEVVDKGASAQSFIERMTNFDKNLPNEKVLPKHSLLYEYFTVYNELTKVKYVTEGMRKPAFLSGEQKKAIVDLLFKTNRKVTVKQLKEDYFKKIECFDSVEISGVEDRFNASLGTYHDLLKIIKDKDFLDNEENEDILEDIVLTLTLFEDREMIEERLKTYAHLFDDKVMKQLKRRRYTGWGRLSRKLINGIRDKQSGKTILDFLKSDGFANRNFMQLIHDDSLTFKEDIQKAQVSGQGDSLHEHIANLAGSPAIKKGILQTVKVVDELVKVMGRHKPENIVIEMARENQTTQKGQKNSRERMKRIEEGIKELGSQILKEHPVENTQLQNEKLYLYYLQNGRDMYVDQELDINRLSDYDVDHIVPQSFLKDDSIDNKVLTRSDKARGKSDNVPSEEVVKKMKNYWRQLLNAKLITQRKFDNLTKAERGGLSELDKAGFIKRQLVETRQITKHVAQILDSRMNTKYDENDKLIREVKVITLKSKLVSDFRKDFQFYKVREINNYHHAHDAYLNAVVGTALIKKYPKLESEFVYGDYKVYDVRKMIAKSEQEIGKATAKYFFYSNIMNFFKTEITLANGEIRKRPLIETNGETGEIVWDKGRDFATVRKVLSMPQVNIVKKTEVQTGGFSKESILPKRNSDKLIARKKDWDPKKYGGFDSPTVAYSVLVVAKVEKGKSKKLKSVKELLGITIMERSSFEKNPIDFLEAKGYKEVKKDLIIKLPKYSLFELENGRKRMLASAGELQKGNELALPSKYVNFLYLASHYEKLKGSPEDNEQKQLFVEQHKHYLDEIIEQISEFSKRVILADANLDKVLSAYNKHRDKPIREQAENIIHLFTLTNLGAPAAFKYFDTTIDRKRYTSTKEVLDATLIHQSITGLYETRIDLSQLGGDGGGGGEAAAKGSSGGVLNLEEEYRLHEKPVPSSIDPSWLQLFPTVWAERAGMGLANQVPPVVVELRSGASPVAVRQYPMSKEAREGIRPHIQKFLDLGVLVPCRSPWNTPLLPVKKPGTNDYRPVQDLREINKRVQDIHPTVPNPYNLLSSLPPSYTWYSVLDLKDAFFCLRLHPNSQPLFAFEWKDPEKGNTGQLTWTRLPQGFKNSPTLFNEALHRDLAPFRALNPQVVLLQYVDDLLVAAPTYEDCKKGTQKLLQELSKLGYRVSAKKAQLCQREVTYLGYLLKEGKRWLTPARKATVMKIPVPTTPRQVREFLGKAGFCRLFIPGFASLAAPLYPLTKPSIPFIWTEEHQQAFDHIKKALLSAPALALPDLTKPFTLYIDERAGVARGVLTQTLGPWRRPVAYLSKKLDPVASGWPTCLKAVAAVALLLKDADKLTLGQNVTVIASHSLESIVRQPPDRWMTNARMTHYQSLLLNERVSFAPPAVLNPATLLPVESEATPVHRCSEILAEETGTRRDLEDQPLPGVPTWYTDGSSFITEGKRRAGAPIVDGKRTVWASSLPEGTSAQKAELVALTQALRLAEGKNINIYTDSRYAFATAHIHGAIYKQRGWLTSAGKDIKNKEEILALLEAIHLPRRVAIIHCPGHQRGSNPVATGNRRADEAAKQAALSTRVLAGTTKPAGKRTADGSEFEKRTADGSEFESPKKKAKVE

SEQ ID NO: 1462 - protein, 2088 aa, synthetic construct
MPAAKRVKLDGGDKKYSIGLDIGTNSVGWAVITDEYKVPSKKFKVLGNTDRHSIKKNLIGALLFDSGETAEATRLKRTARRRYTRRKNRICYLQEIFSNEMAKVDDSFFHRLEESFLVEEDKKHERHPIFGNIVDEVAYHEKYPTIYHLRKKLVDSTDKADLRLIYLALAHMIKFRGHFLIEGDLNPDNSDVDKLFIQLVQTYNQLFEENPINASGVDAKAILSARLSKSRRLENLIAQLPGEKKNGLFGNLIALSLGLTPNFKSNFDLAEDAKLQLSKDTYDDDLDNLLAQIGDQYADLFLAAKNLSDAILLSDILRVNTEITKAPLSASMIKRYDEHHQDLTLLKALVRQQLPEKYKEIFFDQSKNGYAGYIDGGASQEEFYKFIKPILEKMDGTEELLVKLNREDLLRKQRTFDNGSIPHQIHLGELHAILRRQEDFYPFLKDNREKIEKILTFRIPYYVGPLARGNSRFAWMTRKSEETITPWNFEEVVDKGASAQSFIERMTNFDKNLPNEKVLPKHSLLYEYFTVYNELTKVKYVTEGMRKPAFLSGEQKKAIVDLLFKTNRKVTVKQLKEDYFKKIECFDSVEISGVEDRFNASLGTYHDLLKIIKDKDFLDNEENEDILEDIVLTLTLFEDREMIEERLKTYAHLFDDKVMKQLKRRRYTGWGRLSRKLINGIRDKQSGKTILDFLKSDGFANRNFMQLIHDDSLTFKEDIQKAQVSGQGDSLHEHIANLAGSPAIKKGILQTVKVVDELVKVMGRHKPENIVIEMARENQTTQKGQKNSRERMKRIEEGIKELGSQILKEHPVENTQLQNEKLYLYYLQNGRDMYVDQELDINRLSDYDVDHIVPQSFLKDDSIDNKVLTRSDKARGKSDNVPSEEVVKKMKNYWRQLLNAKLITQRKFDNLTKAERGGLSELDKAGFIKRQLVETRQITKHVAQILDSRMNTKYDENDKLIREVKVITLKSKLVSDFRKDFQFYKVREINNYHHAHDAYLNAVVGTALIKKYPKLESEFVYGDYKVYDVRKMIAKSEQEIGKATAKYFFYSNIMNFFKTEITLANGEIRKRPLIETNGETGEIVWDKGRDFATVRKVLSMPQVNIVKKTEVQTGGFSKESILPKRNSDKLIARKKDWDPKKYGGFDSPTVAYSVLVVAKVEKGKSKKLKSVKELLGITIMERSSFEKNPIDFLEAKGYKEVKKDLIIKLPKYSLFELENGRKRMLASAGELQKGNELALPSKYVNFLYLASHYEKLKGSPEDNEQKQLFVEQHKHYLDEIIEQISEFSKRVILADANLDKVLSAYNKHRDKPIREQAENIIHLFTLTNLGAPAAFKYFDTTIDRKRYTSTKEVLDATLIHQSITGLYETRIDLSQLGGDGGGGGGSGGVLNLEEEYRLHEKPVPSSIDPSWLQLFPTVWAERAGMGLANQVPPVVVELRSGASPVAVRQYPMSKEAREGIRPHIQKFLDLGVLVPCRSPWNTPLLPVKKPGTNDYRPVQDLREINKRVQDIHPTVPNPYNLLSSLPPSYTWYSVLDLKDAFFCLRLHPNSQPLFAFEWKDPEKGNTGQLTWTRLPQGFKNSPTLFNEALHRDLAPFRALNPQVVLLQYVDDLLVAAPTYEDCKKGTQKLLQELSKLGYRVSAKKAQLCQREVTYLGYLLKEGKRWLTPARKATVMKIPVPTTPRQVREFLGKAGFCRLFIPGFASLAAPLYPLTKPSIPFIWTEEHQQAFDHIKKALLSAPALALPDLTKPFTLYIDERAGVARGVLTQTLGPWRRPVAYLSKKLDPVASGWPTCLKAVAAVALLLKDADKLTLGQNVTVIASHSLESIVRQPPDRWMTNARMTHYQSLLLNERVSFAPPAVLNPATLLPVESEATPVHRCSEILAEETGTRRDLEDQPLPGVPTWYTDGSSFITEGKRRAGAPIVDGKRTVWASSLPEGTSAQKAELVALTQALRLAEGKNINIYTDSRYAFATAHIHGAIYKQRGWLTSAGKDIKNKEEILALLEAIHLPRRVAIIHCPGHQRGSNPVATGNRRADEAAKQAALSTRVLAGTTKPAGKRTADGSEFEKRTADGSEFESPKKKAKVE

SEQ ID NO: 1463 - protein, 2094 aa, synthetic construct
MPAAKRVKLDGGDKKYSIGLDIGTNSVGWAVITDEYKVPSKKFKVLGNTDRHSIKKNLIGALLFDSGETAEATRLKRTARRRYTRRKNRICYLQEIFSNEMAKVDDSFFHRLEESFLVEEDKKHERHPIFGNIVDEVAYHEKYPTIYHLRKKLVDSTDKADLRLIYLALAHMIKFRGHFLIEGDLNPDNSDVDKLFIQLVQTYNQLFEENPINASGVDAKAILSARLSKSRRLENLIAQLPGEKKNGLFGNLIALSLGLTPNFKSNFDLAEDAKLQLSKDTYDDDLDNLLAQIGDQYADLFLAAKNLSDAILLSDILRVNTEITKAPLSASMIKRYDEHHQDLTLLKALVRQQLPEKYKEIFFDQSKNGYAGYIDGGASQEEFYKFIKPILEKMDGTEELLVKLNREDLLRKQRTFDNGSIPHQIHLGELHAILRRQEDFYPFLKDNREKIEKILTFRIPYYVGPLARGNSRFAWMTRKSEETITPWNFEEVVDKGASAQSFIERMTNFDKNLPNEKVLPKHSLLYEYFTVYNELTKVKYVTEGMRKPAFLSGEQKKAIVDLLFKTNRKVTVKQLKEDYFKKIECFDSVEISGVEDRFNASLGTYHDLLKIIKDKDFLDNEENEDILEDIVLTLTLFEDREMIEERLKTYAHLFDDKVMKQLKRRRYTGWGRLSRKLINGIRDKQSGKTILDFLKSDGFANRNFMQLIHDDSLTFKEDIQKAQVSGQGDSLHEHIANLAGSPAIKKGILQTVKVVDELVKVMGRHKPENIVIEMARENQTTQKGQKNSRERMKRIEEGIKELGSQILKEHPVENTQLQNEKLYLYYLQNGRDMYVDQELDINRLSDYDVDHIVPQSFLKDDSIDNKVLTRSDKARGKSDNVPSEEVVKKMKNYWRQLLNAKLITQRKFDNLTKAERGGLSELDKAGFIKRQLVETRQITKHVAQILDSRMNTKYDENDKLIREVKVITLKSKLVSDFRKDFQFYKVREINNYHHAHDAYLNAVVGTALIKKYPKLESEFVYGDYKVYDVRKMIAKSEQEIGKATAKYFFYSNIMNFFKTEITLANGEIRKRPLIETNGETGEIVWDKGRDFATVRKVLSMPQVNIVKKTEVQTGGFSKESILPKRNSDKLIARKKDWDPKKYGGFDSPTVAYSVLVVAKVEKGKSKKLKSVKELLGITIMERSSFEKNPIDFLEAKGYKEVKKDLIIKLPKYSLFELENGRKRMLASAGELQKGNELALPSKYVNFLYLASHYEKLKGSPEDNEQKQLFVEQHKHYLDEIIEQISEFSKRVILADANLDKVLSAYNKHRDKPIREQAENIIHLFTLTNLGAPAAFKYFDTTIDRKRYTSTKEVLDATLIHQSITGLYETRIDLSQLGGDGGGGSEAAAKGGGGGVLNLEEEYRLHEKPVPSSIDPSWLQLFPTVWAERAGMGLANQVPPVVVELRSGASPVAVRQYPMSKEAREGIRPHIQKFLDLGVLVPCRSPWNTPLLPVKKPGTNDYRPVQDLREINKRVQDIHPTVPNPYNLLSSLPPSYTWYSVLDLKDAFFCLRLHPNSQPLFAFEWKDPEKGNTGQLTWTRLPQGFKNSPTLFNEALHRDLAPFRALNPQVVLLQYVDDLLVAAPTYEDCKKGTQKLLQELSKLGYRVSAKKAQLCQREVTYLGYLLKEGKRWLTPARKATVMKIPVPTTPRQVREFLGKAGFCRLFIPGFASLAAPLYPLTKPSIPFIWTEEHQQAFDHIKKALLSAPALALPDLTKPFTLYIDERAGVARGVLTQTLGPWRRPVAYLSKKLDPVASGWPTCLKAVAAVALLLKDADKLTLGQNVTVIASHSLESIVRQPPDRWMTNARMTHYQSLLLNERVSFAPPAVLNPATLLPVESEATPVHRCSEILAEETGTRRDLEDQPLPGVPTWYTDGSSFITEGKRRAGAPIVDGKRTVWASSLPEGTSAQKAELVALTQALRLAEGKNINIYTDSRYAFATAHIHGAIYKQRGWLTSAGKDIKNKEEILALLEAIHLPRRVAIIHCPGHQRGSNPVATGNRRADEAAKQAALSTRVLAGTTKPAGKRTADGSEFEKRTADGSEFESPKKKAKVE

SEQ ID NO: 1464 - protein, 2086 aa, synthetic construct
MPAAKRVKLDGGDKKYSIGLDIGTNSVGWAVITDEYKVPSKKFKVLGNTDRHSIKKNLIGALLFDSGETAEATRLKRTARRRYTRRKNRICYLQEIFSNEMAKVDDSFFHRLEESFLVEEDKKHERHPIFGNIVDEVAYHEKYPTIYHLRKKLVDSTDKADLRLIYLALAHMIKFRGHFLIEGDLNPDNSDVDKLFIQLVQTYNQLFEENPINASGVDAKAILSARLSKSRRLENLIAQLPGEKKNGLFGNLIALSLGLTPNFKSNFDLAEDAKLQLSKDTYDDDLDNLLAQIGDQYADLFLAAKNLSDAILLSDILRVNTEITKAPLSASMIKRYDEHHQDLTLLKALVRQQLPEKYKEIFFDQSKNGYAGYIDGGASQEEFYKFIKPILEKMDGTEELLVKLNREDLLRKQRTFDNGSIPHQIHLGELHAILRRQEDFYPFLKDNREKIEKILTFRIPYYVGPLARGNSRFAWMTRKSEETITPWNFEEVVDKGASAQSFIERMTNFDKNLPNEKVLPKHSLLYEYFTVYNELTKVKYVTEGMRKPAFLSGEQKKAIVDLLFKTNRKVTVKQLKEDYFKKIECFDSVEISGVEDRFNASLGTYHDLLKIIKDKDFLDNEENEDILEDIVLTLTLFEDREMIEERLKTYAHLFDDKVMKQLKRRRYTGWGRLSRKLINGIRDKQSGKTILDFLKSDGFANRNFMQLIHDDSLTFKEDIQKAQVSGQGDSLHEHIANLAGSPAIKKGILQTVKVVDELVKVMGRHKPENIVIEMARENQTTQKGQKNSRERMKRIEEGIKELGSQILKEHPVENTQLQNEKLYLYYLQNGRDMYVDQELDINRLSDYDVDHIVPQSFLKDDSIDNKVLTRSDKARGKSDNVPSEEVVKKMKNYWRQLLNAKLITQRKFDNLTKAERGGLSELDKAGFIKRQLVETRQITKHVAQILDSRMNTKYDENDKLIREVKVITLKSKLVSDFRKDFQFYKVREINNYHHAHDAYLNAVVGTALIKKYPKLESEFVYGDYKVYDVRKMIAKSEQEIGKATAKYFFYSNIMNFFKTEITLANGEIRKRPLIETNGETGEIVWDKGRDFATVRKVLSMPQVNIVKKTEVQTGGFSKESILPKRNSDKLIARKKDWDPKKYGGFDSPTVAYSVLVVAKVEKGKSKKLKSVKELLGITIMERSSFEKNPIDFLEAKGYKEVKKDLIIKLPKYSLFELENGRKRMLASAGELQKGNELALPSKYVNFLYLASHYEKLKGSPEDNEQKQLFVEQHKHYLDEIIEQISEFSKRVILADANLDKVLSAYNKHRDKPIREQAENIIHLFTLTNLGAPAAFKYFDTTIDRKRYTSTKEVLDATLIHQSITGLYETRIDLSQLGGDGGGGSGGVLNLEEEYRLHEKPVPSSIDPSWLQLFPTVWAERAGMGLANQVPPVVVELRSGASPVAVRQYPMSKEAREGIRPHIQKFLDLGVLVPCRSPWNTPLLPVKKPGTNDYRPVQDLREINKRVQDIHPTVPNPYNLLSSLPPSYTWYSVLDLKDAFFCLRLHPNSQPLFAFEWKDPEKGNTGQLTWTRLPQGFKNSPTLFNEALHRDLAPFRALNPQVVLLQYVDDLLVAAPTYEDCKKGTQKLLQELSKLGYRVSAKKAQLCQREVTYLGYLLKEGKRWLTPARKATVMKIPVPTTPRQVREFLGKAGFCRLFIPGFASLAAPLYPLTKPSIPFIWTEEHQQAFDHIKKALLSAPALALPDLTKPFTLYIDERAGVARGVLTQTLGPWRRPVAYLSKKLDPVASGWPTCLKAVAAVALLLKDADKLTLGQNVTVIASHSLESIVRQPPDRWMTNARMTHYQSLLLNERVSFAPPAVLNPATLLPVESEATPVHRCSEILAEETGTRRDLEDQPLPGVPTWYTDGSSFITEGKRRAGAPIVDGKRTVWASSLPEGTSAQKAELVALTQALRLAEGKNINIYTDSRYAFATAHIHGAIYKQRGWLTSAGKDIKNKEEILALLEAIHLPRRVAIIHCPGHQRGSNPVATGNRRADEAAKQAALSTRVLAGTTKPAGKRTADGSEFEKRTADGSEFESPKKKAKVE

SEQ ID NO: 1465 - protein, 2091 aa, synthetic construct
MPAAKRVKLDGGDKKYSIGLDIGTNSVGWAVITDEYKVPSKKFKVLGNTDRHSIKKNLIGALLFDSGETAEATRLKRTARRRYTRRKNRICYLQEIFSNEMAKVDDSFFHRLEESFLVEEDKKHERHPIFGNIVDEVAYHEKYPTIYHLRKKLVDSTDKADLRLIYLALAHMIKFRGHFLIEGDLNPDNSDVDKLFIQLVQTYNQLFEENPINASGVDAKAILSARLSKSRRLENLIAQLPGEKKNGLFGNLIALSLGLTPNFKSNFDLAEDAKLQLSKDTYDDDLDNLLAQIGDQYADLFLAAKNLSDAILLSDILRVNTEITKAPLSASMIKRYDEHHQDLTLLKALVRQQLPEKYKEIFFDQSKNGYAGYIDGGASQEEFYKFIKPILEKMDGTEELLVKLNREDLLRKQRTFDNGSIPHQIHLGELHAILRRQEDFYPFLKDNREKIEKILTFRIPYYVGPLARGNSRFAWMTRKSEETITPWNFEEVVDKGASAQSFIERMTNFDKNLPNEKVLPKHSLLYEYFTVYNELTKVKYVTEGMRKPAFLSGEQKKAIVDLLFKTNRKVTVKQLKEDYFKKIECFDSVEISGVEDRFNASLGTYHDLLKIIKDKDFLDNEENEDILEDIVLTLTLFEDREMIEERLKTYAHLFDDKVMKQLKRRRYTGWGRLSRKLINGIRDKQSGKTILDFLKSDGFANRNFMQLIHDDSLTFKEDIQKAQVSGQGDSLHEHIANLAGSPAIKKGILQTVKVVDELVKVMGRHKPENIVIEMARENQTTQKGQKNSRERMKRIEEGIKELGSQILKEHPVENTQLQNEKLYLYYLQNGRDMYVDQELDINRLSDYDVDHIVPQSFLKDDSIDNKVLTRSDKARGKSDNVPSEEVVKKMKNYWRQLLNAKLITQRKFDNLTKAERGGLSELDKAGFIKRQLVETRQITKHVAQILDSRMNTKYDENDKLIREVKVITLKSKLVSDFRKDFQFYKVREINNYHHAHDAYLNAVVGTALIKKYPKLESEFVYGDYKVYDVRKMIAKSEQEIGKATAKYFFYSNIMNFFKTEITLANGEIRKRPLIETNGETGEIVWDKGRDFATVRKVLSMPQVNIVKKTEVQTGGFSKESILPKRNSDKLIARKKDWDPKKYGGFDSPTVAYSVLVVAKVEKGKSKKLKSVKELLGITIMERSSFEKNPIDFLEAKGYKEVKKDLIIKLPKYSLFELENGRKRMLASAGELQKGNELALPSKYVNFLYLASHYEKLKGSPEDNEQKQLFVEQHKHYLDEIIEQISEFSKRVILADANLDKVLSAYNKHRDKPIREQAENIIHLFTLTNLGAPAAFKYFDTTIDRKRYTSTKEVLDATLIHQSITGLYETRIDLSQLGGDGGGGGGGGGGGGVLNLEEEYRLHEKPVPSSIDPSWLQLFPTVWAERAGMGLANQVPPVVVELRSGASPVAVRQYPMSKEAREGIRPHIQKFLDLGVLVPCRSPWNTPLLPVKKPGTNDYRPVQDLREINKRVQDIHPTVPNPYNLLSSLPPSYTWYSVLDLKDAFFCLRLHPNSQPLFAFEWKDPEKGNTGQLTWTRLPQGFKNSPTLFNEALHRDLAPFRALNPQVVLLQYVDDLLVAAPTYEDCKKGTQKLLQELSKLGYRVSAKKAQLCQREVTYLGYLLKEGKRWLTPARKATVMKIPVPTTPRQVREFLGKAGFCRLFIPGFASLAAPLYPLTKPSIPFIWTEEHQQAFDHIKKALLSAPALALPDLTKPFTLYIDERAGVARGVLTQTLGPWRRPVAYLSKKLDPVASGWPTCLKAVAAVALLLKDADKLTLGQNVTVIASHSLESIVRQPPDRWMTNARMTHYQSLLLNERVSFAPPAVLNPATLLPVESEATPVHRCSEILAEETGTRRDLEDQPLPGVPTWYTDGSSFITEGKRRAGAPIVDGKRTVWASSLPEGTSAQKAELVALTQALRLAEGKNINIYTDSRYAFATAHIHGAIYKQRGWLTSAGKDIKNKEEILALLEAIHLPRRVAIIHCPGHQRGSNPVATGNRRADEAAKQAALSTRVLAGTTKPAGKRTADGSEFEKRTADGSEFESPKKKAKVE

SEQ ID NO: 1466 - protein, 2094 aa, synthetic construct
MPAAKRVKLDGGDKKYSIGLDIGTNSVGWAVITDEYKVPSKKFKVLGNTDRHSIKKNLIGALLFDSGETAEATRLKRTARRRYTRRKNRICYLQEIFSNEMAKVDDSFFHRLEESFLVEEDKKHERHPIFGNIVDEVAYHEKYPTIYHLRKKLVDSTDKADLRLIYLALAHMIKFRGHFLIEGDLNPDNSDVDKLFIQLVQTYNQLFEENPINASGVDAKAILSARLSKSRRLENLIAQLPGEKKNGLFGNLIALSLGLTPNFKSNFDLAEDAKLQLSKDTYDDDLDNLLAQIGDQYADLFLAAKNLSDAILLSDILRVNTEITKAPLSASMIKRYDEHHQDLTLLKALVRQQLPEKYKEIFFDQSKNGYAGYIDGGASQEEFYKFIKPILEKMDGTEELLVKLNREDLLRKQRTFDNGSIPHQIHLGELHAILRRQEDFYPFLKDNREKIEKILTFRIPYYVGPLARGNSRFAWMTRKSEETITPWNFEEVVDKGASAQSFIERMTNFDKNLPNEKVLPKHSLLYEYFTVYNELTKVKYVTEGMRKPAFLSGEQKKAIVDLLFKTNRKVTVKQLKEDYFKKIECFDSVEISGVEDRFNASLGTYHDLLKIIKDKDFLDNEENEDILEDIVLTLTLFEDREMIEERLKTYAHLFDDKVMKQLKRRRYTGWGRLSRKLINGIRDKQSGKTILDFLKSDGFANRNFMQLIHDDSLTFKEDIQKAQVSGQGDSLHEHIANLAGSPAIKKGILQTVKVVDELVKVMGRHKPENIVIEMARENQTTQKGQKNSRERMKRIEEGIKELGSQILKEHPVENTQLQNEKLYLYYLQNGRDMYVDQELDINRLSDYDVDHIVPQSFLKDDSIDNKVLTRSDKARGKSDNVPSEEVVKKMKNYWRQLLNAKLITQRKFDNLTKAERGGLSELDKAGFIKRQLVETRQITKHVAQILDSRMNTKYDENDKLIREVKVITLKSKLVSDFRKDFQFYKVREINNYHHAHDAYLNAVVGTALIKKYPKLESEFVYGDYKVYDVRKMIAKSEQEIGKATAKYFFYSNIMNFFKTEITLANGEIRKRPLIETNGETGEIVWDKGRDFATVRKVLSMPQVNIVKKTEVQTGGFSKESILPKRNSDKLIARKKDWDPKKYGGFDSPTVAYSVLVVAKVEKGKSKKLKSVKELLGITIMERSSFEKNPIDFLEAKGYKEVKKDLIIKLPKYSLFELENGRKRMLASAGELQKGNELALPSKYVNFLYLASHYEKLKGSPEDNEQKQLFVEQHKHYLDEIIEQISEFSKRVILADANLDKVLSAYNKHRDKPIREQAENIIHLFTLTNLGAPAAFKYFDTTIDRKRYTSTKEVLDATLIHQSITGLYETRIDLSQLGGDGGGSSGGGEAAAKGGVLNLEEEYRLHEKPVPSSIDPSWLQLFPTVWAERAGMGLANQVPPVVVELRSGASPVAVRQYPMSKEAREGIRPHIQKFLDLGVLVPCRSPWNTPLLPVKKPGTNDYRPVQDLREINKRVQDIHPTVPNPYNLLSSLPPSYTWYSVLDLKDAFFCLRLHPNSQPLFAFEWKDPEKGNTGQLTWTRLPQGFKNSPTLFNEALHRDLAPFRALNPQVVLLQYVDDLLVAAPTYEDCKKGTQKLLQELSKLGYRVSAKKAQLCQREVTYLGYLLKEGKRWLTPARKATVMKIPVPTTPRQVREFLGKAGFCRLFIPGFASLAAPLYPLTKPSIPFIWTEEHQQAFDHIKKALLSAPALALPDLTKPFTLYIDERAGVARGVLTQTLGPWRRPVAYLSKKLDPVASGWPTCLKAVAAVALLLKDADKLTLGQNVTVIASHSLESIVRQPPDRWMTNARMTHYQSLLLNERVSFAPPAVLNPATLLPVESEATPVHRCSEILAEETGTRRDLEDQPLPGVPTWYTDGSSFITEGKRRAGAPIVDGKRTVWASSLPEGTSAQKAELVALTQALRLAEGKNINIYTDSRYAFATAHIHGAIYKQRGWLTSAGKDIKNKEEILALLEAIHLPRRVAIIHCPGHQRGSNPVATGNRRADEAAKQAALSTRVLAGTTKPAGKRTADGSEFEKRTADGSEFESPKKKAKVE

SEQ ID NO: 1467 - protein, 2094 aa, synthetic construct
MPAAKRVKLDGGDKKYSIGLDIGTNSVGWAVITDEYKVPSKKFKVLGNTDRHSIKKNLIGALLFDSGETAEATRLKRTARRRYTRRKNRICYLQEIFSNEMAKVDDSFFHRLEESFLVEEDKKHERHPIFGNIVDEVAYHEKYPTIYHLRKKLVDSTDKADLRLIYLALAHMIKFRGHFLIEGDLNPDNSDVDKLFIQLVQTYNQLFEENPINASGVDAKAILSARLSKSRRLENLIAQLPGEKKNGLFGNLIALSLGLTPNFKSNFDLAEDAKLQLSKDTYDDDLDNLLAQIGDQYADLFLAAKNLSDAILLSDILRVNTEITKAPLSASMIKRYDEHHQDLTLLKALVRQQLPEKYKEIFFDQSKNGYAGYIDGGASQEEFYKFIKPILEKMDGTEELLVKLNREDLLRKQRTFDNGSIPHQIHLGELHAILRRQEDFYPFLKDNREKIEKILTFRIPYYVGPLARGNSRFAWMTRKSEETITPWNFEEVVDKGASAQSFIERMTNFDKNLPNEKVLPKHSLLYEYFTVYNELTKVKYVTEGMRKPAFLSGEQKKAIVDLLFKTNRKVTVKQLKEDYFKKIECFDSVEISGVEDRFNASLGTYHDLLKIIKDKDFLDNEENEDILEDIVLTLTLFEDREMIEERLKTYAHLFDDKVMKQLKRRRYTGWGRLSRKLINGIRDKQSGKTILDFLKSDGFANRNFMQLIHDDSLTFKEDIQKAQVSGQGDSLHEHIANLAGSPAIKKGILQTVKVVDELVKVMGRHKPENIVIEMARENQTTQKGQKNSRERMKRIEEGIKELGSQILKEHPVENTQLQNEKLYLYYLQNGRDMYVDQELDINRLSDYDVDHIVPQSFLKDDSIDNKVLTRSDKARGKSDNVPSEEVVKKMKNYWRQLLNAKLITQRKFDNLTKAERGGLSELDKAGFIKRQLVETRQITKHVAQILDSRMNTKYDENDKLIREVKVITLKSKLVSDFRKDFQFYKVREINNYHHAHDAYLNAVVGTALIKKYPKLESEFVYGDYKVYDVRKMIAKSEQEIGKATAKYFFYSNIMNFFKTEITLANGEIRKRPLIETNGETGEIVWDKGRDFATVRKVLSMPQVNIVKKTEVQTGGFSKESILPKRNSDKLIARKKDWDPKKYGGFDSPTVAYSVLVVAKVEKGKSKKLKSVKELLGITIMERSSFEKNPIDFLEAKGYKEVKKDLIIKLPKYSLFELENGRKRMLASAGELQKGNELALPSKYVNFLYLASHYEKLKGSPEDNEQKQLFVEQHKHYLDEIIEQISEFSKRVILADANLDKVLSAYNKHRDKPIREQAENIIHLFTLTNLGAPAAFKYFDTTIDRKRYTSTKEVLDATLIHQSITGLYETRIDLSQLGGDGGEAAAKGSSPAPGGVLNLEEEYRLHEKPVPSSIDPSWLQLFPTVWAERAGMGLANQVPPVVVELRSGASPVAVRQYPMSKEAREGIRPHIQKFLDLGVLVPCRSPWNTPLLPVKKPGTNDYRPVQDLREINKRVQDIHPTVPNPYNLLSSLPPSYTWYSVLDLKDAFFCLRLHPNSQPLFAFEWKDPEKGNTGQLTWTRLPQGFKNSPTLFNEALHRDLAPFRALNPQVVLLQYVDDLLVAAPTYEDCKKGTQKLLQELSKLGYRVSAKKAQLCQREVTYLGYLLKEGKRWLTPARKATVMKIPVPTTPRQVREFLGKAGFCRLFIPGFASLAAPLYPLTKPSIPFIWTEEHQQAFDHIKKALLSAPALALPDLTKPFTLYIDERAGVARGVLTQTLGPWRRPVAYLSKKLDPVASGWPTCLKAVAAVALLLKDADKLTLGQNVTVIASHSLESIVRQPPDRWMTNARMTHYQSLLLNERVSFAPPAVLNPATLLPVESEATPVHRCSEILAEETGTRRDLEDQPLPGVPTWYTDGSSFITEGKRRAGAPIVDGKRTVWASSLPEGTSAQKAELVALTQALRLAEGKNINIYTDSRYAFATAHIHGAIYKQRGWLTSAGKDIKNKEEILALLEAIHLPRRVAIIHCPGHQRGSNPVATGNRRADEAAKQAALSTRVLAGTTKPAGKRTADGSEFEKRTADGSEFESPKKKAKVE

SEQ ID NO: 1468 - protein, 2094 aa, synthetic construct
MPAAKRVKLDGGDKKYSIGLDIGTNSVGWAVITDEYKVPSKKFKVLGNTDRHSIKKNLIGALLFDSGETAEATRLKRTARRRYTRRKNRICYLQEIFSNEMAKVDDSFFHRLEESFLVEEDKKHERHPIFGNIVDEVAYHEKYPTIYHLRKKLVDSTDKADLRLIYLALAHMIKFRGHFLIEGDLNPDNSDVDKLFIQLVQTYNQLFEENPINASGVDAKAILSARLSKSRRLENLIAQLPGEKKNGLFGNLIALSLGLTPNFKSNFDLAEDAKLQLSKDTYDDDLDNLLAQIGDQYADLFLAAKNLSDAILLSDILRVNTEITKAPLSASMIKRYDEHHQDLTLLKALVRQQLPEKYKEIFFDQSKNGYAGYIDGGASQEEFYKFIKPILEKMDGTEELLVKLNREDLLRKQRTFDNGSIPHQIHLGELHAILRRQEDFYPFLKDNREKIEKILTFRIPYYVGPLARGNSRFAWMTRKSEETITPWNFEEVVDKGASAQSFIERMTNFDKNLPNEKVLPKHSLLYEYFTVYNELTKVKYVTEGMRKPAFLSGEQKKAIVDLLFKTNRKVTVKQLKEDYFKKIECFDSVEISGVEDRFNASLGTYHDLLKIIKDKDFLDNEENEDILEDIVLTLTLFEDREMIEERLKTYAHLFDDKVMKQLKRRRYTGWGRLSRKLINGIRDKQSGKTILDFLKSDGFANRNFMQLIHDDSLTFKEDIQKAQVSGQGDSLHEHIANLAGSPAIKKGILQTVKVVDELVKVMGRHKPENIVIEMARENQTTQKGQKNSRERMKRIEEGIKELGSQILKEHPVENTQLQNEKLYLYYLQNGRDMYVDQELDINRLSDYDVDHIVPQSFLKDDSIDNKVLTRSDKARGKSDNVPSEEVVKKMKNYWRQLLNAKLITQRKFDNLTKAERGGLSELDKAGFIKRQLVETRQITKHVAQILDSRMNTKYDENDKLIREVKVITLKSKLVSDFRKDFQFYKVREINNYHHAHDAYLNAVVGTALIKKYPKLESEFVYGDYKVYDVRKMIAKSEQEIGKATAKYFFYSNIMNFFKTEITLANGEIRKRPLIETNGETGEIVWDKGRDFATVRKVLSMPQVNIVKKTEVQTGGFSKESILPKRNSDKLIARKKDWDPKKYGGFDSPTVAYSVLVVAKVEKGKSKKLKSVKELLGITIMERSSFEKNPIDFLEAKGYKEVKKDLIIKLPKYSLFELENGRKRMLASAGELQKGNELALPSKYVNFLYLASHYEKLKGSPEDNEQKQLFVEQHKHYLDEIIEQISEFSKRVILADANLDKVLSAYNKHRDKPIREQAENIIHLFTLTNLGAPAAFKYFDTTIDRKRYTSTKEVLDATLIHQSITGLYETRIDLSQLGGDGGGGSEAAAKPAPGGVLNLEEEYRLHEKPVPSSIDPSWLQLFPTVWAERAGMGLANQVPPVVVELRSGASPVAVRQYPMSKEAREGIRPHIQKFLDLGVLVPCRSPWNTPLLPVKKPGTNDYRPVQDLREINKRVQDIHPTVPNPYNLLSSLPPSYTWYSVLDLKDAFFCLRLHPNSQPLFAFEWKDPEKGNTGQLTWTRLPQGFKNSPTLFNEALHRDLAPFRALNPQVVLLQYVDDLLVAAPTYEDCKKGTQKLLQELSKLGYRVSAKKAQLCQREVTYLGYLLKEGKRWLTPARKATVMKIPVPTTPRQVREFLGKAGFCRLFIPGFASLAAPLYPLTKPSIPFIWTEEHQQAFDHIKKALLSAPALALPDLTKPFTLYIDERAGVARGVLTQTLGPWRRPVAYLSKKLDPVASGWPTCLKAVAAVALLLKDADKLTLGQNVTVIASHSLESIVRQPPDRWMTNARMTHYQSLLLNERVSFAPPAVLNPATLLPVESEATPVHRCSEILAEETGTRRDLEDQPLPGVPTWYTDGSSFITEGKRRAGAPIVDGKRTVWASSLPEGTSAQKAELVALTQALRLAEGKNINIYTDSRYAFATAHIHGAIYKQRGWLTSAGKDIKNKEEILALLEAIHLPRRVAIIHCPGHQRGSNPVATGNRRADEAAKQAALSTRVLAGTTKPAGKRTADGSEFEKRTADGSEFESPKKKAKVE

SEQ ID NO: 1469 - protein, 2094 aa, synthetic construct
MPAAKRVKLDGGDKKYSIGLDIGTNSVGWAVITDEYKVPSKKFKVLGNTDRHSIKKNLIGALLFDSGETAEATRLKRTARRRYTRRKNRICYLQEIFSNEMAKVDDSFFHRLEESFLVEEDKKHERHPIFGNIVDEVAYHEKYPTIYHLRKKLVDSTDKADLRLIYLALAHMIKFRGHFLIEGDLNPDNSDVDKLFIQLVQTYNQLFEENPINASGVDAKAILSARLSKSRRLENLIAQLPGEKKNGLFGNLIALSLGLTPNFKSNFDLAEDAKLQLSKDTYDDDLDNLLAQIGDQYADLFLAAKNLSDAILLSDILRVNTEITKAPLSASMIKRYDEHHQDLTLLKALVRQQLPEKYKEIFFDQSKNGYAGYIDGGASQEEFYKFIKPILEKMDGTEELLVKLNREDLLRKQRTFDNGSIPHQIHLGELHAILRRQEDFYPFLKDNREKIEKILTFRIPYYVGPLARGNSRFAWMTRKSEETITPWNFEEVVDKGASAQSFIERMTNFDKNLPNEKVLPKHSLLYEYFTVYNELTKVKYVTEGMRKPAFLSGEQKKAIVDLLFKTNRKVTVKQLKEDYFKKIECFDSVEISGVEDRFNASLGTYHDLLKIIKDKDFLDNEENEDILEDIVLTLTLFEDREMIEERLKTYAHLFDDKVMKQLKRRRYTGWGRLSRKLINGIRDKQSGKTILDFLKSDGFANRNFMQLIHDDSLTFKEDIQKAQVSGQGDSLHEHIANLAGSPAIKKGILQTVKVVDELVKVMGRHKPENIVIEMARENQTTQKGQKNSRERMKRIEEGIKELGSQILKEHPVENTQLQNEKLYLYYLQNGRDMYVDQELDINRLSDYDVDHIVPQSFLKDDSIDNKVLTRSDKARGKSDNVPSEEVVKKMKNYWRQLLNAKLITQRKFDNLTKAERGGLSELDKAGFIKRQLVETRQITKHVAQILDSRMNTKYDENDKLIREVKVITLKSKLVSDFRKDFQFYKVREINNYHHAHDAYLNAVVGTALIKKYPKLESEFVYGDYKVYDVRKMIAKSEQEIGKATAKYFFYSNIMNFFKTEITLANGEIRKRPLIETNGETGEIVWDKGRDFATVRKVLSMPQVNIVKKTEVQTGGFSKESILPKRNSDKLIARKKDWDPKKYGGFDSPTVAYSVLVVAKVEKGKSKKLKSVKELLGITIMERSSFEKNPIDFLEAKGYKEVKKDLIIKLPKYSLFELENGRKRMLASAGELQKGNELALPSKYVNFLYLASHYEKLKGSPEDNEQKQLFVEQHKHYLDEIIEQISEFSKRVILADANLDKVLSAYNKHRDKPIREQAENIIHLFTLTNLGAPAAFKYFDTTIDRKRYTSTKEVLDATLIHQSITGLYETRIDLSQLGGDGGEAAAKPAPGGSGGVLNLEEEYRLHEKPVPSSIDPSWLQLFPTVWAERAGMGLANQVPPVVVELRSGASPVAVRQYPMSKEAREGIRPHIQKFLDLGVLVPCRSPWNTPLLPVKKPGTNDYRPVQDLREINKRVQDIHPTVPNPYNLLSSLPPSYTWYSVLDLKDAFFCLRLHPNSQPLFAFEWKDPEKGNTGQLTWTRLPQGFKNSPTLFNEALHRDLAPFRALNPQVVLLQYVDDLLVAAPTYEDCKKGTQKLLQELSKLGYRVSAKKAQLCQREVTYLGYLLKEGKRWLTPARKATVMKIPVPTTPRQVREFLGKAGFCRLFIPGFASLAAPLYPLTKPSIPFIWTEEHQQAFDHIKKALLSAPALALPDLTKPFTLYIDERAGVARGVLTQTLGPWRRPVAYLSKKLDPVASGWPTCLKAVAAVALLLKDADKLTLGQNVTVIASHSLESIVRQPPDRWMTNARMTHYQSLLLNERVSFAPPAVLNPATLLPVESEATPVHRCSEILAEETGTRRDLEDQPLPGVPTWYTDGSSFITEGKRRAGAPIVDGKRTVWASSLPEGTSAQKAELVALTQALRLAEGKNINIYTDSRYAFATAHIHGAIYKQRGWLTSAGKDIKNKEEILALLEAIHLPRRVAIIHCPGHQRGSNPVATGNRRADEAAKQAALSTRVLAGTTKPAGKRTADGSEFEKRTADGSEFESPKKKAKVE

SEQ ID NO: 1470 - protein, 2089 aa, synthetic construct
MPAAKRVKLDGGDKKYSIGLDIGTNSVGWAVITDEYKVPSKKFKVLGNTDRHSIKKNLIGALLFDSGETAEATRLKRTARRRYTRRKNRICYLQEIFSNEMAKVDDSFFHRLEESFLVEEDKKHERHPIFGNIVDEVAYHEKYPTIYHLRKKLVDSTDKADLRLIYLALAHMIKFRGHFLIEGDLNPDNSDVDKLFIQLVQTYNQLFEENPINASGVDAKAILSARLSKSRRLENLIAQLPGEKKNGLFGNLIALSLGLTPNFKSNFDLAEDAKLQLSKDTYDDDLDNLLAQIGDQYADLFLAAKNLSDAILLSDILRVNTEITKAPLSASMIKRYDEHHQDLTLLKALVRQQLPEKYKEIFFDQSKNGYAGYIDGGASQEEFYKFIKPILEKMDGTEELLVKLNREDLLRKQRTFDNGSIPHQIHLGELHAILRRQEDFYPFLKDNREKIEKILTFRIPYYVGPLARGNSRFAWMTRKSEETITPWNFEEVVDKGASAQSFIERMTNFDKNLPNEKVLPKHSLLYEYFTVYNELTKVKYVTEGMRKPAFLSGEQKKAIVDLLFKTNRKVTVKQLKEDYFKKIECFDSVEISGVEDRFNASLGTYHDLLKIIKDKDFLDNEENEDILEDIVLTLTLFEDREMIEERLKTYAHLFDDKVMKQLKRRRYTGWGRLSRKLINGIRDKQSGKTILDFLKSDGFANRNFMQLIHDDSLTFKEDIQKAQVSGQGDSLHEHIANLAGSPAIKKGILQTVKVVDELVKVMGRHKPENIVIEMARENQTTQKGQKNSRERMKRIEEGIKELGSQILKEHPVENTQLQNEKLYLYYLQNGRDMYVDQELDINRLSDYDVDHIVPQSFLKDDSIDNKVLTRSDKARGKSDNVPSEEVVKKMKNYWRQLLNAKLITQRKFDNLTKAERGGLSELDKAGFIKRQLVETRQITKHVAQILDSRMNTKYDENDKLIREVKVITLKSKLVSDFRKDFQFYKVREINNYHHAHDAYLNAVVGTALIKKYPKLESEFVYGDYKVYDVRKMIAKSEQEIGKATAKYFFYSNIMNFFKTEITLANGEIRKRPLIETNGETGEIVWDKGRDFATVRKVLSMPQVNIVKKTEVQTGGFSKESILPKRNSDKLIARKKDWDPKKYGGFDSPTVAYSVLVVAKVEKGKSKKLKSVKELLGITIMERSSFEKNPIDFLEAKGYKEVKKDLIIKLPKYSLFELENGRKRMLASAGELQKGNELALPSKYVNFLYLASHYEKLKGSPEDNEQKQLFVEQHKHYLDEIIEQISEFSKRVILADANLDKVLSAYNKHRDKPIREQAENIIHLFTLTNLGAPAAFKYFDTTIDRKRYTSTKEVLDATLIHQSITGLYETRIDLSQLGGDGGGGSPAPGGVLNLEEEYRLHEKPVPSSIDPSWLQLFPTVWAERAGMGLANQVPPVVVELRSGASPVAVRQYPMSKEAREGIRPHIQKFLDLGVLVPCRSPWNTPLLPVKKPGTNDYRPVQDLREINKRVQDIHPTVPNPYNLLSSLPPSYTWYSVLDLKDAFFCLRLHPNSQPLFAFEWKDPEKGNTGQLTWTRLPQGFKNSPTLFNEALHRDLAPFRALNPQVVLLQYVDDLLVAAPTYEDCKKGTQKLLQELSKLGYRVSAKKAQLCQREVTYLGYLLKEGKRWLTPARKATVMKIPVPTTPRQVREFLGKAGFCRLFIPGFASLAAPLYPLTKPSIPFIWTEEHQQAFDHIKKALLSAPALALPDLTKPFTLYIDERAGVARGVLTQTLGPWRRPVAYLSKKLDPVASGWPTCLKAVAAVALLLKDADKLTLGQNVTVIASHSLESIVRQPPDRWMTNARMTHYQSLLLNERVSFAPPAVLNPATLLPVESEATPVHRCSEILAEETGTRRDLEDQPLPGVPTWYTDGSSFITEGKRRAGAPIVDGKRTVWASSLPEGTSAQKAELVALTQALRLAEGKNINIYTDSRYAFATAHIHGAIYKQRGWLTSAGKDIKNKEEILALLEAIHLPRRVAIIHCPGHQRGSNPVATGNRRADEAAKQAALSTRVLAGTTKPAGKRTADGSEFEKRTADGSEFESPKKKAKVE

SEQ ID NO: 1471 - protein, 2092 aa, synthetic construct
MPAAKRVKLDGGDKKYSIGLDIGTNSVGWAVITDEYKVPSKKFKVLGNTDRHSIKKNLIGALLFDSGETAEATRLKRTARRRYTRRKNRICYLQEIFSNEMAKVDDSFFHRLEESFLVEEDKKHERHPIFGNIVDEVAYHEKYPTIYHLRKKLVDSTDKADLRLIYLALAHMIKFRGHFLIEGDLNPDNSDVDKLFIQLVQTYNQLFEENPINASGVDAKAILSARLSKSRRLENLIAQLPGEKKNGLFGNLIALSLGLTPNFKSNFDLAEDAKLQLSKDTYDDDLDNLLAQIGDQYADLFLAAKNLSDAILLSDILRVNTEITKAPLSASMIKRYDEHHQDLTLLKALVRQQLPEKYKEIFFDQSKNGYAGYIDGGASQEEFYKFIKPILEKMDGTEELLVKLNREDLLRKQRTFDNGSIPHQIHLGELHAILRRQEDFYPFLKDNREKIEKILTFRIPYYVGPLARGNSRFAWMTRKSEETITPWNFEEVVDKGASAQSFIERMTNFDKNLPNEKVLPKHSLLYEYFTVYNELTKVKYVTEGMRKPAFLSGEQKKAIVDLLFKTNRKVTVKQLKEDYFKKIECFDSVEISGVEDRFNASLGTYHDLLKIIKDKDFLDNEENEDILEDIVLTLTLFEDREMIEERLKTYAHLFDDKVMKQLKRRRYTGWGRLSRKLINGIRDKQSGKTILDFLKSDGFANRNFMQLIHDDSLTFKEDIQKAQVSGQGDSLHEHIANLAGSPAIKKGILQTVKVVDELVKVMGRHKPENIVIEMARENQTTQKGQKNSRERMKRIEEGIKELGSQILKEHPVENTQLQNEKLYLYYLQNGRDMYVDQELDINRLSDYDVDHIVPQSFLKDDSIDNKVLTRSDKARGKSDNVPSEEVVKKMKNYWRQLLNAKLITQRKFDNLTKAERGGLSELDKAGFIKRQLVETRQITKHVAQILDSRMNTKYDENDKLIREVKVITLKSKLVSDFRKDFQFYKVREINNYHHAHDAYLNAVVGTALIKKYPKLESEFVYGDYKVYDVRKMIAKSEQEIGKATAKYFFYSNIMNFFKTEITLANGEIRKRPLIETNGETGEIVWDKGRDFATVRKVLSMPQVNIVKKTEVQTGGFSKESILPKRNSDKLIARKKDWDPKKYGGFDSPTVAYSVLVVAKVEKGKSKKLKSVKELLGITIMERSSFEKNPIDFLEAKGYKEVKKDLIIKLPKYSLFELENGRKRMLASAGELQKGNELALPSKYVNFLYLASHYEKLKGSPEDNEQKQLFVEQHKHYLDEIIEQISEFSKRVILADANLDKVLSAYNKHRDKPIREQAENIIHLFTLTNLGAPAAFKYFDTTIDRKRYTSTKEVLDATLIHQSITGLYETRIDLSQLGGDGGGGGGSSGGSGGVLNLEEEYRLHEKPVPSSIDPSWLQLFPTVWAERAGMGLANQVPPVVVELRSGASPVAVRQYPMSKEAREGIRPHIQKFLDLGVLVPCRSPWNTPLLPVKKPGTNDYRPVQDLREINKRVQDIHPTVPNPYNLLSSLPPSYTWYSVLDLKDAFFCLRLHPNSQPLFAFEWKDPEKGNTGQLTWTRLPQGFKNSPTLFNEALHRDLAPFRALNPQVVLLQYVDDLLVAAPTYEDCKKGTQKLLQELSKLGYRVSAKKAQLCQREVTYLGYLLKEGKRWLTPARKATVMKIPVPTTPRQVREFLGKAGFCRLFIPGFASLAAPLYPLTKPSIPFIWTEEHQQAFDHIKKALLSAPALALPDLTKPFTLYIDERAGVARGVLTQTLGPWRRPVAYLSKKLDPVASGWPTCLKAVAAVALLLKDADKLTLGQNVTVIASHSLESIVRQPPDRWMTNARMTHYQSLLLNERVSFAPPAVLNPATLLPVESEATPVHRCSEILAEETGTRRDLEDQPLPGVPTWYTDGSSFITEGKRRAGAPIVDGKRTVWASSLPEGTSAQKAELVALTQALRLAEGKNINIYTDSRYAFATAHIHGAIYKQRGWLTSAGKDIKNKEEILALLEAIHLPRRVAIIHCPGHQRGSNPVATGNRRADEAAKQAALSTRVLAGTTKPAGKRTADGSEFEKRTADGSEFESPKKKAKVE

SEQ ID NO: 1472 - protein, 2092 aa, synthetic construct
MPAAKRVKLDGGDKKYSIGLDIGTNSVGWAVITDEYKVPSKKFKVLGNTDRHSIKKNLIGALLFDSGETAEATRLKRTARRRYTRRKNRICYLQEIFSNEMAKVDDSFFHRLEESFLVEEDKKHERHPIFGNIVDEVAYHEKYPTIYHLRKKLVDSTDKADLRLIYLALAHMIKFRGHFLIEGDLNPDNSDVDKLFIQLVQTYNQLFEENPINASGVDAKAILSARLSKSRRLENLIAQLPGEKKNGLFGNLIALSLGLTPNFKSNFDLAEDAKLQLSKDTYDDDLDNLLAQIGDQYADLFLAAKNLSDAILLSDILRVNTEITKAPLSASMIKRYDEHHQDLTLLKALVRQQLPEKYKEIFFDQSKNGYAGYIDGGASQEEFYKFIKPILEKMDGTEELLVKLNREDLLRKQRTFDNGSIPHQIHLGELHAILRRQEDFYPFLKDNREKIEKILTFRIPYYVGPLARGNSRFAWMTRKSEETITPWNFEEVVDKGASAQSFIERMTNFDKNLPNEKVLPKHSLLYEYFTVYNELTKVKYVTEGMRKPAFLSGEQKKAIVDLLFKTNRKVTVKQLKEDYFKKIECFDSVEISGVEDRFNASLGTYHDLLKIIKDKDFLDNEENEDILEDIVLTLTLFEDREMIEERLKTYAHLFDDKVMKQLKRRRYTGWGRLSRKLINGIRDKQSGKTILDFLKSDGFANRNFMQLIHDDSLTFKEDIQKAQVSGQGDSLHEHIANLAGSPAIKKGILQTVKVVDELVKVMGRHKPENIVIEMARENQTTQKGQKNSRERMKRIEEGIKELGSQILKEHPVENTQLQNEKLYLYYLQNGRDMYVDQELDINRLSDYDVDHIVPQSFLKDDSIDNKVLTRSDKARGKSDNVPSEEVVKKMKNYWRQLLNAKLITQRKFDNLTKAERGGLSELDKAGFIKRQLVETRQITKHVAQILDSRMNTKYDENDKLIREVKVITLKSKLVSDFRKDFQFYKVREINNYHHAHDAYLNAVVGTALIKKYPKLESEFVYGDYKVYDVRKMIAKSEQEIGKATAKYFFYSNIMNFFKTEITLANGEIRKRPLIETNGETGEIVWDKGRDFATVRKVLSMPQVNIVKKTEVQTGGFSKESILPKRNSDKLIARKKDWDPKKYGGFDSPTVAYSVLVVAKVEKGKSKKLKSVKELLGITIMERSSFEKNPIDFLEAKGYKEVKKDLIIKLPKYSLFELENGRKRMLASAGELQKGNELALPSKYVNFLYLASHYEKLKGSPEDNEQKQLFVEQHKHYLDEIIEQISEFSKRVILADANLDKVLSAYNKHRDKPIREQAENIIHLFTLTNLGAPAAFKYFDTTIDRKRYTSTKEVLDATLIHQSITGLYETRIDLSQLGGDGGGGSGGGGSSGGVLNLEEEYRLHEKPVPSSIDPSWLQLFPTVWAERAGMGLANQVPPVVVELRSGASPVAVRQYPMSKEAREGIRPHIQKFLDLGVLVPCRSPWNTPLLPVKKPGTNDYRPVQDLREINKRVQDIHPTVPNPYNLLSSLPPSYTWYSVLDLKDAFFCLRLHPNSQPLFAFEWKDPEKGNTGQLTWTRLPQGFKNSPTLFNEALHRDLAPFRALNPQVVLLQYVDDLLVAAPTYEDCKKGTQKLLQELSKLGYRVSAKKAQLCQREVTYLGYLLKEGKRWLTPARKATVMKIPVPTTPRQVREFLGKAGFCRLFIPGFASLAAPLYPLTKPSIPFIWTEEHQQAFDHIKKALLSAPALALPDLTKPFTLYIDERAGVARGVLTQTLGPWRRPVAYLSKKLDPVASGWPTCLKAVAAVALLLKDADKLTLGQNVTVIASHSLESIVRQPPDRWMTNARMTHYQSLLLNERVSFAPPAVLNPATLLPVESEATPVHRCSEILAEETGTRRDLEDQPLPGVPTWYTDGSSFITEGKRRAGAPIVDGKRTVWASSLPEGTSAQKAELVALTQALRLAEGKNINIYTDSRYAFATAHIHGAIYKQRGWLTSAGKDIKNKEEILALLEAIHLPRRVAIIHCPGHQRGSNPVATGNRRADEAAKQAALSTRVLAGTTKPAGKRTADGSEFEKRTADGSEFESPKKKAKVE

SEQ ID NO: 1473 - protein, 2094 aa, synthetic construct
MPAAKRVKLDGGDKKYSIGLDIGTNSVGWAVITDEYKVPSKKFKVLGNTDRHSIKKNLIGALLFDSGETAEATRLKRTARRRYTRRKNRICYLQEIFSNEMAKVDDSFFHRLEESFLVEEDKKHERHPIFGNIVDEVAYHEKYPTIYHLRKKLVDSTDKADLRLIYLALAHMIKFRGHFLIEGDLNPDNSDVDKLFIQLVQTYNQLFEENPINASGVDAKAILSARLSKSRRLENLIAQLPGEKKNGLFGNLIALSLGLTPNFKSNFDLAEDAKLQLSKDTYDDDLDNLLAQIGDQYADLFLAAKNLSDAILLSDILRVNTEITKAPLSASMIKRYDEHHQDLTLLKALVRQQLPEKYKEIFFDQSKNGYAGYIDGGASQEEFYKFIKPILEKMDGTEELLVKLNREDLLRKQRTFDNGSIPHQIHLGELHAILRRQEDFYPFLKDNREKIEKILTFRIPYYVGPLARGNSRFAWMTRKSEETITPWNFEEVVDKGASAQSFIERMTNFDKNLPNEKVLPKHSLLYEYFTVYNELTKVKYVTEGMRKPAFLSGEQKKAIVDLLFKTNRKVTVKQLKEDYFKKIECFDSVEISGVEDRFNASLGTYHDLLKIIKDKDFLDNEENEDILEDIVLTLTLFEDREMIEERLKTYAHLFDDKVMKQLKRRRYTGWGRLSRKLINGIRDKQSGKTILDFLKSDGFANRNFMQLIHDDSLTFKEDIQKAQVSGQGDSLHEHIANLAGSPAIKKGILQTVKVVDELVKVMGRHKPENIVIEMARENQTTQKGQKNSRERMKRIEEGIKELGSQILKEHPVENTQLQNEKLYLYYLQNGRDMYVDQELDINRLSDYDVDHIVPQSFLKDDSIDNKVLTRSDKARGKSDNVPSEEVVKKMKNYWRQLLNAKLITQRKFDNLTKAERGGLSELDKAGFIKRQLVETRQITKHVAQILDSRMNTKYDENDKLIREVKVITLKSKLVSDFRKDFQFYKVREINNYHHAHDAYLNAVVGTALIKKYPKLESEFVYGDYKVYDVRKMIAKSEQEIGKATAKYFFYSNIMNFFKTEITLANGEIRKRPLIETNGETGEIVWDKGRDFATVRKVLSMPQVNIVKKTEVQTGGFSKESILPKRNSDKLIARKKDWDPKKYGGFDSPTVAYSVLVVAKVEKGKSKKLKSVKELLGITIMERSSFEKNPIDFLEAKGYKEVKKDLIIKLPKYSLFELENGRKRMLASAGELQKGNELALPSKYVNFLYLASHYEKLKGSPEDNEQKQLFVEQHKHYLDEIIEQISEFSKRVILADANLDKVLSAYNKHRDKPIREQAENIIHLFTLTNLGAPAAFKYFDTTIDRKRYTSTKEVLDATLIHQSITGLYETRIDLSQLGGDGGGGSEAAAKGSSGGVLNLEEEYRLHEKPVPSSIDPSWLQLFPTVWAERAGMGLANQVPPVVVELRSGASPVAVRQYPMSKEAREGIRPHIQKFLDLGVLVPCRSPWNTPLLPVKKPGTNDYRPVQDLREINKRVQDIHPTVPNPYNLLSSLPPSYTWYSVLDLKDAFFCLRLHPNSQPLFAFEWKDPEKGNTGQLTWTRLPQGFKNSPTLFNEALHRDLAPFRALNPQVVLLQYVDDLLVAAPTYEDCKKGTQKLLQELSKLGYRVSAKKAQLCQREVTYLGYLLKEGKRWLTPARKATVMKIPVPTTPRQVREFLGKAGFCRLFIPGFASLAAPLYPLTKPSIPFIWTEEHQQAFDHIKKALLSAPALALPDLTKPFTLYIDERAGVARGVLTQTLGPWRRPVAYLSKKLDPVASGWPTCLKAVAAVALLLKDADKLTLGQNVTVIASHSLESIVRQPPDRWMTNARMTHYQSLLLNERVSFAPPAVLNPATLLPVESEATPVHRCSEILAEETGTRRDLEDQPLPGVPTWYTDGSSFITEGKRRAGAPIVDGKRTVWASSLPEGTSAQKAELVALTQALRLAEGKNINIYTDSRYAFATAHIHGAIYKQRGWLTSAGKDIKNKEEILALLEAIHLPRRVAIIHCPGHQRGSNPVATGNRRADEAAKQAALSTRVLAGTTKPAGKRTADGSEFEKRTADGSEFESPKKKAKVE

SEQ ID NO: 1474 - protein, 2094 aa, synthetic construct
MPAAKRVKLDGGDKKYSIGLDIGTNSVGWAVITDEYKVPSKKFKVLGNTDRHSIKKNLIGALLFDSGETAEATRLKRTARRRYTRRKNRICYLQEIFSNEMAKVDDSFFHRLEESFLVEEDKKHERHPIFGNIVDEVAYHEKYPTIYHLRKKLVDSTDKADLRLIYLALAHMIKFRGHFLIEGDLNPDNSDVDKLFIQLVQTYNQLFEENPINASGVDAKAILSARLSKSRRLENLIAQLPGEKKNGLFGNLIALSLGLTPNFKSNFDLAEDAKLQLSKDTYDDDLDNLLAQIGDQYADLFLAAKNLSDAILLSDILRVNTEITKAPLSASMIKRYDEHHQDLTLLKALVRQQLPEKYKEIFFDQSKNGYAGYIDGGASQEEFYKFIKPILEKMDGTEELLVKLNREDLLRKQRTFDNGSIPHQIHLGELHAILRRQEDFYPFLKDNREKIEKILTFRIPYYVGPLARGNSRFAWMTRKSEETITPWNFEEVVDKGASAQSFIERMTNFDKNLPNEKVLPKHSLLYEYFTVYNELTKVKYVTEGMRKPAFLSGEQKKAIVDLLFKTNRKVTVKQLKEDYFKKIECFDSVEISGVEDRFNASLGTYHDLLKIIKDKDFLDNEENEDILEDIVLTLTLFEDREMIEERLKTYAHLFDDKVMKQLKRRRYTGWGRLSRKLINGIRDKQSGKTILDFLKSDGFANRNFMQLIHDDSLTFKEDIQKAQVSGQGDSLHEHIANLAGSPAIKKGILQTVKVVDELVKVMGRHKPENIVIEMARENQTTQKGQKNSRERMKRIEEGIKELGSQILKEHPVENTQLQNEKLYLYYLQNGRDMYVDQELDINRLSDYDVDHIVPQSFLKDDSIDNKVLTRSDKARGKSDNVPSEEVVKKMKNYWRQLLNAKLITQRKFDNLTKAERGGLSELDKAGFIKRQLVETRQITKHVAQILDSRMNTKYDENDKLIREVKVITLKSKLVSDFRKDFQFYKVREINNYHHAHDAYLNAVVGTALIKKYPKLESEFVYGDYKVYDVRKMIAKSEQEIGKATAKYFFYSNIMNFFKTEITLANGEIRKRPLIETNGETGEIVWDKGRDFATVRKVLSMPQVNIVKKTEVQTGGFSKESILPKRNSDKLIARKKDWDPKKYGGFDSPTVAYSVLVVAKVEKGKSKKLKSVKELLGITIMERSSFEKNPIDFLEAKGYKEVKKDLIIKLPKYSLFELENGRKRMLASAGELQKGNELALPSKYVNFLYLASHYEKLKGSPEDNEQKQLFVEQHKHYLDEIIEQISEFSKRVILADANLDKVLSAYNKHRDKPIREQAENIIHLFTLTNLGAPAAFKYFDTTIDRKRYTSTKEVLDATLIHQSITGLYETRIDLSQLGGDGGGSSEAAAKGGSGGVLNLEEEYRLHEKPVPSSIDPSWLQLFPTVWAERAGMGLANQVPPVVVELRSGASPVAVRQYPMSKEAREGIRPHIQKFLDLGVLVPCRSPWNTPLLPVKKPGTNDYRPVQDLREINKRVQDIHPTVPNPYNLLSSLPPSYTWYSVLDLKDAFFCLRLHPNSQPLFAFEWKDPEKGNTGQLTWTRLPQGFKNSPTLFNEALHRDLAPFRALNPQVVLLQYVDDLLVAAPTYEDCKKGTQKLLQELSKLGYRVSAKKAQLCQREVTYLGYLLKEGKRWLTPARKATVMKIPVPTTPRQVREFLGKAGFCRLFIPGFASLAAPLYPLTKPSIPFIWTEEHQQAFDHIKKALLSAPALALPDLTKPFTLYIDERAGVARGVLTQTLGPWRRPVAYLSKKLDPVASGWPTCLKAVAAVALLLKDADKLTLGQNVTVIASHSLESIVRQPPDRWMTNARMTHYQSLLLNERVSFAPPAVLNPATLLPVESEATPVHRCSEILAEETGTRRDLEDQPLPGVPTWYTDGSSFITEGKRRAGAPIVDGKRTVWASSLPEGTSAQKAELVALTQALRLAEGKNINIYTDSRYAFATAHIHGAIYKQRGWLTSAGKDIKNKEEILALLEAIHLPRRVAIIHCPGHQRGSNPVATGNRRADEAAKQAALSTRVLAGTTKPAGKRTADGSEFEKRTADGSEFESPKKKAKVE

SEQ ID NO: 1475 - protein, 2089 aa, synthetic construct
MPAAKRVKLDGGDKKYSIGLDIGTNSVGWAVITDEYKVPSKKFKVLGNTDRHSIKKNLIGALLFDSGETAEATRLKRTARRRYTRRKNRICYLQEIFSNEMAKVDDSFFHRLEESFLVEEDKKHERHPIFGNIVDEVAYHEKYPTIYHLRKKLVDSTDKADLRLIYLALAHMIKFRGHFLIEGDLNPDNSDVDKLFIQLVQTYNQLFEENPINASGVDAKAILSARLSKSRRLENLIAQLPGEKKNGLFGNLIALSLGLTPNFKSNFDLAEDAKLQLSKDTYDDDLDNLLAQIGDQYADLFLAAKNLSDAILLSDILRVNTEITKAPLSASMIKRYDEHHQDLTLLKALVRQQLPEKYKEIFFDQSKNGYAGYIDGGASQEEFYKFIKPILEKMDGTEELLVKLNREDLLRKQRTFDNGSIPHQIHLGELHAILRRQEDFYPFLKDNREKIEKILTFRIPYYVGPLARGNSRFAWMTRKSEETITPWNFEEVVDKGASAQSFIERMTNFDKNLPNEKVLPKHSLLYEYFTVYNELTKVKYVTEGMRKPAFLSGEQKKAIVDLLFKTNRKVTVKQLKEDYFKKIECFDSVEISGVEDRFNASLGTYHDLLKIIKDKDFLDNEENEDILEDIVLTLTLFEDREMIEERLKTYAHLFDDKVMKQLKRRRYTGWGRLSRKLINGIRDKQSGKTILDFLKSDGFANRNFMQLIHDDSLTFKEDIQKAQVSGQGDSLHEHIANLAGSPAIKKGILQTVKVVDELVKVMGRHKPENIVIEMARENQTTQKGQKNSRERMKRIEEGIKELGSQILKEHPVENTQLQNEKLYLYYLQNGRDMYVDQELDINRLSDYDVDHIVPQSFLKDDSIDNKVLTRSDKARGKSDNVPSEEVVKKMKNYWRQLLNAKLITQRKFDNLTKAERGGLSELDKAGFIKRQLVETRQITKHVAQILDSRMNTKYDENDKLIREVKVITLKSKLVSDFRKDFQFYKVREINNYHHAHDAYLNAVVGTALIKKYPKLESEFVYGDYKVYDVRKMIAKSEQEIGKATAKYFFYSNIMNFFKTEITLANGEIRKRPLIETNGETGEIVWDKGRDFATVRKVLSMPQVNIVKKTEVQTGGFSKESILPKRNSDKLIARKKDWDPKKYGGFDSPTVAYSVLVVAKVEKGKSKKLKSVKELLGITIMERSSFEKNPIDFLEAKGYKEVKKDLIIKLPKYSLFELENGRKRMLASAGELQKGNELALPSKYVNFLYLASHYEKLKGSPEDNEQKQLFVEQHKHYLDEIIEQISEFSKRVILADANLDKVLSAYNKHRDKPIREQAENIIHLFTLTNLGAPAAFKYFDTTIDRKRYTSTKEVLDATLIHQSITGLYETRIDLSQLGGDGGGGSGGSGGVLNLEEEYRLHEKPVPSSIDPSWLQLFPTVWAERAGMGLANQVPPVVVELRSGASPVAVRQYPMSKEAREGIRPHIQKFLDLGVLVPCRSPWNTPLLPVKKPGTNDYRPVQDLREINKRVQDIHPTVPNPYNLLSSLPPSYTWYSVLDLKDAFFCLRLHPNSQPLFAFEWKDPEKGNTGQLTWTRLPQGFKNSPTLFNEALHRDLAPFRALNPQVVLLQYVDDLLVAAPTYEDCKKGTQKLLQELSKLGYRVSAKKAQLCQREVTYLGYLLKEGKRWLTPARKATVMKIPVPTTPRQVREFLGKAGFCRLFIPGFASLAAPLYPLTKPSIPFIWTEEHQQAFDHIKKALLSAPALALPDLTKPFTLYIDERAGVARGVLTQTLGPWRRPVAYLSKKLDPVASGWPTCLKAVAAVALLLKDADKLTLGQNVTVIASHSLESIVRQPPDRWMTNARMTHYQSLLLNERVSFAPPAVLNPATLLPVESEATPVHRCSEILAEETGTRRDLEDQPLPGVPTWYTDGSSFITEGKRRAGAPIVDGKRTVWASSLPEGTSAQKAELVALTQALRLAEGKNINIYTDSRYAFATAHIHGAIYKQRGWLTSAGKDIKNKEEILALLEAIHLPRRVAIIHCPGHQRGSNPVATGNRRADEAAKQAALSTRVLAGTTKPAGKRTADGSEFEKRTADGSEFESPKKKAKVE

SEQ ID NO: 1476 - protein, 2092 aa, synthetic construct
MPAAKRVKLDGGDKKYSIGLDIGTNSVGWAVITDEYKVPSKKFKVLGNTDRHSIKKNLIGALLFDSGETAEATRLKRTARRRYTRRKNRICYLQEIFSNEMAKVDDSFFHRLEESFLVEEDKKHERHPIFGNIVDEVAYHEKYPTIYHLRKKLVDSTDKADLRLIYLALAHMIKFRGHFLIEGDLNPDNSDVDKLFIQLVQTYNQLFEENPINASGVDAKAILSARLSKSRRLENLIAQLPGEKKNGLFGNLIALSLGLTPNFKSNFDLAEDAKLQLSKDTYDDDLDNLLAQIGDQYADLFLAAKNLSDAILLSDILRVNTEITKAPLSASMIKRYDEHHQDLTLLKALVRQQLPEKYKEIFFDQSKNGYAGYIDGGASQEEFYKFIKPILEKMDGTEELLVKLNREDLLRKQRTFDNGSIPHQIHLGELHAILRRQEDFYPFLKDNREKIEKILTFRIPYYVGPLARGNSRFAWMTRKSEETITPWNFEEVVDKGASAQSFIERMTNFDKNLPNEKVLPKHSLLYEYFTVYNELTKVKYVTEGMRKPAFLSGEQKKAIVDLLFKTNRKVTVKQLKEDYFKKIECFDSVEISGVEDRFNASLGTYHDLLKIIKDKDFLDNEENEDILEDIVLTLTLFEDREMIEERLKTYAHLFDDKVMKQLKRRRYTGWGRLSRKLINGIRDKQSGKTILDFLKSDGFANRNFMQLIHDDSLTFKEDIQKAQVSGQGDSLHEHIANLAGSPAIKKGILQTVKVVDELVKVMGRHKPENIVIEMARENQTTQKGQKNSRERMKRIEEGIKELGSQILKEHPVENTQLQNEKLYLYYLQNGRDMYVDQELDINRLSDYDVDHIVPQSFLKDDSIDNKVLTRSDKARGKSDNVPSEEVVKKMKNYWRQLLNAKLITQRKFDNLTKAERGGLSELDKAGFIKRQLVETRQITKHVAQILDSRMNTKYDENDKLIREVKVITLKSKLVSDFRKDFQFYKVREINNYHHAHDAYLNAVVGTALIKKYPKLESEFVYGDYKVYDVRKMIAKSEQEIGKATAKYFFYSNIMNFFKTEITLANGEIRKRPLIETNGETGEIVWDKGRDFATVRKVLSMPQVNIVKKTEVQTGGFSKESILPKRNSDKLIARKKDWDPKKYGGFDSPTVAYSVLVVAKVEKGKSKKLKSVKELLGITIMERSSFEKNPIDFLEAKGYKEVKKDLIIKLPKYSLFELENGRKRMLASAGELQKGNELALPSKYVNFLYLASHYEKLKGSPEDNEQKQLFVEQHKHYLDEIIEQISEFSKRVILADANLDKVLSAYNKHRDKPIREQAENIIHLFTLTNLGAPAAFKYFDTTIDRKRYTSTKEVLDATLIHQSITGLYETRIDLSQLGGDGGGGSGSSPAPGGVLNLEEEYRLHEKPVPSSIDPSWLQLFPTVWAERAGMGLANQVPPVVVELRSGASPVAVRQYPMSKEAREGIRPHIQKFLDLGVLVPCRSPWNTPLLPVKKPGTNDYRPVQDLREINKRVQDIHPTVPNPYNLLSSLPPSYTWYSVLDLKDAFFCLRLHPNSQPLFAFEWKDPEKGNTGQLTWTRLPQGFKNSPTLFNEALHRDLAPFRALNPQVVLLQYVDDLLVAAPTYEDCKKGTQKLLQELSKLGYRVSAKKAQLCQREVTYLGYLLKEGKRWLTPARKATVMKIPVPTTPRQVREFLGKAGFCRLFIPGFASLAAPLYPLTKPSIPFIWTEEHQQAFDHIKKALLSAPALALPDLTKPFTLYIDERAGVARGVLTQTLGPWRRPVAYLSKKLDPVASGWPTCLKAVAAVALLLKDADKLTLGQNVTVIASHSLESIVRQPPDRWMTNARMTHYQSLLLNERVSFAPPAVLNPATLLPVESEATPVHRCSEILAEETGTRRDLEDQPLPGVPTWYTDGSSFITEGKRRAGAPIVDGKRTVWASSLPEGTSAQKAELVALTQALRLAEGKNINIYTDSRYAFATAHIHGAIYKQRGWLTSAGKDIKNKEEILALLEAIHLPRRVAIIHCPGHQRGSNPVATGNRRADEAAKQAALSTRVLAGTTKPAGKRTADGSEFEKRTADGSEFESPKKKAKVE

SEQ ID NO: 1477 - protein, 2092 aa, synthetic construct
MPAAKRVKLDGGDKKYSIGLDIGTNSVGWAVITDEYKVPSKKFKVLGNTDRHSIKKNLIGALLFDSGETAEATRLKRTARRRYTRRKNRICYLQEIFSNEMAKVDDSFFHRLEESFLVEEDKKHERHPIFGNIVDEVAYHEKYPTIYHLRKKLVDSTDKADLRLIYLALAHMIKFRGHFLIEGDLNPDNSDVDKLFIQLVQTYNQLFEENPINASGVDAKAILSARLSKSRRLENLIAQLPGEKKNGLFGNLIALSLGLTPNFKSNFDLAEDAKLQLSKDTYDDDLDNLLAQIGDQYADLFLAAKNLSDAILLSDILRVNTEITKAPLSASMIKRYDEHHQDLTLLKALVRQQLPEKYKEIFFDQSKNGYAGYIDGGASQEEFYKFIKPILEKMDGTEELLVKLNREDLLRKQRTFDNGSIPHQIHLGELHAILRRQEDFYPFLKDNREKIEKILTFRIPYYVGPLARGNSRFAWMTRKSEETITPWNFEEVVDKGASAQSFIERMTNFDKNLPNEKVLPKHSLLYEYFTVYNELTKVKYVTEGMRKPAFLSGEQKKAIVDLLFKTNRKVTVKQLKEDYFKKIECFDSVEISGVEDRFNASLGTYHDLLKIIKDKDFLDNEENEDILEDIVLTLTLFEDREMIEERLKTYAHLFDDKVMKQLKRRRYTGWGRLSRKLINGIRDKQSGKTILDFLKSDGFANRNFMQLIHDDSLTFKEDIQKAQVSGQGDSLHEHIANLAGSPAIKKGILQTVKVVDELVKVMGRHKPENIVIEMARENQTTQKGQKNSRERMKRIEEGIKELGSQILKEHPVENTQLQNEKLYLYYLQNGRDMYVDQELDINRLSDYDVDHIVPQSFLKDDSIDNKVLTRSDKARGKSDNVPSEEVVKKMKNYWRQLLNAKLITQRKFDNLTKAERGGLSELDKAGFIKRQLVETRQITKHVAQILDSRMNTKYDENDKLIREVKVITLKSKLVSDFRKDFQFYKVREINNYHHAHDAYLNAVVGTALIKKYPKLESEFVYGDYKVYDVRKMIAKSEQEIGKATAKYFFYSNIMNFFKTEITLANGEIRKRPLIETNGETGEIVWDKGRDFATVRKVLSMPQVNIVKKTEVQTGGFSKESILPKRNSDKLIARKKDWDPKKYGGFDSPTVAYSVLVVAKVEKGKSKKLKSVKELLGITIMERSSFEKNPIDFLEAKGYKEVKKDLIIKLPKYSLFELENGRKRMLASAGELQKGNELALPSKYVNFLYLASHYEKLKGSPEDNEQKQLFVEQHKHYLDEIIEQISEFSKRVILADANLDKVLSAYNKHRDKPIREQAENIIHLFTLTNLGAPAAFKYFDTTIDRKRYTSTKEVLDATLIHQSITGLYETRIDLSQLGGDGGGSSGGGGGSGGVLNLEEEYRLHEKPVPSSIDPSWLQLFPTVWAERAGMGLANQVPPVVVELRSGASPVAVRQYPMSKEAREGIRPHIQKFLDLGVLVPCRSPWNTPLLPVKKPGTNDYRPVQDLREINKRVQDIHPTVPNPYNLLSSLPPSYTWYSVLDLKDAFFCLRLHPNSQPLFAFEWKDPEKGNTGQLTWTRLPQGFKNSPTLFNEALHRDLAPFRALNPQVVLLQYVDDLLVAAPTYEDCKKGTQKLLQELSKLGYRVSAKKAQLCQREVTYLGYLLKEGKRWLTPARKATVMKIPVPTTPRQVREFLGKAGFCRLFIPGFASLAAPLYPLTKPSIPFIWTEEHQQAFDHIKKALLSAPALALPDLTKPFTLYIDERAGVARGVLTQTLGPWRRPVAYLSKKLDPVASGWPTCLKAVAAVALLLKDADKLTLGQNVTVIASHSLESIVRQPPDRWMTNARMTHYQSLLLNERVSFAPPAVLNPATLLPVESEATPVHRCSEILAEETGTRRDLEDQPLPGVPTWYTDGSSFITEGKRRAGAPIVDGKRTVWASSLPEGTSAQKAELVALTQALRLAEGKNINIYTDSRYAFATAHIHGAIYKQRGWLTSAGKDIKNKEEILALLEAIHLPRRVAIIHCPGHQRGSNPVATGNRRADEAAKQAALSTRVLAGTTKPAGKRTADGSEFEKRTADGSEFESPKKKAKVE

SEQ ID NO: 1478 - protein, 2007 aa, synthetic construct
MPAAKRVKLDGGDKKYSIGLDIGTNSVGWAVITDEYKVPSKKFKVLGNTDRHSIKKNLIGALLFDSGETAEATRLKRTARRRYTRRKNRICYLQEIFSNEMAKVDDSFFHRLEESFLVEEDKKHERHPIFGNIVDEVAYHEKYPTIYHLRKKLVDSTDKADLRLIYLALAHMIKFRGHFLIEGDLNPDNSDVDKLFIQLVQTYNQLFEENPINASGVDAKAILSARLSKSRRLENLIAQLPGEKKNGLFGNLIALSLGLTPNFKSNFDLAEDAKLQLSKDTYDDDLDNLLAQIGDQYADLFLAAKNLSDAILLSDILRVNTEITKAPLSASMIKRYDEHHQDLTLLKALVRQQLPEKYKEIFFDQSKNGYAGYIDGGASQEEFYKFIKPILEKMDGTEELLVKLNREDLLRKQRTFDNGSIPHQIHLGELHAILRRQEDFYPFLKDNREKIEKILTFRIPYYVGPLARGNSRFAWMTRKSEETITPWNFEEVVDKGASAQSFIERMTNFDKNLPNEKVLPKHSLLYEYFTVYNELTKVKYVTEGMRKPAFLSGEQKKAIVDLLFKTNRKVTVKQLKEDYFKKIECFDSVEISGVEDRFNASLGTYHDLLKIIKDKDFLDNEENEDILEDIVLTLTLFEDREMIEERLKTYAHLFDDKVMKQLKRRRYTGWGRLSRKLINGIRDKQSGKTILDFLKSDGFANRNFMQLIHDDSLTFKEDIQKAQVSGQGDSLHEHIANLAGSPAIKKGILQTVKVVDELVKVMGRHKPENIVIEMARENQTTQKGQKNSRERMKRIEEGIKELGSQILKEHPVENTQLQNEKLYLYYLQNGRDMYVDQELDINRLSDYDVDHIVPQSFLKDDSIDNKVLTRSDKARGKSDNVPSEEVVKKMKNYWRQLLNAKLITQRKFDNLTKAERGGLSELDKAGFIKRQLVETRQITKHVAQILDSRMNTKYDENDKLIREVKVITLKSKLVSDFRKDFQFYKVREINNYHHAHDAYLNAVVGTALIKKYPKLESEFVYGDYKVYDVRKMIAKSEQEIGKATAKYFFYSNIMNFFKTEITLANGEIRKRPLIETNGETGEIVWDKGRDFATVRKVLSMPQVNIVKKTEVQTGGFSKESILPKRNSDKLIARKKDWDPKKYGGFDSPTVAYSVLVVAKVEKGKSKKLKSVKELLGITIMERSSFEKNPIDFLEAKGYKEVKKDLIIKLPKYSLFELENGRKRMLASAGELQKGNELALPSKYVNFLYLASHYEKLKGSPEDNEQKQLFVEQHKHYLDEIIEQISEFSKRVILADANLDKVLSAYNKHRDKPIREQAENIIHLFTLTNLGAPAAFKYFDTTIDRKRYTSTKEVLDATLIHQSITGLYETRIDLSQLGGDGGGGGGGGGAVLGLEHLPRPPQISQFPLNPERLQALQHLVRKALEAGHIEPYTGPGNNPVFPVKKANGTWRFIHDLRATNSLTIDLSSSSPGPPDLSSLPTTLAHLQTIDLRDAFFQIPLPKQFQPYFAFTVPQQCNYGPGTRYAWKVLPQGFKNSPTLFEMQLAHILQPIRQAFPQCTILQYMDDILLASPSHEDLLLLSEATMASLISHGLPVSENKTQQTPGTIKFLGQIISPNHLTYDAVPTVPIRSRWALPELQALLGEIQWVSKGTPTLRQPLHSLYCALQRHTDPRDQIYLNPSQVQSLVQLRQALSQNCRSRLVQTLPLLGAIMLTLTGTTTVVFQSKEQWPLVWLHAPLPHTSQCPWGQLLASAVLLLDKYTLQSYGLLCQTIHHNISTQTFNQFIQTSDHPSVPILLHHSHRFKNLGAQTGELWNTFLKTAAPLAPVKALMPVFTLSPVIINTAPCLFSDGSTSRAAYILWDKQILSQRSFPLPPPHKSAQRAELLGLLHGLSSARSWRCLNIFLDSKYLYHYLRTLALGTFQGRSSQAPFQALLPRLLSRKVVYLHHVRSHTNLPDPISRLNALTDALLITPVLQLAGKRTADGSEFEKRTADGSEFESPKKKAKVE

SEQ ID NO: 1479 - protein, 2013 aa, synthetic construct
MPAAKRVKLDGGDKKYSIGLDIGTNSVGWAVITDEYKVPSKKFKVLGNTDRHSIKKNLIGALLFDSGETAEATRLKRTARRRYTRRKNRICYLQEIFSNEMAKVDDSFFHRLEESFLVEEDKKHERHPIFGNIVDEVAYHEKYPTIYHLRKKLVDSTDKADLRLIYLALAHMIKFRGHFLIEGDLNPDNSDVDKLFIQLVQTYNQLFEENPINASGVDAKAILSARLSKSRRLENLIAQLPGEKKNGLFGNLIALSLGLTPNFKSNFDLAEDAKLQLSKDTYDDDLDNLLAQIGDQYADLFLAAKNLSDAILLSDILRVNTEITKAPLSASMIKRYDEHHQDLTLLKALVRQQLPEKYKEIFFDQSKNGYAGYIDGGASQEEFYKFIKPILEKMDGTEELLVKLNREDLLRKQRTFDNGSIPHQIHLGELHAILRRQEDFYPFLKDNREKIEKILTFRIPYYVGPLARGNSRFAWMTRKSEETITPWNFEEVVDKGASAQSFIERMTNFDKNLPNEKVLPKHSLLYEYFTVYNELTKVKYVTEGMRKPAFLSGEQKKAIVDLLFKTNRKVTVKQLKEDYFKKIECFDSVEISGVEDRFNASLGTYHDLLKIIKDKDFLDNEENEDILEDIVLTLTLFEDREMIEERLKTYAHLFDDKVMKQLKRRRYTGWGRLSRKLINGIRDKQSGKTILDFLKSDGFANRNFMQLIHDDSLTFKEDIQKAQVSGQGDSLHEHIANLAGSPAIKKGILQTVKVVDELVKVMGRHKPENIVIEMARENQTTQKGQKNSRERMKRIEEGIKELGSQILKEHPVENTQLQNEKLYLYYLQNGRDMYVDQELDINRLSDYDVDHIVPQSFLKDDSIDNKVLTRSDKARGKSDNVPSEEVVKKMKNYWRQLLNAKLITQRKFDNLTKAERGGLSELDKAGFIKRQLVETRQITKHVAQILDSRMNTKYDENDKLIREVKVITLKSKLVSDFRKDFQFYKVREINNYHHAHDAYLNAVVGTALIKKYPKLESEFVYGDYKVYDVRKMIAKSEQEIGKATAKYFFYSNIMNFFKTEITLANGEIRKRPLIETNGETGEIVWDKGRDFATVRKVLSMPQVNIVKKTEVQTGGFSKESILPKRNSDKLIARKKDWDPKKYGGFDSPTVAYSVLVVAKVEKGKSKKLKSVKELLGITIMERSSFEKNPIDFLEAKGYKEVKKDLIIKLPKYSLFELENGRKRMLASAGELQKGNELALPSKYVNFLYLASHYEKLKGSPEDNEQKQLFVEQHKHYLDEIIEQISEFSKRVILADANLDKVLSAYNKHRDKPIREQAENIIHLFTLTNLGAPAAFKYFDTTIDRKRYTSTKEVLDATLIHQSITGLYETRIDLSQLGGDGGPAPAPAPAPAPGGAVLGLEHLPRPPQISQFPLNPERLQALQHLVRKALEAGHIEPYTGPGNNPVFPVKKANGTWRFIHDLRATNSLTIDLSSSSPGPPDLSSLPTTLAHLQTIDLRDAFFQIPLPKQFQPYFAFTVPQQCNYGPGTRYAWKVLPQGFKNSPTLFEMQLAHILQPIRQAFPQCTILQYMDDILLASPSHEDLLLLSEATMASLISHGLPVSENKTQQTPGTIKFLGQIISPNHLTYDAVPTVPIRSRWALPELQALLGEIQWVSKGTPTLRQPLHSLYCALQRHTDPRDQIYLNPSQVQSLVQLRQALSQNCRSRLVQTLPLLGAIMLTLTGTTTVVFQSKEQWPLVWLHAPLPHTSQCPWGQLLASAVLLLDKYTLQSYGLLCQTIHHNISTQTFNQFIQTSDHPSVPILLHHSHRFKNLGAQTGELWNTFLKTAAPLAPVKALMPVFTLSPVIINTAPCLFSDGSTSRAAYILWDKQILSQRSFPLPPPHKSAQRAELLGLLHGLSSARSWRCLNIFLDSKYLYHYLRTLALGTFQGRSSQAPFQALLPRLLSRKVVYLHHVRSHTNLPDPISRLNALTDALLITPVLQLAGKRTADGSEFEKRTADGSEFESPKKKAKVE

SEQ ID NO: 1480 - protein, 2013 aa, synthetic construct
MPAAKRVKLDGGDKKYSIGLDIGTNSVGWAVITDEYKVPSKKFKVLGNTDRHSIKKNLIGALLFDSGETAEATRLKRTARRRYTRRKNRICYLQEIFSNEMAKVDDSFFHRLEESFLVEEDKKHERHPIFGNIVDEVAYHEKYPTIYHLRKKLVDSTDKADLRLIYLALAHMIKFRGHFLIEGDLNPDNSDVDKLFIQLVQTYNQLFEENPINASGVDAKAILSARLSKSRRLENLIAQLPGEKKNGLFGNLIALSLGLTPNFKSNFDLAEDAKLQLSKDTYDDDLDNLLAQIGDQYADLFLAAKNLSDAILLSDILRVNTEITKAPLSASMIKRYDEHHQDLTLLKALVRQQLPEKYKEIFFDQSKNGYAGYIDGGASQEEFYKFIKPILEKMDGTEELLVKLNREDLLRKQRTFDNGSIPHQIHLGELHAILRRQEDFYPFLKDNREKIEKILTFRIPYYVGPLARGNSRFAWMTRKSEETITPWNFEEVVDKGASAQSFIERMTNFDKNLPNEKVLPKHSLLYEYFTVYNELTKVKYVTEGMRKPAFLSGEQKKAIVDLLFKTNRKVTVKQLKEDYFKKIECFDSVEISGVEDRFNASLGTYHDLLKIIKDKDFLDNEENEDILEDIVLTLTLFEDREMIEERLKTYAHLFDDKVMKQLKRRRYTGWGRLSRKLINGIRDKQSGKTILDFLKSDGFANRNFMQLIHDDSLTFKEDIQKAQVSGQGDSLHEHIANLAGSPAIKKGILQTVKVVDELVKVMGRHKPENIVIEMARENQTTQKGQKNSRERMKRIEEGIKELGSQILKEHPVENTQLQNEKLYLYYLQNGRDMYVDQELDINRLSDYDVDHIVPQSFLKDDSIDNKVLTRSDKARGKSDNVPSEEVVKKMKNYWRQLLNAKLITQRKFDNLTKAERGGLSELDKAGFIKRQLVETRQITKHVAQILDSRMNTKYDENDKLIREVKVITLKSKLVSDFRKDFQFYKVREINNYHHAHDAYLNAVVGTALIKKYPKLESEFVYGDYKVYDVRKMIAKSEQEIGKATAKYFFYSNIMNFFKTEITLANGEIRKRPLIETNGETGEIVWDKGRDFATVRKVLSMPQVNIVKKTEVQTGGFSKESILPKRNSDKLIARKKDWDPKKYGGFDSPTVAYSVLVVAKVEKGKSKKLKSVKELLGITIMERSSFEKNPIDFLEAKGYKEVKKDLIIKLPKYSLFELENGRKRMLASAGELQKGNELALPSKYVNFLYLASHYEKLKGSPEDNEQKQLFVEQHKHYLDEIIEQISEFSKRVILADANLDKVLSAYNKHRDKPIREQAENIIHLFTLTNLGAPAAFKYFDTTIDRKRYTSTKEVLDATLIHQSITGLYETRIDLSQLGGDGGPAPEAAAKGGSGGAVLGLEHLPRPPQISQFPLNPERLQALQHLVRKALEAGHIEPYTGPGNNPVFPVKKANGTWRFIHDLRATNSLTIDLSSSSPGPPDLSSLPTTLAHLQTIDLRDAFFQIPLPKQFQPYFAFTVPQQCNYGPGTRYAWKVLPQGFKNSPTLFEMQLAHILQPIRQAFPQCTILQYMDDILLASPSHEDLLLLSEATMASLISHGLPVSENKTQQTPGTIKFLGQIISPNHLTYDAVPTVPIRSRWALPELQALLGEIQWVSKGTPTLRQPLHSLYCALQRHTDPRDQIYLNPSQVQSLVQLRQALSQNCRSRLVQTLPLLGAIMLTLTGTTTVVFQSKEQWPLVWLHAPLPHTSQCPWGQLLASAVLLLDKYTLQSYGLLCQTIHHNISTQTFNQFIQTSDHPSVPILLHHSHRFKNLGAQTGELWNTFLKTAAPLAPVKALMPVFTLSPVIINTAPCLFSDGSTSRAAYILWDKQILSQRSFPLPPPHKSAQRAELLGLLHGLSSARSWRCLNIFLDSKYLYHYLRTLALGTFQGRSSQAPFQALLPRLLSRKVVYLHHVRSHTNLPDPISRLNALTDALLITPVLQLAGKRTADGSEFEKRTADGSEFESPKKKAKVE

SEQ ID NO: 1481 - protein, 2011 aa, synthetic construct
MPAAKRVKLDGGDKKYSIGLDIGTNSVGWAVITDEYKVPSKKFKVLGNTDRHSIKKNLIGALLFDSGETAEATRLKRTARRRYTRRKNRICYLQEIFSNEMAKVDDSFFHRLEESFLVEEDKKHERHPIFGNIVDEVAYHEKYPTIYHLRKKLVDSTDKADLRLIYLALAHMIKFRGHFLIEGDLNPDNSDVDKLFIQLVQTYNQLFEENPINASGVDAKAILSARLSKSRRLENLIAQLPGEKKNGLFGNLIALSLGLTPNFKSNFDLAEDAKLQLSKDTYDDDLDNLLAQIGDQYADLFLAAKNLSDAILLSDILRVNTEITKAPLSASMIKRYDEHHQDLTLLKALVRQQLPEKYKEIFFDQSKNGYAGYIDGGASQEEFYKFIKPILEKMDGTEELLVKLNREDLLRKQRTFDNGSIPHQIHLGELHAILRRQEDFYPFLKDNREKIEKILTFRIPYYVGPLARGNSRFAWMTRKSEETITPWNFEEVVDKGASAQSFIERMTNFDKNLPNEKVLPKHSLLYEYFTVYNELTKVKYVTEGMRKPAFLSGEQKKAIVDLLFKTNRKVTVKQLKEDYFKKIECFDSVEISGVEDRFNASLGTYHDLLKIIKDKDFLDNEENEDILEDIVLTLTLFEDREMIEERLKTYAHLFDDKVMKQLKRRRYTGWGRLSRKLINGIRDKQSGKTILDFLKSDGFANRNFMQLIHDDSLTFKEDIQKAQVSGQGDSLHEHIANLAGSPAIKKGILQTVKVVDELVKVMGRHKPENIVIEMARENQTTQKGQKNSRERMKRIEEGIKELGSQILKEHPVENTQLQNEKLYLYYLQNGRDMYVDQELDINRLSDYDVDHIVPQSFLKDDSIDNKVLTRSDKARGKSDNVPSEEVVKKMKNYWRQLLNAKLITQRKFDNLTKAERGGLSELDKAGFIKRQLVETRQITKHVAQILDSRMNTKYDENDKLIREVKVITLKSKLVSDFRKDFQFYKVREINNYHHAHDAYLNAVVGTALIKKYPKLESEFVYGDYKVYDVRKMIAKSEQEIGKATAKYFFYSNIMNFFKTEITLANGEIRKRPLIETNGETGEIVWDKGRDFATVRKVLSMPQVNIVKKTEVQTGGFSKESILPKRNSDKLIARKKDWDPKKYGGFDSPTVAYSVLVVAKVEKGKSKKLKSVKELLGITIMERSSFEKNPIDFLEAKGYKEVKKDLIIKLPKYSLFELENGRKRMLASAGELQKGNELALPSKYVNFLYLASHYEKLKGSPEDNEQKQLFVEQHKHYLDEIIEQISEFSKRVILADANLDKVLSAYNKHRDKPIREQAENIIHLFTLTNLGAPAAFKYFDTTIDRKRYTSTKEVLDATLIHQSITGLYETRIDLSQLGGDGGPAPGSSGGGGGAVLGLEHLPRPPQISQFPLNPERLQALQHLVRKALEAGHIEPYTGPGNNPVFPVKKANGTWRFIHDLRATNSLTIDLSSSSPGPPDLSSLPTTLAHLQTIDLRDAFFQIPLPKQFQPYFAFTVPQQCNYGPGTRYAWKVLPQGFKNSPTLFEMQLAHILQPIRQAFPQCTILQYMDDILLASPSHEDLLLLSEATMASLISHGLPVSENKTQQTPGTIKFLGQIISPNHLTYDAVPTVPIRSRWALPELQALLGEIQWVSKGTPTLRQPLHSLYCALQRHTDPRDQIYLNPSQVQSLVQLRQALSQNCRSRLVQTLPLLGAIMLTLTGTTTVVFQSKEQWPLVWLHAPLPHTSQCPWGQLLASAVLLLDKYTLQSYGLLCQTIHHNISTQTFNQFIQTSDHPSVPILLHHSHRFKNLGAQTGELWNTFLKTAAPLAPVKALMPVFTLSPVIINTAPCLFSDGSTSRAAYILWDKQILSQRSFPLPPPHKSAQRAELLGLLHGLSSARSWRCLNIFLDSKYLYHYLRTLALGTFQGRSSQAPFQALLPRLLSRKVVYLHHVRSHTNLPDPISRLNALTDALLITPVLQLAGKRTADGSEFEKRTADGSEFESPKKKAKVE

SEQ ID NO: 1482 - protein, 2013 aa, synthetic construct
MPAAKRVKLDGGDKKYSIGLDIGTNSVGWAVITDEYKVPSKKFKVLGNTDRHSIKKNLIGALLFDSGETAEATRLKRTARRRYTRRKNRICYLQEIFSNEMAKVDDSFFHRLEESFLVEEDKKHERHPIFGNIVDEVAYHEKYPTIYHLRKKLVDSTDKADLRLIYLALAHMIKFRGHFLIEGDLNPDNSDVDKLFIQLVQTYNQLFEENPINASGVDAKAILSARLSKSRRLENLIAQLPGEKKNGLFGNLIALSLGLTPNFKSNFDLAEDAKLQLSKDTYDDDLDNLLAQIGDQYADLFLAAKNLSDAILLSDILRVNTEITKAPLSASMIKRYDEHHQDLTLLKALVRQQLPEKYKEIFFDQSKNGYAGYIDGGASQEEFYKFIKPILEKMDGTEELLVKLNREDLLRKQRTFDNGSIPHQIHLGELHAILRRQEDFYPFLKDNREKIEKILTFRIPYYVGPLARGNSRFAWMTRKSEETITPWNFEEVVDKGASAQSFIERMTNFDKNLPNEKVLPKHSLLYEYFTVYNELTKVKYVTEGMRKPAFLSGEQKKAIVDLLFKTNRKVTVKQLKEDYFKKIECFDSVEISGVEDRFNASLGTYHDLLKIIKDKDFLDNEENEDILEDIVLTLTLFEDREMIEERLKTYAHLFDDKVMKQLKRRRYTGWGRLSRKLINGIRDKQSGKTILDFLKSDGFANRNFMQLIHDDSLTFKEDIQKAQVSGQGDSLHEHIANLAGSPAIKKGILQTVKVVDELVKVMGRHKPENIVIEMARENQTTQKGQKNSRERMKRIEEGIKELGSQILKEHPVENTQLQNEKLYLYYLQNGRDMYVDQELDINRLSDYDVDHIVPQSFLKDDSIDNKVLTRSDKARGKSDNVPSEEVVKKMKNYWRQLLNAKLITQRKFDNLTKAERGGLSELDKAGFIKRQLVETRQITKHVAQILDSRMNTKYDENDKLIREVKVITLKSKLVSDFRKDFQFYKVREINNYHHAHDAYLNAVVGTALIKKYPKLESEFVYGDYKVYDVRKMIAKSEQEIGKATAKYFFYSNIMNFFKTEITLANGEIRKRPLIETNGETGEIVWDKGRDFATVRKVLSMPQVNIVKKTEVQTGGFSKESILPKRNSDKLIARKKDWDPKKYGGFDSPTVAYSVLVVAKVEKGKSKKLKSVKELLGITIMERSSFEKNPIDFLEAKGYKEVKKDLIIKLPKYSLFELENGRKRMLASAGELQKGNELALPSKYVNFLYLASHYEKLKGSPEDNEQKQLFVEQHKHYLDEIIEQISEFSKRVILADANLDKVLSAYNKHRDKPIREQAENIIHLFTLTNLGAPAAFKYFDTTIDRKRYTSTKEVLDATLIHQSITGLYETRIDLSQLGGDGGEAAAKGSSGGSGGAVLGLEHLPRPPQISQFPLNPERLQALQHLVRKALEAGHIEPYTGPGNNPVFPVKKANGTWRFIHDLRATNSLTIDLSSSSPGPPDLSSLPTTLAHLQTIDLRDAFFQIPLPKQFQPYFAFTVPQQCNYGPGTRYAWKVLPQGFKNSPTLFQMQLAHILQPIRQAFPQCTILQYMDDILLASPSHEDLLLLSEATMASLISHGLPVSENKTQQTPGTIKFLGQIISPNHLTYDAVPTVPIRSRWALPELQALLGEIQWVSKGTPTLRQPLHSLYCALQPHTDPRDQIYLNPSQVQSLVQLRQALSQNCRSRLVQTLPLLGAIMLTLTGTTTVVFQSKEQWPLVWLHAPLPHTSQCPWGQLLASAVLLLDKYTLQSYGLLCQTIHHNISTQTFNQFIQTSDHPSVPILLHHSHRFKNLGAQTGELWNTFLKTAAPLAPVKALMPVFTLSPVIINTAPCLFSDGSTSRAAYILWDKQILSQRSFPLPPPHKSAQRAELLGLLHGLSSARSWRCLNIFLDSKYLYHYLRTLALGTFQGRSSQAPFQALLPRLLSRKVVYLHHVRSHTNLPDPISRLNALTDALLITPVLQLAGKRTADGSEFEKRTADGSEFESPKKKAKVE

SEQ ID NO: 1483 - protein, 2010 aa, synthetic construct
MPAAKRVKLDGGDKKYSIGLDIGTNSVGWAVITDEYKVPSKKFKVLGNTDRHSIKKNLIGALLFDSGETAEATRLKRTARRRYTRRKNRICYLQEIFSNEMAKVDDSFFHRLEESFLVEEDKKHERHPIFGNIVDEVAYHEKYPTIYHLRKKLVDSTDKADLRLIYLALAHMIKFRGHFLIEGDLNPDNSDVDKLFIQLVQTYNQLFEENPINASGVDAKAILSARLSKSRRLENLIAQLPGEKKNGLFGNLIALSLGLTPNFKSNFDLAEDAKLQLSKDTYDDDLDNLLAQIGDQYADLFLAAKNLSDAILLSDILRVNTEITKAPLSASMIKRYDEHHQDLTLLKALVRQQLPEKYKEIFFDQSKNGYAGYIDGGASQEEFYKFIKPILEKMDGTEELLVKLNREDLLRKQRTFDNGSIPHQIHLGELHAILRRQEDFYPFLKDNREKIEKILTFRIPYYVGPLARGNSRFAWMTRKSEETITPWNFEEVVDKGASAQSFIERMTNFDKNLPNEKVLPKHSLLYEYFTVYNELTKVKYVTEGMRKPAFLSGEQKKAIVDLLFKTNRKVTVKQLKEDYFKKIECFDSVEISGVEDRFNASLGTYHDLLKIIKDKDFLDNEENEDILEDIVLTLTLFEDREMIEERLKTYAHLFDDKVMKQLKRRRYTGWGRLSRKLINGIRDKQSGKTILDFLKSDGFANRNFMQLIHDDSLTFKEDIQKAQVSGQGDSLHEHIANLAGSPAIKKGILQTVKVVDELVKVMGRHKPENIVIEMARENQTTQKGQKNSRERMKRIEEGIKELGSQILKEHPVENTQLQNEKLYLYYLQNGRDMYVDQELDINRLSDYDVDHIVPQSFLKDDSIDNKVLTRSDKARGKSDNVPSEEVVKKMKNYWRQLLNAKLITQRKFDNLTKAERGGLSELDKAGFIKRQLVETRQITKHVAQILDSRMNTKYDENDKLIREVKVITLKSKLVSDFRKDFQFYKVREINNYHHAHDAYLNAVVGTALIKKYPKLESEFVYGDYKVYDVRKMIAKSEQEIGKATAKYFFYSNIMNFFKTEITLANGEIRKRPLIETNGETGEIVWDKGRDFATVRKVLSMPQVNIVKKTEVQTGGFSKESILPKRNSDKLIARKKDWDPKKYGGFDSPTVAYSVLVVAKVEKGKSKKLKSVKELLGITIMERSSFEKNPIDFLEAKGYKEVKKDLIIKLPKYSLFELENGRKRMLASAGELQKGNELALPSKYVNFLYLASHYEKLKGSPEDNEQKQLFVEQHKHYLDEIIEQISEFSKRVILADANLDKVLSAYNKHRDKPIREQAENIIHLFTLTNLGAPAAFKYFDTTIDRKRYTSTKEVLDATLIHQSITGLYETRIDLSQLGGDGGEAAAKGGSGGAVLGLEHLPRPPQISQFPLNPERLQALQHLVRKALEAGHIEPYTGPGNNPVFPVKKANGTWRFIHDLRATNSLTIDLSSSSPGPPDLSSLPTTLAHLQTIDLRDAFFQIPLPKQFQPYFAFTVPQQCNYGPGTRYAWKVLPQGFKNSPTLFQMQLAHILQPIRQAFPQCTILQYMDDILLASPSHEDLLLLSEATMASLISHGLPVSENKTQQTPGTIKFLGQIISPNHLTYDAVPTVPIRSRWALPELQALLGEIQWVSKGTPTLRQPLHSLYCALQPHTDPRDQIYLNPSQVQSLVQLRQALSQNCRSRLVQTLPLLGAIMLTLTGTTTVVFQSKEQWPLVWLHAPLPHTSQCPWGQLLASAVLLLDKYTLQSYGLLCQTIHHNISTQTFNQFIQTSDHPSVPILLHHSHRFKNLGAQTGELWNTFLKTAAPLAPVKALMPVFTLSPVIINTAPCLFSDGSTSRAAYILWDKQILSQRSFPLPPPHKSAQRAELLGLLHGLSSARSWRCLNIFLDSKYLYHYLRTLALGTFQGRSSQAPFQALLPRLLSRKVVYLHHVRSHTNLPDPISRLNALTDALLITPVLQLAGKRTADGSEFEKRTADGSEFESPKKKAKVE

SEQ ID NO: 1484 - protein, 2013 aa, synthetic construct
MPAAKRVKLDGGDKKYSIGLDIGTNSVGWAVITDEYKVPSKKFKVLGNTDRHSIKKNLIGALLFDSGETAEATRLKRTARRRYTRRKNRICYLQEIFSNEMAKVDDSFFHRLEESFLVEEDKKHERHPIFGNIVDEVAYHEKYPTIYHLRKKLVDSTDKADLRLIYLALAHMIKFRGHFLIEGDLNPDNSDVDKLFIQLVQTYNQLFEENPINASGVDAKAILSARLSKSRRLENLIAQLPGEKKNGLFGNLIALSLGLTPNFKSNFDLAEDAKLQLSKDTYDDDLDNLLAQIGDQYADLFLAAKNLSDAILLSDILRVNTEITKAPLSASMIKRYDEHHQDLTLLKALVRQQLPEKYKEIFFDQSKNGYAGYIDGGASQEEFYKFIKPILEKMDGTEELLVKLNREDLLRKQRTFDNGSIPHQIHLGELHAILRRQEDFYPFLKDNREKIEKILTFRIPYYVGPLARGNSRFAWMTRKSEETITPWNFEEVVDKGASAQSFIERMTNFDKNLPNEKVLPKHSLLYEYFTVYNELTKVKYVTEGMRKPAFLSGEQKKAIVDLLFKTNRKVTVKQLKEDYFKKIECFDSVEISGVEDRFNASLGTYHDLLKIIKDKDFLDNEENEDILEDIVLTLTLFEDREMIEERLKTYAHLFDDKVMKQLKRRRYTGWGRLSRKLINGIRDKQSGKTILDFLKSDGFANRNFMQLIHDDSLTFKEDIQKAQVSGQGDSLHEHIANLAGSPAIKKGILQTVKVVDELVKVMGRHKPENIVIEMARENQTTQKGQKNSRERMKRIEEGIKELGSQILKEHPVENTQLQNEKLYLYYLQNGRDMYVDQELDINRLSDYDVDHIVPQSFLKDDSIDNKVLTRSDKARGKSDNVPSEEVVKKMKNYWRQLLNAKLITQRKFDNLTKAERGGLSELDKAGFIKRQLVETRQITKHVAQILDSRMNTKYDENDKLIREVKVITLKSKLVSDFRKDFQFYKVREINNYHHAHDAYLNAVVGTALIKKYPKLESEFVYGDYKVYDVRKMIAKSEQEIGKATAKYFFYSNIMNFFKTEITLANGEIRKRPLIETNGETGEIVWDKGRDFATVRKVLSMPQVNIVKKTEVQTGGFSKESILPKRNSDKLIARKKDWDPKKYGGFDSPTVAYSVLVVAKVEKGKSKKLKSVKELLGITIMERSSFEKNPIDFLEAKGYKEVKKDLIIKLPKYSLFELENGRKRMLASAGELQKGNELALPSKYVNFLYLASHYEKLKGSPEDNEQKQLFVEQHKHYLDEIIEQISEFSKRVILADANLDKVLSAYNKHRDKPIREQAENIIHLFTLTNLGAPAAFKYFDTTIDRKRYTSTKEVLDATLIHQSITGLYETRIDLSQLGGDGGGGSEAAAKPAPGGAVLGLEHLPRPPQISQFPLNPERLQALQHLVRKALEAGHIEPYTGPGNNPVFPVKKANGTWRFIHDLRATNSLTIDLSSSSPGPPDLSSLPTTLAHLQTIDLRDAFFQIPLPKQFQPYFAFTVPQQCNYGPGTRYAWKVLPQGFKNSPTLFQMQLAHILQPIRQAFPQCTILQYMDDILLASPSHEDLLLLSEATMASLISHGLPVSENKTQQTPGTIKFLGQIISPNHLTYDAVPTVPIRSRWALPELQALLGEIQWVSKGTPTLRQPLHSLYCALQPHTDPRDQIYLNPSQVQSLVQLRQALSQNCRSRLVQTLPLLGAIMLTLTGTTTVVFQSKEQWPLVWLHAPLPHTSQCPWGQLLASAVLLLDKYTLQSYGLLCQTIHHNISTQTFNQFIQTSDHPSVPILLHHSHRFKNLGAQTGELWNTFLKTAAPLAPVKALMPVFTLSPVIINTAPCLFSDGSTSRAAYILWDKQILSQRSFPLPPPHKSAQRAELLGLLHGLSSARSWRCLNIFLDSKYLYHYLRTLALGTFQGRSSQAPFQALLPRLLSRKVVYLHHVRSHTNLPDPISRLNALTDALLITPVLQLAGKRTADGSEFEKRTADGSEFESPKKKAKVE

SEQ ID NO: 1485 - protein, 2011 aa, synthetic construct
MPAAKRVKLDGGDKKYSIGLDIGTNSVGWAVITDEYKVPSKKFKVLGNTDRHSIKKNLIGALLFDSGETAEATRLKRTARRRYTRRKNRICYLQEIFSNEMAKVDDSFFHRLEESFLVEEDKKHERHPIFGNIVDEVAYHEKYPTIYHLRKKLVDSTDKADLRLIYLALAHMIKFRGHFLIEGDLNPDNSDVDKLFIQLVQTYNQLFEENPINASGVDAKAILSARLSKSRRLENLIAQLPGEKKNGLFGNLIALSLGLTPNFKSNFDLAEDAKLQLSKDTYDDDLDNLLAQIGDQYADLFLAAKNLSDAILLSDILRVNTEITKAPLSASMIKRYDEHHQDLTLLKALVRQQLPEKYKEIFFDQSKNGYAGYIDGGASQEEFYKFIKPILEKMDGTEELLVKLNREDLLRKQRTFDNGSIPHQIHLGELHAILRRQEDFYPFLKDNREKIEKILTFRIPYYVGPLARGNSRFAWMTRKSEETITPWNFEEVVDKGASAQSFIERMTNFDKNLPNEKVLPKHSLLYEYFTVYNELTKVKYVTEGMRKPAFLSGEQKKAIVDLLFKTNRKVTVKQLKEDYFKKIECFDSVEISGVEDRFNASLGTYHDLLKIIKDKDFLDNEENEDILEDIVLTLTLFEDREMIEERLKTYAHLFDDKVMKQLKRRRYTGWGRLSRKLINGIRDKQSGKTILDFLKSDGFANRNFMQLIHDDSLTFKEDIQKAQVSGQGDSLHEHIANLAGSPAIKKGILQTVKVVDELVKVMGRHKPENIVIEMARENQTTQKGQKNSRERMKRIEEGIKELGSQILKEHPVENTQLQNEKLYLYYLQNGRDMYVDQELDINRLSDYDVDHIVPQSFLKDDSIDNKVLTRSDKARGKSDNVPSEEVVKKMKNYWRQLLNAKLITQRKFDNLTKAERGGLSELDKAGFIKRQLVETRQITKHVAQILDSRMNTKYDENDKLIREVKVITLKSKLVSDFRKDFQFYKVREINNYHHAHDAYLNAVVGTALIKKYPKLESEFVYGDYKVYDVRKMIAKSEQEIGKATAKYFFYSNIMNFFKTEITLANGEIRKRPLIETNGETGEIVWDKGRDFATVRKVLSMPQVNIVKKTEVQTGGFSKESILPKRNSDKLIARKKDWDPKKYGGFDSPTVAYSVLVVAKVEKGKSKKLKSVKELLGITIMERSSFEKNPIDFLEAKGYKEVKKDLIIKLPKYSLFELENGRKRMLASAGELQKGNELALPSKYVNFLYLASHYEKLKGSPEDNEQKQLFVEQHKHYLDEIIEQISEFSKRVILADANLDKVLSAYNKHRDKPIREQAENIIHLFTLTNLGAPAAFKYFDTTIDRKRYTSTKEVLDATLIHQSITGLYETRIDLSQLGGDGGGGGGGSGSSGGAVLGLEHLPRPPQISQFPLNPERLQALQHLVRKALEAGHIEPYTGPGNNPVFPVKKANGTWRFIHDLRATNSLTIDLSSSSPGPPDLSSPPTTLAHLQTIDLRDAFFQIPLPKQFQPYFAFTVPQQCNYGPGTRYAWKVLPQGFKNSPTLFQMQLAHILQPIRQAFPQCTILQYMDDILLASPSHEDLLLLSEATMASLISHGLPVSENKTQQTPGTIKFLGQIISPNHLTYDAVPTVPIRSRWALPELQALLGEIQWVSKGTPTLRQPLHSLYCALQPHTDPRDQIYLNPSQVQSLVQLRQALSQNCRSRLVQTLPLLGAIMLTLTGTTTVVFQSKEQWPLVWLHAPLPHTSQCPWGQLLASAVLLLDKYTLQSYGLLCQTIHHNISTQTFNQFIQTSDHPSVPILLHHSHRFKNLGAQTGELWNTFLKTAAPLAPVKALMPVFTLSPVIINTAPCLFSDGSTSRAAYILWDKQILSQRSFPLPPPHKSAQRAELLGLLHGLSSARSWRCLNIFLDSKYLYHYLRTLALGTFQGRSSQAPFQALLPRLLSRKVVYLHHVRSHTNLPDPISRLNALTDALLITPVLQLAGKRTADGSEFEKRTADGSEFESPKKKAKVE

SEQ ID NO: 1486 - protein, 2013 aa, synthetic construct
MPAAKRVKLDGGDKKYSIGLDIGTNSVGWAVITDEYKVPSKKFKVLGNTDRHSIKKNLIGALLFDSGETAEATRLKRTARRRYTRRKNRICYLQEIFSNEMAKVDDSFFHRLEESFLVEEDKKHERHPIFGNIVDEVAYHEKYPTIYHLRKKLVDSTDKADLRLIYLALAHMIKFRGHFLIEGDLNPDNSDVDKLFIQLVQTYNQLFEENPINASGVDAKAILSARLSKSRRLENLIAQLPGEKKNGLFGNLIALSLGLTPNFKSNFDLAEDAKLQLSKDTYDDDLDNLLAQIGDQYADLFLAAKNLSDAILLSDILRVNTEITKAPLSASMIKRYDEHHQDLTLLKALVRQQLPEKYKEIFFDQSKNGYAGYIDGGASQEEFYKFIKPILEKMDGTEELLVKLNREDLLRKQRTFDNGSIPHQIHLGELHAILRRQEDFYPFLKDNREKIEKILTFRIPYYVGPLARGNSRFAWMTRKSEETITPWNFEEVVDKGASAQSFIERMTNFDKNLPNEKVLPKHSLLYEYFTVYNELTKVKYVTEGMRKPAFLSGEQKKAIVDLLFKTNRKVTVKQLKEDYFKKIECFDSVEISGVEDRFNASLGTYHDLLKIIKDKDFLDNEENEDILEDIVLTLTLFEDREMIEERLKTYAHLFDDKVMKQLKRRRYTGWGRLSRKLINGIRDKQSGKTILDFLKSDGFANRNFMQLIHDDSLTFKEDIQKAQVSGQGDSLHEHIANLAGSPAIKKGILQTVKVVDELVKVMGRHKPENIVIEMARENQTTQKGQKNSRERMKRIEEGIKELGSQILKEHPVENTQLQNEKLYLYYLQNGRDMYVDQELDINRLSDYDVDHIVPQSFLKDDSIDNKVLTRSDKARGKSDNVPSEEVVKKMKNYWRQLLNAKLITQRKFDNLTKAERGGLSELDKAGFIKRQLVETRQITKHVAQILDSRMNTKYDENDKLIREVKVITLKSKLVSDFRKDFQFYKVREINNYHHAHDAYLNAVVGTALIKKYPKLESEFVYGDYKVYDVRKMIAKSEQEIGKATAKYFFYSNIMNFFKTEITLANGEIRKRPLIETNGETGEIVWDKGRDFATVRKVLSMPQVNIVKKTEVQTGGFSKESILPKRNSDKLIARKKDWDPKKYGGFDSPTVAYSVLVVAKVEKGKSKKLKSVKELLGITIMERSSFEKNPIDFLEAKGYKEVKKDLIIKLPKYSLFELENGRKRMLASAGELQKGNELALPSKYVNFLYLASHYEKLKGSPEDNEQKQLFVEQHKHYLDEIIEQISEFSKRVILADANLDKVLSAYNKHRDKPIREQAENIIHLFTLTNLGAPAAFKYFDTTIDRKRYTSTKEVLDATLIHQSITGLYETRIDLSQLGGDGGEAAAKGSSGGSGGAVLGLEHLPRPPQISQFPLNPERLQALQHLVRKALEAGHIEPYTGPGNNPVFPVKKANGTWRFIHDLRATNSLTIDLSSSSPGPPDLSSPPTTLAHLQTIDLRDAFFQIPLPKQFQPYFAFTVPQQCNYGPGTRYAWKVLPQGFKNSPTLFQMQLAHILQPIRQAFPQCTILQYMDDILLASPSHEDLLLLSEATMASLISHGLPVSENKTQQTPGTIKFLGQIISPNHLTYDAVPTVPIRSRWALPELQALLGEIQWVSKGTPTLRQPLHSLYCALQPHTDPRDQIYLNPSQVQSLVQLRQALSQNCRSRLVQTLPLLGAIMLTLTGTTTVVFQSKEQWPLVWLHAPLPHTSQCPWGQLLASAVLLLDKYTLQSYGLLCQTIHHNISTQTFNQFIQTSDHPSVPILLHHSHRFKNLGAQTGELWNTFLKTAAPLAPVKALMPVFTLSPVIINTAPCLFSDGSTSRAAYILWDKQILSQRSFPLPPPHKSAQRAELLGLLHGLSSARSWRCLNIFLDSKYLYHYLRTLALGTFQGRSSQAPFQALLPRLLSRKVVYLHHVRSHTNLPDPISRLNALTDALLITPVLQLAGKRTADGSEFEKRTADGSEFESPKKKAKVE

SEQ ID NO: 1487 - protein, 2013 aa, synthetic construct
MPAAKRVKLDGGDKKYSIGLDIGTNSVGWAVITDEYKVPSKKFKVLGNTDRHSIKKNLIGALLFDSGETAEATRLKRTARRRYTRRKNRICYLQEIFSNEMAKVDDSFFHRLEESFLVEEDKKHERHPIFGNIVDEVAYHEKYPTIYHLRKKLVDSTDKADLRLIYLALAHMIKFRGHFLIEGDLNPDNSDVDKLFIQLVQTYNQLFEENPINASGVDAKAILSARLSKSRRLENLIAQLPGEKKNGLFGNLIALSLGLTPNFKSNFDLAEDAKLQLSKDTYDDDLDNLLAQIGDQYADLFLAAKNLSDAILLSDILRVNTEITKAPLSASMIKRYDEHHQDLTLLKALVRQQLPEKYKEIFFDQSKNGYAGYIDGGASQEEFYKFIKPILEKMDGTEELLVKLNREDLLRKQRTFDNGSIPHQIHLGELHAILRRQEDFYPFLKDNREKIEKILTFRIPYYVGPLARGNSRFAWMTRKSEETITPWNFEEVVDKGASAQSFIERMTNFDKNLPNEKVLPKHSLLYEYFTVYNELTKVKYVTEGMRKPAFLSGEQKKAIVDLLFKTNRKVTVKQLKEDYFKKIECFDSVEISGVEDRFNASLGTYHDLLKIIKDKDFLDNEENEDILEDIVLTLTLFEDREMIEERLKTYAHLFDDKVMKQLKRRRYTGWGRLSRKLINGIRDKQSGKTILDFLKSDGFANRNFMQLIHDDSLTFKEDIQKAQVSGQGDSLHEHIANLAGSPAIKKGILQTVKVVDELVKVMGRHKPENIVIEMARENQTTQKGQKNSRERMKRIEEGIKELGSQILKEHPVENTQLQNEKLYLYYLQNGRDMYVDQELDINRLSDYDVDHIVPQSFLKDDSIDNKVLTRSDKARGKSDNVPSEEVVKKMKNYWRQLLNAKLITQRKFDNLTKAERGGLSELDKAGFIKRQLVETRQITKHVAQILDSRMNTKYDENDKLIREVKVITLKSKLVSDFRKDFQFYKVREINNYHHAHDAYLNAVVGTALIKKYPKLESEFVYGDYKVYDVRKMIAKSEQEIGKATAKYFFYSNIMNFFKTEITLANGEIRKRPLIETNGETGEIVWDKGRDFATVRKVLSMPQVNIVKKTEVQTGGFSKESILPKRNSDKLIARKKDWDPKKYGGFDSPTVAYSVLVVAKVEKGKSKKLKSVKELLGITIMERSSFEKNPIDFLEAKGYKEVKKDLIIKLPKYSLFELENGRKRMLASAGELQKGNELALPSKYVNFLYLASHYEKLKGSPEDNEQKQLFVEQHKHYLDEIIEQISEFSKRVILADANLDKVLSAYNKHRDKPIREQAENIIHLFTLTNLGAPAAFKYFDTTIDRKRYTSTKEVLDATLIHQSITGLYETRIDLSQLGGDGGPAPEAAAKGGGGGAVLGLEHLPRPPQISQFPLNPERLQALQHLVRKALEAGHIEPYTGPGNNPVFPVKKANGTWRFIHDLRATNSLTIDLSSSSPGPPDLSSPPTTLAHLQTIDLRDAFFQIPLPKQFQPYFAFTVPQQCNYGPGTRYAWKVLPQGFKNSPTLFQMQLAHILQPIRQAFPQCTILQYMDDILLASPSHEDLLLLSEATMASLISHGLPVSENKTQQTPGTIKFLGQIISPNHLTYDAVPTVPIRSRWALPELQALLGEIQWVSKGTPTLRQPLHSLYCALQPHTDPRDQIYLNPSQVQSLVQLRQALSQNCRSRLVQTLPLLGAIMLTLTGTTTVVFQSKEQWPLVWLHAPLPHTSQCPWGQLLASAVLLLDKYTLQSYGLLCQTIHHNISTQTFNQFIQTSDHPSVPILLHHSHRFKNLGAQTGELWNTFLKTAAPLAPVKALMPVFTLSPVIINTAPCLFSDGSTSRAAYILWDKQILSQRSFPLPPPHKSAQRAELLGLLHGLSSARSWRCLNIFLDSKYLYHYLRTLALGTFQGRSSQAPFQALLPRLLSRKVVYLHHVRSHTNLPDPISRLNALTDALLITPVLQLAGKRTADGSEFEKRTADGSEFESPKKKAKVE

SEQ ID NO: 1488 - protein, 2017 aa, synthetic construct
MPAAKRVKLDGGDKKYSIGLDIGTNSVGWAVITDEYKVPSKKFKVLGNTDRHSIKKNLIGALLFDSGETAEATRLKRTARRRYTRRKNRICYLQEIFSNEMAKVDDSFFHRLEESFLVEEDKKHERHPIFGNIVDEVAYHEKYPTIYHLRKKLVDSTDKADLRLIYLALAHMIKFRGHFLIEGDLNPDNSDVDKLFIQLVQTYNQLFEENPINASGVDAKAILSARLSKSRRLENLIAQLPGEKKNGLFGNLIALSLGLTPNFKSNFDLAEDAKLQLSKDTYDDDLDNLLAQIGDQYADLFLAAKNLSDAILLSDILRVNTEITKAPLSASMIKRYDEHHQDLTLLKALVRQQLPEKYKEIFFDQSKNGYAGYIDGGASQEEFYKFIKPILEKMDGTEELLVKLNREDLLRKQRTFDNGSIPHQIHLGELHAILRRQEDFYPFLKDNREKIEKILTFRIPYYVGPLARGNSRFAWMTRKSEETITPWNFEEVVDKGASAQSFIERMTNFDKNLPNEKVLPKHSLLYEYFTVYNELTKVKYVTEGMRKPAFLSGEQKKAIVDLLFKTNRKVTVKQLKEDYFKKIECFDSVEISGVEDRFNASLGTYHDLLKIIKDKDFLDNEENEDILEDIVLTLTLFEDREMIEERLKTYAHLFDDKVMKQLKRRRYTGWGRLSRKLINGIRDKQSGKTILDFLKSDGFANRNFMQLIHDDSLTFKEDIQKAQVSGQGDSLHEHIANLAGSPAIKKGILQTVKVVDELVKVMGRHKPENIVIEMARENQTTQKGQKNSRERMKRIEEGIKELGSQILKEHPVENTQLQNEKLYLYYLQNGRDMYVDQELDINRLSDYDVDHIVPQSFLKDDSIDNKVLTRSDKARGKSDNVPSEEVVKKMKNYWRQLLNAKLITQRKFDNLTKAERGGLSELDKAGFIKRQLVETRQITKHVAQILDSRMNTKYDENDKLIREVKVITLKSKLVSDFRKDFQFYKVREINNYHHAHDAYLNAVVGTALIKKYPKLESEFVYGDYKVYDVRKMIAKSEQEIGKATAKYFFYSNIMNFFKTEITLANGEIRKRPLIETNGETGEIVWDKGRDFATVRKVLSMPQVNIVKKTEVQTGGFSKESILPKRNSDKLIARKKDWDPKKYGGFDSPTVAYSVLVVAKVEKGKSKKLKSVKELLGITIMERSSFEKNPIDFLEAKGYKEVKKDLIIKLPKYSLFELENGRKRMLASAGELQKGNELALPSKYVNFLYLASHYEKLKGSPEDNEQKQLFVEQHKHYLDEIIEQISEFSKRVILADANLDKVLSAYNKHRDKPIREQAENIIHLFTLTNLGAPAAFKYFDTTIDRKRYTSTKEVLDATLIHQSITGLYETRIDLSQLGGDGGGGGGSEAAAKGGGGSGGAVLGLEHLPRPPEISQFPLNPERLQALQHLVRKALEAGHIEPYTGPGNNPVFPVKKANGTWRFIHDLRATNSLTIDLSSSSPGPPDLSSLPTTLAHLQTIDLKDAFFQIPLPKQFQPYFAFTVPQQCNYGPGTRYAWRVLPQGFKNSPTLFEMQLAHILQPIRQAFPQCTILQYMDDILLASPSHADLQLLSEATMASLISHGLPVSENKTQQTPGTIKFLGQIISPNHLTYDAVPKVPIRSRWALPELQALLGEIQWVSKGTPTLRQPLHSLYCALQRHTDPRDQIYLNPSQVQSLVQLRQALSQNCRSRLVQTLPLLGAIMLTLTGTTTVVFQSKQQWPLVWLHAPLPHTSQCPWGQLLASAVLLLDKYTLQSYGLLCQTIHHNISTQTFNQFIQTSDHPSVPILLHHSHRFKNLGAQTGELWNTFLKTTAPLAPVKALMPVFTLSPVIINTAPCLFSDGSTSQAAYILWDKHILSQRSFPLPPPHKSAQRAELLGLLHGLSSARSWRCLNIFLDSKYLYHYLRTLALGTFQGRSSQAPFQALLPRLLSRKVVYLHHVRSHTNLPDPISRLNALTDALLITPVLQLAGKRTADGSEFEKRTADGSEFESPKKKAKVE

SEQ ID NO: 1489 - protein, 2017 aa, synthetic construct
MPAAKRVKLDGGDKKYSIGLDIGTNSVGWAVITDEYKVPSKKFKVLGNTDRHSIKKNLIGALLFDSGETAEATRLKRTARRRYTRRKNRICYLQEIFSNEMAKVDDSFFHRLEESFLVEEDKKHERHPIFGNIVDEVAYHEKYPTIYHLRKKLVDSTDKADLRLIYLALAHMIKFRGHFLIEGDLNPDNSDVDKLFIQLVQTYNQLFEENPINASGVDAKAILSARLSKSRRLENLIAQLPGEKKNGLFGNLIALSLGLTPNFKSNFDLAEDAKLQLSKDTYDDDLDNLLAQIGDQYADLFLAAKNLSDAILLSDILRVNTEITKAPLSASMIKRYDEHHQDLTLLKALVRQQLPEKYKEIFFDQSKNGYAGYIDGGASQEEFYKFIKPILEKMDGTEELLVKLNREDLLRKQRTFDNGSIPHQIHLGELHAILRRQEDFYPFLKDNREKIEKILTFRIPYYVGPLARGNSRFAWMTRKSEETITPWNFEEVVDKGASAQSFIERMTNFDKNLPNEKVLPKHSLLYEYFTVYNELTKVKYVTEGMRKPAFLSGEQKKAIVDLLFKTNRKVTVKQLKEDYFKKIECFDSVEISGVEDRFNASLGTYHDLLKIIKDKDFLDNEENEDILEDIVLTLTLFEDREMIEERLKTYAHLFDDKVMKQLKRRRYTGWGRLSRKLINGIRDKQSGKTILDFLKSDGFANRNFMQLIHDDSLTFKEDIQKAQVSGQGDSLHEHIANLAGSPAIKKGILQTVKVVDELVKVMGRHKPENIVIEMARENQTTQKGQKNSRERMKRIEEGIKELGSQILKEHPVENTQLQNEKLYLYYLQNGRDMYVDQELDINRLSDYDVDHIVPQSFLKDDSIDNKVLTRSDKARGKSDNVPSEEVVKKMKNYWRQLLNAKLITQRKFDNLTKAERGGLSELDKAGFIKRQLVETRQITKHVAQILDSRMNTKYDENDKLIREVKVITLKSKLVSDFRKDFQFYKVREINNYHHAHDAYLNAVVGTALIKKYPKLESEFVYGDYKVYDVRKMIAKSEQEIGKATAKYFFYSNIMNFFKTEITLANGEIRKRPLIETNGETGEIVWDKGRDFATVRKVLSMPQVNIVKKTEVQTGGFSKESILPKRNSDKLIARKKDWDPKKYGGFDSPTVAYSVLVVAKVEKGKSKKLKSVKELLGITIMERSSFEKNPIDFLEAKGYKEVKKDLIIKLPKYSLFELENGRKRMLASAGELQKGNELALPSKYVNFLYLASHYEKLKGSPEDNEQKQLFVEQHKHYLDEIIEQISEFSKRVILADANLDKVLSAYNKHRDKPIREQAENIIHLFTLTNLGAPAAFKYFDTTIDRKRYTSTKEVLDATLIHQSITGLYETRIDLSQLGGDGGEAAAKEAAAKEAAAKGGAVLGLEHLPRPPEISQFPLNPERLQALQHLVRKALEAGHIEPYTGPGNNPVFPVKKANGTWRFIHDLRATNSLTIDLSSSSPGPPDLSSLPTTLAHLQTIDLKDAFFQIPLPKQFQPYFAFTVPQQCNYGPGTRYAWRVLPQGFKNSPTLFEMQLAHILQPIRQAFPQCTILQYMDDILLASPSHADLQLLSEATMASLISHGLPVSENKTQQTPGTIKFLGQIISPNHLTYDAVPKVPIRSRWALPELQALLGEIQWVSKGTPTLRQPLHSLYCALQRHTDPRDQIYLNPSQVQSLVQLRQALSQNCRSRLVQTLPLLGAIMLTLTGTTTVVFQSKQQWPLVWLHAPLPHTSQCPWGQLLASAVLLLDKYTLQSYGLLCQTIHHNISTQTFNQFIQTSDHPSVPILLHHSHRFKNLGAQTGELWNTFLKTTAPLAPVKALMPVFTLSPVIINTAPCLFSDGSTSQAAYILWDKHILSQRSFPLPPPHKSAQRAELLGLLHGLSSARSWRCLNIFLDSKYLYHYLRTLALGTFQGRSSQAPFQALLPRLLSRKVVYLHHVRSHTNLPDPISRLNALTDALLITPVLQLAGKRTADGSEFEKRTADGSEFESPKKKAKVE

SEQ ID NO: 1490 - protein, 2010 aa, synthetic construct
MPAAKRVKLDGGDKKYSIGLDIGTNSVGWAVITDEYKVPSKKFKVLGNTDRHSIKKNLIGALLFDSGETAEATRLKRTARRRYTRRKNRICYLQEIFSNEMAKVDDSFFHRLEESFLVEEDKKHERHPIFGNIVDEVAYHEKYPTIYHLRKKLVDSTDKADLRLIYLALAHMIKFRGHFLIEGDLNPDNSDVDKLFIQLVQTYNQLFEENPINASGVDAKAILSARLSKSRRLENLIAQLPGEKKNGLFGNLIALSLGLTPNFKSNFDLAEDAKLQLSKDTYDDDLDNLLAQIGDQYADLFLAAKNLSDAILLSDILRVNTEITKAPLSASMIKRYDEHHQDLTLLKALVRQQLPEKYKEIFFDQSKNGYAGYIDGGASQEEFYKFIKPILEKMDGTEELLVKLNREDLLRKQRTFDNGSIPHQIHLGELHAILRRQEDFYPFLKDNREKIEKILTFRIPYYVGPLARGNSRFAWMTRKSEETITPWNFEEVVDKGASAQSFIERMTNFDKNLPNEKVLPKHSLLYEYFTVYNELTKVKYVTEGMRKPAFLSGEQKKAIVDLLFKTNRKVTVKQLKEDYFKKIECFDSVEISGVEDRFNASLGTYHDLLKIIKDKDFLDNEENEDILEDIVLTLTLFEDREMIEERLKTYAHLFDDKVMKQLKRRRYTGWGRLSRKLINGIRDKQSGKTILDFLKSDGFANRNFMQLIHDDSLTFKEDIQKAQVSGQGDSLHEHIANLAGSPAIKKGILQTVKVVDELVKVMGRHKPENIVIEMARENQTTQKGQKNSRERMKRIEEGIKELGSQILKEHPVENTQLQNEKLYLYYLQNGRDMYVDQELDINRLSDYDVDHIVPQSFLKDDSIDNKVLTRSDKARGKSDNVPSEEVVKKMKNYWRQLLNAKLITQRKFDNLTKAERGGLSELDKAGFIKRQLVETRQITKHVAQILDSRMNTKYDENDKLIREVKVITLKSKLVSDFRKDFQFYKVREINNYHHAHDAYLNAVVGTALIKKYPKLESEFVYGDYKVYDVRKMIAKSEQEIGKATAKYFFYSNIMNFFKTEITLANGEIRKRPLIETNGETGEIVWDKGRDFATVRKVLSMPQVNIVKKTEVQTGGFSKESILPKRNSDKLIARKKDWDPKKYGGFDSPTVAYSVLVVAKVEKGKSKKLKSVKELLGITIMERSSFEKNPIDFLEAKGYKEVKKDLIIKLPKYSLFELENGRKRMLASAGELQKGNELALPSKYVNFLYLASHYEKLKGSPEDNEQKQLFVEQHKHYLDEIIEQISEFSKRVILADANLDKVLSAYNKHRDKPIREQAENIIHLFTLTNLGAPAAFKYFDTTIDRKRYTSTKEVLDATLIHQSITGLYETRIDLSQLGGDGGGGGEAAAKGGAVLGLEHLPRPPEISQFPLNPERLQALQHLVRKALEAGHIEPYTGPGNNPVFPVKKANGTWRFIHDLRATNSLTIDLSSSSPGPPDLSSLPTTLAHLQTIDLKDAFFQIPLPKQFQPYFAFTVPQQCNYGPGTRYAWRVLPQGFKNSPTLFEMQLAHILQPIRQAFPQCTILQYMDDILLASPSHADLQLLSEATMASLISHGLPVSENKTQQTPGTIKFLGQIISPNHLTYDAVPKVPIRSRWALPELQALLGEIQWVSKGTPTLRQPLHSLYCALQRHTDPRDQIYLNPSQVQSLVQLRQALSQNCRSRLVQTLPLLGAIMLTLTGTTTVVFQSKQQWPLVWLHAPLPHTSQCPWGQLLASAVLLLDKYTLQSYGLLCQTIHHNISTQTFNQFIQTSDHPSVPILLHHSHRFKNLGAQTGELWNTFLKTTAPLAPVKALMPVFTLSPVIINTAPCLFSDGSTSQAAYILWDKHILSQRSFPLPPPHKSAQRAELLGLLHGLSSARSWRCLNIFLDSKYLYHYLRTLALGTFQGRSSQAPFQALLPRLLSRKVVYLHHVRSHTNLPDPISRLNALTDALLITPVLQLAGKRTADGSEFEKRTADGSEFESPKKKAKVE

SEQ ID NO: 1491 - protein, 2027 aa, synthetic construct
MPAAKRVKLDGGDKKYSIGLDIGTNSVGWAVITDEYKVPSKKFKVLGNTDRHSIKKNLIGALLFDSGETAEATRLKRTARRRYTRRKNRICYLQEIFSNEMAKVDDSFFHRLEESFLVEEDKKHERHPIFGNIVDEVAYHEKYPTIYHLRKKLVDSTDKADLRLIYLALAHMIKFRGHFLIEGDLNPDNSDVDKLFIQLVQTYNQLFEENPINASGVDAKAILSARLSKSRRLENLIAQLPGEKKNGLFGNLIALSLGLTPNFKSNFDLAEDAKLQLSKDTYDDDLDNLLAQIGDQYADLFLAAKNLSDAILLSDILRVNTEITKAPLSASMIKRYDEHHQDLTLLKALVRQQLPEKYKEIFFDQSKNGYAGYIDGGASQEEFYKFIKPILEKMDGTEELLVKLNREDLLRKQRTFDNGSIPHQIHLGELHAILRRQEDFYPFLKDNREKIEKILTFRIPYYVGPLARGNSRFAWMTRKSEETITPWNFEEVVDKGASAQSFIERMTNFDKNLPNEKVLPKHSLLYEYFTVYNELTKVKYVTEGMRKPAFLSGEQKKAIVDLLFKTNRKVTVKQLKEDYFKKIECFDSVEISGVEDRFNASLGTYHDLLKIIKDKDFLDNEENEDILEDIVLTLTLFEDREMIEERLKTYAHLFDDKVMKQLKRRRYTGWGRLSRKLINGIRDKQSGKTILDFLKSDGFANRNFMQLIHDDSLTFKEDIQKAQVSGQGDSLHEHIANLAGSPAIKKGILQTVKVVDELVKVMGRHKPENIVIEMARENQTTQKGQKNSRERMKRIEEGIKELGSQILKEHPVENTQLQNEKLYLYYLQNGRDMYVDQELDINRLSDYDVDHIVPQSFLKDDSIDNKVLTRSDKARGKSDNVPSEEVVKKMKNYWRQLLNAKLITQRKFDNLTKAERGGLSELDKAGFIKRQLVETRQITKHVAQILDSRMNTKYDENDKLIREVKVITLKSKLVSDFRKDFQFYKVREINNYHHAHDAYLNAVVGTALIKKYPKLESEFVYGDYKVYDVRKMIAKSEQEIGKATAKYFFYSNIMNFFKTEITLANGEIRKRPLIETNGETGEIVWDKGRDFATVRKVLSMPQVNIVKKTEVQTGGFSKESILPKRNSDKLIARKKDWDPKKYGGFDSPTVAYSVLVVAKVEKGKSKKLKSVKELLGITIMERSSFEKNPIDFLEAKGYKEVKKDLIIKLPKYSLFELENGRKRMLASAGELQKGNELALPSKYVNFLYLASHYEKLKGSPEDNEQKQLFVEQHKHYLDEIIEQISEFSKRVILADANLDKVLSAYNKHRDKPIREQAENIIHLFTLTNLGAPAAFKYFDTTIDRKRYTSTKEVLDATLIHQSITGLYETRIDLSQLGGDGGGGGGSGGGGSGGGGSGGGGSGGGGSGGAVLGLEHLPRPPEISQFPLNPERLQALQHLVRKALEAGHIEPYTGPGNNPVFPVKKANGTWRFIHDLRATNSLTIDLSSSSPGPPDLSSLPTTLAHLQTIDLKDAFFQIPLPKQFQPYFAFTVPQQCNYGPGTRYAWRVLPQGFKNSPTLFEMQLAHILQPIRQAFPQCTILQYMDDILLASPSHADLQLLSEATMASLISHGLPVSENKTQQTPGTIKFLGQIISPNHLTYDAVPKVPIRSRWALPELQALLGEIQWVSKGTPTLRQPLHSLYCALQRHTDPRDQIYLNPSQVQSLVQLRQALSQNCRSRLVQTLPLLGAIMLTLTGTTTVVFQSKQQWPLVWLHAPLPHTSQCPWGQLLASAVLLLDKYTLQSYGLLCQTIHHNISTQTFNQFIQTSDHPSVPILLHHSHRFKNLGAQTGELWNTFLKTTAPLAPVKALMPVFTLSPVIINTAPCLFSDGSTSQAAYILWDKHILSQRSFPLPPPHKSAQRAELLGLLHGLSSARSWRCLNIFLDSKYLYHYLRTLALGTFQGRSSQAPFQALLPRLLSRKVVYLHHVRSHTNLPDPISRLNALTDALLITPVLQLAGKRTADGSEFEKRTADGSEFESPKKKAKVE

SEQ ID NO: 1492 - protein, 2011 aa, synthetic construct
MPAAKRVKLDGGDKKYSIGLDIGTNSVGWAVITDEYKVPSKKFKVLGNTDRHSIKKNLIGALLFDSGETAEATRLKRTARRRYTRRKNRICYLQEIFSNEMAKVDDSFFHRLEESFLVEEDKKHERHPIFGNIVDEVAYHEKYPTIYHLRKKLVDSTDKADLRLIYLALAHMIKFRGHFLIEGDLNPDNSDVDKLFIQLVQTYNQLFEENPINASGVDAKAILSARLSKSRRLENLIAQLPGEKKNGLFGNLIALSLGLTPNFKSNFDLAEDAKLQLSKDTYDDDLDNLLAQIGDQYADLFLAAKNLSDAILLSDILRVNTEITKAPLSASMIKRYDEHHQDLTLLKALVRQQLPEKYKEIFFDQSKNGYAGYIDGGASQEEFYKFIKPILEKMDGTEELLVKLNREDLLRKQRTFDNGSIPHQIHLGELHAILRRQEDFYPFLKDNREKIEKILTFRIPYYVGPLARGNSRFAWMTRKSEETITPWNFEEVVDKGASAQSFIERMTNFDKNLPNEKVLPKHSLLYEYFTVYNELTKVKYVTEGMRKPAFLSGEQKKAIVDLLFKTNRKVTVKQLKEDYFKKIECFDSVEISGVEDRFNASLGTYHDLLKIIKDKDFLDNEENEDILEDIVLTLTLFEDREMIEERLKTYAHLFDDKVMKQLKRRRYTGWGRLSRKLINGIRDKQSGKTILDFLKSDGFANRNFMQLIHDDSLTFKEDIQKAQVSGQGDSLHEHIANLAGSPAIKKGILQTVKVVDELVKVMGRHKPENIVIEMARENQTTQKGQKNSRERMKRIEEGIKELGSQILKEHPVENTQLQNEKLYLYYLQNGRDMYVDQELDINRLSDYDVDHIVPQSFLKDDSIDNKVLTRSDKARGKSDNVPSEEVVKKMKNYWRQLLNAKLITQRKFDNLTKAERGGLSELDKAGFIKRQLVETRQITKHVAQILDSRMNTKYDENDKLIREVKVITLKSKLVSDFRKDFQFYKVREINNYHHAHDAYLNAVVGTALIKKYPKLESEFVYGDYKVYDVRKMIAKSEQEIGKATAKYFFYSNIMNFFKTEITLANGEIRKRPLIETNGETGEIVWDKGRDFATVRKVLSMPQVNIVKKTEVQTGGFSKESILPKRNSDKLIARKKDWDPKKYGGFDSPTVAYSVLVVAKVEKGKSKKLKSVKELLGITIMERSSFEKNPIDFLEAKGYKEVKKDLIIKLPKYSLFELENGRKRMLASAGELQKGNELALPSKYVNFLYLASHYEKLKGSPEDNEQKQLFVEQHKHYLDEIIEQISEFSKRVILADANLDKVLSAYNKHRDKPIREQAENIIHLFTLTNLGAPAAFKYFDTTIDRKRYTSTKEVLDATLIHQSITGLYETRIDLSQLGGDGGGGGGGSPAPGGAVLGLEHLPRPPEISQFPLNPERLQALQHLVRKALEAGHIEPYTGPGNNPVFPVKKANGTWRFIHDLRATNSLTIDLSSSSPGPPDLSSLPTTLAHLQTIDLKDAFFQIPLPKQFQPYFAFTVPQQCNYGPGTRYAWRVLPQGFKNSPTLFQMQLAHILQPIRQAFPQCTILQYMDDILLASPSHADLQLLSEATMASLISHGLPVSENKTQQTPGTIKFLGQIISPNHLTYDAVPKVPIRSRWALPELQALLGEIQWVSKGTPTLRQPLHSLYCALQPHTDPRDQIYLNPSQVQSLVQLRQALSQNCRSRLVQTLPLLGAIMLTLTGTTTVVFQSKQQWPLVWLHAPLPHTSQCPWGQLLASAVLLLDKYTLQSYGLLCQTIHHNISTQTFNQFIQTSDHPSVPILLHHSHRFKNLGAQTGELWNTFLKTTAPLAPVKALMPVFTLSPVIINTAPCLFSDGSTSQAAYILWDKHILSQRSFPLPPPHKSAQRAELLGLLHGLSSARSWRCLNIFLDSKYLYHYLRTLALGTFQGRSSQAPFQALLPRLLSRKVVYLHHVRSHTNLPDPISRLNALTDALLITPVLQLAGKRTADGSEFEKRTADGSEFESPKKKAKVE

SEQ ID NO: 1493 - protein, 2008 aa, synthetic construct
MPAAKRVKLDGGDKKYSIGLDIGTNSVGWAVITDEYKVPSKKFKVLGNTDRHSIKKNLIGALLFDSGETAEATRLKRTARRRYTRRKNRICYLQEIFSNEMAKVDDSFFHRLEESFLVEEDKKHERHPIFGNIVDEVAYHEKYPTIYHLRKKLVDSTDKADLRLIYLALAHMIKFRGHFLIEGDLNPDNSDVDKLFIQLVQTYNQLFEENPINASGVDAKAILSARLSKSRRLENLIAQLPGEKKNGLFGNLIALSLGLTPNFKSNFDLAEDAKLQLSKDTYDDDLDNLLAQIGDQYADLFLAAKNLSDAILLSDILRVNTEITKAPLSASMIKRYDEHHQDLTLLKALVRQQLPEKYKEIFFDQSKNGYAGYIDGGASQEEFYKFIKPILEKMDGTEELLVKLNREDLLRKQRTFDNGSIPHQIHLGELHAILRRQEDFYPFLKDNREKIEKILTFRIPYYVGPLARGNSRFAWMTRKSEETITPWNFEEVVDKGASAQSFIERMTNFDKNLPNEKVLPKHSLLYEYFTVYNELTKVKYVTEGMRKPAFLSGEQKKAIVDLLFKTNRKVTVKQLKEDYFKKIECFDSVEISGVEDRFNASLGTYHDLLKIIKDKDFLDNEENEDILEDIVLTLTLFEDREMIEERLKTYAHLFDDKVMKQLKRRRYTGWGRLSRKLINGIRDKQSGKTILDFLKSDGFANRNFMQLIHDDSLTFKEDIQKAQVSGQGDSLHEHIANLAGSPAIKKGILQTVKVVDELVKVMGRHKPENIVIEMARENQTTQKGQKNSRERMKRIEEGIKELGSQILKEHPVENTQLQNEKLYLYYLQNGRDMYVDQELDINRLSDYDVDHIVPQSFLKDDSIDNKVLTRSDKARGKSDNVPSEEVVKKMKNYWRQLLNAKLITQRKFDNLTKAERGGLSELDKAGFIKRQLVETRQITKHVAQILDSRMNTKYDENDKLIREVKVITLKSKLVSDFRKDFQFYKVREINNYHHAHDAYLNAVVGTALIKKYPKLESEFVYGDYKVYDVRKMIAKSEQEIGKATAKYFFYSNIMNFFKTEITLANGEIRKRPLIETNGETGEIVWDKGRDFATVRKVLSMPQVNIVKKTEVQTGGFSKESILPKRNSDKLIARKKDWDPKKYGGFDSPTVAYSVLVVAKVEKGKSKKLKSVKELLGITIMERSSFEKNPIDFLEAKGYKEVKKDLIIKLPKYSLFELENGRKRMLASAGELQKGNELALPSKYVNFLYLASHYEKLKGSPEDNEQKQLFVEQHKHYLDEIIEQISEFSKRVILADANLDKVLSAYNKHRDKPIREQAENIIHLFTLTNLGAPAAFKYFDTTIDRKRYTSTKEVLDATLIHQSITGLYETRIDLSQLGGDGGPAPGGSGGAVLGLEHLPRPPEISQFPLNPERLQALQHLVRKALEAGHIEPYTGPGNNPVFPVKKANGTWRFIHDLRATNSLTIDLSSSSPGPPDLSSLPTTLAHLQTIDLKDAFFQIPLPKQFQPYFAFTVPQQCNYGPGTRYAWRVLPQGFKNSPTLFQMQLAHILQPIRQAFPQCTILQYMDDILLASPSHADLQLLSEATMASLISHGLPVSENKTQQTPGTIKFLGQIISPNHLTYDAVPKVPIRSRWALPELQALLGEIQWVSKGTPTLRQPLHSLYCALQPHTDPRDQIYLNPSQVQSLVQLRQALSQNCRSRLVQTLPLLGAIMLTLTGTTTVVFQSKQQWPLVWLHAPLPHTSQCPWGQLLASAVLLLDKYTLQSYGLLCQTIHHNISTQTFNQFIQTSDHPSVPILLHHSHRFKNLGAQTGELWNTFLKTTAPLAPVKALMPVFTLSPVIINTAPCLFSDGSTSQAAYILWDKHILSQRSFPLPPPHKSAQRAELLGLLHGLSSARSWRCLNIFLDSKYLYHYLRTLALGTFQGRSSQAPFQALLPRLLSRKVVYLHHVRSHTNLPDPISRLNALTDALLITPVLQLAGKRTADGSEFEKRTADGSEFESPKKKAKVE

SEQ ID NO: 1494 - protein, 2011 aa, synthetic construct
MPAAKRVKLDGGDKKYSIGLDIGTNSVGWAVITDEYKVPSKKFKVLGNTDRHSIKKNLIGALLFDSGETAEATRLKRTARRRYTRRKNRICYLQEIFSNEMAKVDDSFFHRLEESFLVEEDKKHERHPIFGNIVDEVAYHEKYPTIYHLRKKLVDSTDKADLRLIYLALAHMIKFRGHFLIEGDLNPDNSDVDKLFIQLVQTYNQLFEENPINASGVDAKAILSARLSKSRRLENLIAQLPGEKKNGLFGNLIALSLGLTPNFKSNFDLAEDAKLQLSKDTYDDDLDNLLAQIGDQYADLFLAAKNLSDAILLSDILRVNTEITKAPLSASMIKRYDEHHQDLTLLKALVRQQLPEKYKEIFFDQSKNGYAGYIDGGASQEEFYKFIKPILEKMDGTEELLVKLNREDLLRKQRTFDNGSIPHQIHLGELHAILRRQEDFYPFLKDNREKIEKILTFRIPYYVGPLARGNSRFAWMTRKSEETITPWNFEEVVDKGASAQSFIERMTNFDKNLPNEKVLPKHSLLYEYFTVYNELTKVKYVTEGMRKPAFLSGEQKKAIVDLLFKTNRKVTVKQLKEDYFKKIECFDSVEISGVEDRFNASLGTYHDLLKIIKDKDFLDNEENEDILEDIVLTLTLFEDREMIEERLKTYAHLFDDKVMKQLKRRRYTGWGRLSRKLINGIRDKQSGKTILDFLKSDGFANRNFMQLIHDDSLTFKEDIQKAQVSGQGDSLHEHIANLAGSPAIKKGILQTVKVVDELVKVMGRHKPENIVIEMARENQTTQKGQKNSRERMKRIEEGIKELGSQILKEHPVENTQLQNEKLYLYYLQNGRDMYVDQELDINRLSDYDVDHIVPQSFLKDDSIDNKVLTRSDKARGKSDNVPSEEVVKKMKNYWRQLLNAKLITQRKFDNLTKAERGGLSELDKAGFIKRQLVETRQITKHVAQILDSRMNTKYDENDKLIREVKVITLKSKLVSDFRKDFQFYKVREINNYHHAHDAYLNAVVGTALIKKYPKLESEFVYGDYKVYDVRKMIAKSEQEIGKATAKYFFYSNIMNFFKTEITLANGEIRKRPLIETNGETGEIVWDKGRDFATVRKVLSMPQVNIVKKTEVQTGGFSKESILPKRNSDKLIARKKDWDPKKYGGFDSPTVAYSVLVVAKVEKGKSKKLKSVKELLGITIMERSSFEKNPIDFLEAKGYKEVKKDLIIKLPKYSLFELENGRKRMLASAGELQKGNELALPSKYVNFLYLASHYEKLKGSPEDNEQKQLFVEQHKHYLDEIIEQISEFSKRVILADANLDKVLSAYNKHRDKPIREQAENIIHLFTLTNLGAPAAFKYFDTTIDRKRYTSTKEVLDATLIHQSITGLYETRIDLSQLGGDGGGGGPAPGGSGGAVLGLEHLPRPPEISQFPLNPERLQALQHLVRKALEAGHIEPYTGPGNNPVFPVKKANGTWRFIHDLRATNSLTIDLSSSSPGPPDLSSLPTTLAHLQTIDLKDAFFQIPLPKQFQPYFAFTVPQQCNYGPGTRYAWRVLPQGFKNSPTLFQMQLAHILQPIRQAFPQCTILQYMDDILLASPSHADLQLLSEATMASLISHGLPVSENKTQQTPGTIKFLGQIISPNHLTYDAVPKVPIRSRWALPELQALLGEIQWVSKGTPTLRQPLHSLYCALQPHTDPRDQIYLNPSQVQSLVQLRQALSQNCRSRLVQTLPLLGAIMLTLTGTTTVVFQSKQQWPLVWLHAPLPHTSQCPWGQLLASAVLLLDKYTLQSYGLLCQTIHHNISTQTFNQFIQTSDHPSVPILLHHSHRFKNLGAQTGELWNTFLKTTAPLAPVKALMPVFTLSPVIINTAPCLFSDGSTSQAAYILWDKHILSQRSFPLPPPHKSAQRAELLGLLHGLSSARSWRCLNIFLDSKYLYHYLRTLALGTFQGRSSQAPFQALLPRLLSRKVVYLHHVRSHTNLPDPISRLNALTDALLITPVLQLAGKRTADGSEFEKRTADGSEFESPKKKAKVE

SEQ ID NO: 1495 - protein, 2017 aa, synthetic construct
MPAAKRVKLDGGDKKYSIGLDIGTNSVGWAVITDEYKVPSKKFKVLGNTDRHSIKKNLIGALLFDSGETAEATRLKRTARRRYTRRKNRICYLQEIFSNEMAKVDDSFFHRLEESFLVEEDKKHERHPIFGNIVDEVAYHEKYPTIYHLRKKLVDSTDKADLRLIYLALAHMIKFRGHFLIEGDLNPDNSDVDKLFIQLVQTYNQLFEENPINASGVDAKAILSARLSKSRRLENLIAQLPGEKKNGLFGNLIALSLGLTPNFKSNFDLAEDAKLQLSKDTYDDDLDNLLAQIGDQYADLFLAAKNLSDAILLSDILRVNTEITKAPLSASMIKRYDEHHQDLTLLKALVRQQLPEKYKEIFFDQSKNGYAGYIDGGASQEEFYKFIKPILEKMDGTEELLVKLNREDLLRKQRTFDNGSIPHQIHLGELHAILRRQEDFYPFLKDNREKIEKILTFRIPYYVGPLARGNSRFAWMTRKSEETITPWNFEEVVDKGASAQSFIERMTNFDKNLPNEKVLPKHSLLYEYFTVYNELTKVKYVTEGMRKPAFLSGEQKKAIVDLLFKTNRKVTVKQLKEDYFKKIECFDSVEISGVEDRFNASLGTYHDLLKIIKDKDFLDNEENEDILEDIVLTLTLFEDREMIEERLKTYAHLFDDKVMKQLKRRRYTGWGRLSRKLINGIRDKQSGKTILDFLKSDGFANRNFMQLIHDDSLTFKEDIQKAQVSGQGDSLHEHIANLAGSPAIKKGILQTVKVVDELVKVMGRHKPENIVIEMARENQTTQKGQKNSRERMKRIEEGIKELGSQILKEHPVENTQLQNEKLYLYYLQNGRDMYVDQELDINRLSDYDVDHIVPQSFLKDDSIDNKVLTRSDKARGKSDNVPSEEVVKKMKNYWRQLLNAKLITQRKFDNLTKAERGGLSELDKAGFIKRQLVETRQITKHVAQILDSRMNTKYDENDKLIREVKVITLKSKLVSDFRKDFQFYKVREINNYHHAHDAYLNAVVGTALIKKYPKLESEFVYGDYKVYDVRKMIAKSEQEIGKATAKYFFYSNIMNFFKTEITLANGEIRKRPLIETNGETGEIVWDKGRDFATVRKVLSMPQVNIVKKTEVQTGGFSKESILPKRNSDKLIARKKDWDPKKYGGFDSPTVAYSVLVVAKVEKGKSKKLKSVKELLGITIMERSSFEKNPIDFLEAKGYKEVKKDLIIKLPKYSLFELENGRKRMLASAGELQKGNELALPSKYVNFLYLASHYEKLKGSPEDNEQKQLFVEQHKHYLDEIIEQISEFSKRVILADANLDKVLSAYNKHRDKPIREQAENIIHLFTLTNLGAPAAFKYFDTTIDRKRYTSTKEVLDATLIHQSITGLYETRIDLSQLGGDGGGSSGSSGSSGSSGSSGGAVLGLEHLPRPPEISQFPLNPERLQALQHLVRKALEAGHIEPYTGPGNNPVFPVKKANGTWRFIHDLRATNSLTIDLSSSSPGPPDLSSLPTTLAHLQTIDLKDAFFQIPLPKQFQPYFAFTVPQQCNYGPGTRYAWRVLPQGFKNSPTLFQMQLAHILQPIRQAFPQCTILQYMDDILLASPSHADLQLLSEATMASLISHGLPVSENKTQQTPGTIKFLGQIISPNHLTYDAVPKVPIRSRWALPELQALLGEIQWVSKGTPTLRQPLHSLYCALQPHTDPRDQIYLNPSQVQSLVQLRQALSQNCRSRLVQTLPLLGAIMLTLTGTTTVVFQSKQQWPLVWLHAPLPHTSQCPWGQLLASAVLLLDKYTLQSYGLLCQTIHHNISTQTFNQFIQTSDHPSVPILLHHSHRFKNLGAQTGELWNTFLKTTAPLAPVKALMPVFTLSPVIINTAPCLFSDGSTSQAAYILWDKHILSQRSFPLPPPHKSAQRAELLGLLHGLSSARSWRCLNIFLDSKYLYHYLRTLALGTFQGRSSQAPFQALLPRLLSRKVVYLHHVRSHTNLPDPISRLNALTDALLITPVLQLAGKRTADGSEFEKRTADGSEFESPKKKAKVE

SEQ ID NO: 1496 - protein, 2002 aa, synthetic construct
MPAAKRVKLDGGDKKYSIGLDIGTNSVGWAVITDEYKVPSKKFKVLGNTDRHSIKKNLIGALLFDSGETAEATRLKRTARRRYTRRKNRICYLQEIFSNEMAKVDDSFFHRLEESFLVEEDKKHERHPIFGNIVDEVAYHEKYPTIYHLRKKLVDSTDKADLRLIYLALAHMIKFRGHFLIEGDLNPDNSDVDKLFIQLVQTYNQLFEENPINASGVDAKAILSARLSKSRRLENLIAQLPGEKKNGLFGNLIALSLGLTPNFKSNFDLAEDAKLQLSKDTYDDDLDNLLAQIGDQYADLFLAAKNLSDAILLSDILRVNTEITKAPLSASMIKRYDEHHQDLTLLKALVRQQLPEKYKEIFFDQSKNGYAGYIDGGASQEEFYKFIKPILEKMDGTEELLVKLNREDLLRKQRTFDNGSIPHQIHLGELHAILRRQEDFYPFLKDNREKIEKILTFRIPYYVGPLARGNSRFAWMTRKSEETITPWNFEEVVDKGASAQSFIERMTNFDKNLPNEKVLPKHSLLYEYFTVYNELTKVKYVTEGMRKPAFLSGEQKKAIVDLLFKTNRKVTVKQLKEDYFKKIECFDSVEISGVEDRFNASLGTYHDLLKIIKDKDFLDNEENEDILEDIVLTLTLFEDREMIEERLKTYAHLFDDKVMKQLKRRRYTGWGRLSRKLINGIRDKQSGKTILDFLKSDGFANRNFMQLIHDDSLTFKEDIQKAQVSGQGDSLHEHIANLAGSPAIKKGILQTVKVVDELVKVMGRHKPENIVIEMARENQTTQKGQKNSRERMKRIEEGIKELGSQILKEHPVENTQLQNEKLYLYYLQNGRDMYVDQELDINRLSDYDVDHIVPQSFLKDDSIDNKVLTRSDKARGKSDNVPSEEVVKKMKNYWRQLLNAKLITQRKFDNLTKAERGGLSELDKAGFIKRQLVETRQITKHVAQILDSRMNTKYDENDKLIREVKVITLKSKLVSDFRKDFQFYKVREINNYHHAHDAYLNAVVGTALIKKYPKLESEFVYGDYKVYDVRKMIAKSEQEIGKATAKYFFYSNIMNFFKTEITLANGEIRKRPLIETNGETGEIVWDKGRDFATVRKVLSMPQVNIVKKTEVQTGGFSKESILPKRNSDKLIARKKDWDPKKYGGFDSPTVAYSVLVVAKVEKGKSKKLKSVKELLGITIMERSSFEKNPIDFLEAKGYKEVKKDLIIKLPKYSLFELENGRKRMLASAGELQKGNELALPSKYVNFLYLASHYEKLKGSPEDNEQKQLFVEQHKHYLDEIIEQISEFSKRVILADANLDKVLSAYNKHRDKPIREQAENIIHLFTLTNLGAPAAFKYFDTTIDRKRYTSTKEVLDATLIHQSITGLYETRIDLSQLGGDGGEAAAKGGGLEHLPRPPEISQFPLNPERLQALQHLVRKALEAGHIEPYTGPGNNPVFPVKKANGTWRFIHDLRATNSLTVDLSSSSPGPPDLSSLPTTLAHLQTIDLKDAFFQIPLPKQFQPYFAFTVPQQCNYGPGTRYAWKVLPQGFKNSPTLFEMQLASILQPIRQAFPQCVILQYMDDILLASPSPEDLQQLSEATMASLISHGLPVSQDKTQQTPGTIKFLGQIISPNHITYDAVPTVPIRSRWALPELQALLGEIQWVSKGTPTLRQPLHSLYCALQGHTDPRDQIYLNPSQVQSLMQLQQALSQNCRSRLAQTLPLLGAIMLTLTGTTTVVFQSKQQWPLVWLHAPLPHTSQCPWGQLLASAVLLLDKYTLQSYGLLCQTIHHNISIQTFNQFIQTSDHPSVPILLHHSHRFKNLGAQTGELWNTFLKTAAPLAPVKALTPVFTLSPIIINTAPCLFSDGSTSQAAYILWDKHILSQRSFPLPPPHKSAQQAELLGLLHGLSSARSWHCLNIFLDSKYLYHYLRTLALGTFQGKSSQAPFQALLPRLLAHKVIYLHHVRSHTNLPDPISKLNALTDALLITPILAGKRTADGSEFEKRTADGSEFESPKKKAKVE

SEQ ID NO: 1497 - protein, 2015 aa, synthetic construct
MPAAKRVKLDGGDKKYSIGLDIGTNSVGWAVITDEYKVPSKKFKVLGNTDRHSIKKNLIGALLFDSGETAEATRLKRTARRRYTRRKNRICYLQEIFSNEMAKVDDSFFHRLEESFLVEEDKKHERHPIFGNIVDEVAYHEKYPTIYHLRKKLVDSTDKADLRLIYLALAHMIKFRGHFLIEGDLNPDNSDVDKLFIQLVQTYNQLFEENPINASGVDAKAILSARLSKSRRLENLIAQLPGEKKNGLFGNLIALSLGLTPNFKSNFDLAEDAKLQLSKDTYDDDLDNLLAQIGDQYADLFLAAKNLSDAILLSDILRVNTEITKAPLSASMIKRYDEHHQDLTLLKALVRQQLPEKYKEIFFDQSKNGYAGYIDGGASQEEFYKFIKPILEKMDGTEELLVKLNREDLLRKQRTFDNGSIPHQIHLGELHAILRRQEDFYPFLKDNREKIEKILTFRIPYYVGPLARGNSRFAWMTRKSEETITPWNFEEVVDKGASAQSFIERMTNFDKNLPNEKVLPKHSLLYEYFTVYNELTKVKYVTEGMRKPAFLSGEQKKAIVDLLFKTNRKVTVKQLKEDYFKKIECFDSVEISGVEDRFNASLGTYHDLLKIIKDKDFLDNEENEDILEDIVLTLTLFEDREMIEERLKTYAHLFDDKVMKQLKRRRYTGWGRLSRKLINGIRDKQSGKTILDFLKSDGFANRNFMQLIHDDSLTFKEDIQKAQVSGQGDSLHEHIANLAGSPAIKKGILQTVKVVDELVKVMGRHKPENIVIEMARENQTTQKGQKNSRERMKRIEEGIKELGSQILKEHPVENTQLQNEKLYLYYLQNGRDMYVDQELDINRLSDYDVDHIVPQSFLKDDSIDNKVLTRSDKARGKSDNVPSEEVVKKMKNYWRQLLNAKLITQRKFDNLTKAERGGLSELDKAGFIKRQLVETRQITKHVAQILDSRMNTKYDENDKLIREVKVITLKSKLVSDFRKDFQFYKVREINNYHHAHDAYLNAVVGTALIKKYPKLESEFVYGDYKVYDVRKMIAKSEQEIGKATAKYFFYSNIMNFFKTEITLANGEIRKRPLIETNGETGEIVWDKGRDFATVRKVLSMPQVNIVKKTEVQTGGFSKESILPKRNSDKLIARKKDWDPKKYGGFDSPTVAYSVLVVAKVEKGKSKKLKSVKELLGITIMERSSFEKNPIDFLEAKGYKEVKKDLIIKLPKYSLFELENGRKRMLASAGELQKGNELALPSKYVNFLYLASHYEKLKGSPEDNEQKQLFVEQHKHYLDEIIEQISEFSKRVILADANLDKVLSAYNKHRDKPIREQAENIIHLFTLTNLGAPAAFKYFDTTIDRKRYTSTKEVLDATLIHQSITGLYETRIDLSQLGGDGGGSSGSSGSSGSSGSSGSSGGGLEHLPRPPEISQFPLNPERLQALQHLVRKALEAGHIEPYTGPGNNPVFPVKKANGTWRFIHDLRATNSLTVDLSSSSPGPPDLSSLPTTLAHLQTIDLKDAFFQIPLPKQFQPYFAFTVPQQCNYGPGTRYAWKVLPQGFKNSPTLFEMQLASILQPIRQAFPQCVILQYMDDILLASPSPEDLQQLSEATMASLISHGLPVSQDKTQQTPGTIKFLGQIISPNHITYDAVPTVPIRSRWALPELQALLGEIQWVSKGTPTLRQPLHSLYCALQGHTDPRDQIYLNPSQVQSLMQLQQALSQNCRSRLAQTLPLLGAIMLTLTGTTTVVFQSKQQWPLVWLHAPLPHTSQCPWGQLLASAVLLLDKYTLQSYGLLCQTIHHNISIQTFNQFIQTSDHPSVPILLHHSHRFKNLGAQTGELWNTFLKTAAPLAPVKALTPVFTLSPIIINTAPCLFSDGSTSQAAYILWDKHILSQRSFPLPPPHKSAQQAELLGLLHGLSSARSWHCLNIFLDSKYLYHYLRTLALGTFQGKSSQAPFQALLPRLLAHKVIYLHHVRSHTNLPDPISKLNALTDALLITPILAGKRTADGSEFEKRTADGSEFESPKKKAKVE

SEQ ID NO: 1498 - protein, 2008 aa, synthetic construct
MPAAKRVKLDGGDKKYSIGLDIGTNSVGWAVITDEYKVPSKKFKVLGNTDRHSIKKNLIGALLFDSGETAEATRLKRTARRRYTRRKNRICYLQEIFSNEMAKVDDSFFHRLEESFLVEEDKKHERHPIFGNIVDEVAYHEKYPTIYHLRKKLVDSTDKADLRLIYLALAHMIKFRGHFLIEGDLNPDNSDVDKLFIQLVQTYNQLFEENPINASGVDAKAILSARLSKSRRLENLIAQLPGEKKNGLFGNLIALSLGLTPNFKSNFDLAEDAKLQLSKDTYDDDLDNLLAQIGDQYADLFLAAKNLSDAILLSDILRVNTEITKAPLSASMIKRYDEHHQDLTLLKALVRQQLPEKYKEIFFDQSKNGYAGYIDGGASQEEFYKFIKPILEKMDGTEELLVKLNREDLLRKQRTFDNGSIPHQIHLGELHAILRRQEDFYPFLKDNREKIEKILTFRIPYYVGPLARGNSRFAWMTRKSEETITPWNFEEVVDKGASAQSFIERMTNFDKNLPNEKVLPKHSLLYEYFTVYNELTKVKYVTEGMRKPAFLSGEQKKAIVDLLFKTNRKVTVKQLKEDYFKKIECFDSVEISGVEDRFNASLGTYHDLLKIIKDKDFLDNEENEDILEDIVLTLTLFEDREMIEERLKTYAHLFDDKVMKQLKRRRYTGWGRLSRKLINGIRDKQSGKTILDFLKSDGFANRNFMQLIHDDSLTFKEDIQKAQVSGQGDSLHEHIANLAGSPAIKKGILQTVKVVDELVKVMGRHKPENIVIEMARENQTTQKGQKNSRERMKRIEEGIKELGSQILKEHPVENTQLQNEKLYLYYLQNGRDMYVDQELDINRLSDYDVDHIVPQSFLKDDSIDNKVLTRSDKARGKSDNVPSEEVVKKMKNYWRQLLNAKLITQRKFDNLTKAERGGLSELDKAGFIKRQLVETRQITKHVAQILDSRMNTKYDENDKLIREVKVITLKSKLVSDFRKDFQFYKVREINNYHHAHDAYLNAVVGTALIKKYPKLESEFVYGDYKVYDVRKMIAKSEQEIGKATAKYFFYSNIMNFFKTEITLANGEIRKRPLIETNGETGEIVWDKGRDFATVRKVLSMPQVNIVKKTEVQTGGFSKESILPKRNSDKLIARKKDWDPKKYGGFDSPTVAYSVLVVAKVEKGKSKKLKSVKELLGITIMERSSFEKNPIDFLEAKGYKEVKKDLIIKLPKYSLFELENGRKRMLASAGELQKGNELALPSKYVNFLYLASHYEKLKGSPEDNEQKQLFVEQHKHYLDEIIEQISEFSKRVILADANLDKVLSAYNKHRDKPIREQAENIIHLFTLTNLGAPAAFKYFDTTIDRKRYTSTKEVLDATLIHQSITGLYETRIDLSQLGGDGGEAAAKGGGGGSGGGLEHLPRPPEISQFPLNPERLQALQHLVRKALEAGHIEPYTGPGNNPVFPVKKANGTWRFIHDLRATNSLTVDLSSSSPGPPDLSSLPTTLAHLQTIDLKDAFFQIPLPKQFQPYFAFTVPQQCNYGPGTRYAWKVLPQGFKNSPTLFEMQLASILQPIRQAFPQCVILQYMDDILLASPSPEDLQQLSEATMASLISHGLPVSQDKTQQTPGTIKFLGQIISPNHITYDAVPTVPIRSRWALPELQALLGEIQWVSKGTPTLRQPLHSLYCALQGHTDPRDQIYLNPSQVQSLMQLQQALSQNCRSRLAQTLPLLGAIMLTLTGTTTVVFQSKQQWPLVWLHAPLPHTSQCPWGQLLASAVLLLDKYTLQSYGLLCQTIHHNISIQTFNQFIQTSDHPSVPILLHHSHRFKNLGAQTGELWNTFLKTAAPLAPVKALTPVFTLSPIIINTAPCLFSDGSTSQAAYILWDKHILSQRSFPLPPPHKSAQQAELLGLLHGLSSARSWHCLNIFLDSKYLYHYLRTLALGTFQGKSSQAPFQALLPRLLAHKVIYLHHVRSHTNLPDPISKLNALTDALLITPILAGKRTADGSEFEKRTADGSEFESPKKKAKVE

SEQ ID NO: 1499 - protein, 2008 aa, synthetic construct
MPAAKRVKLDGGDKKYSIGLDIGTNSVGWAVITDEYKVPSKKFKVLGNTDRHSIKKNLIGALLFDSGETAEATRLKRTARRRYTRRKNRICYLQEIFSNEMAKVDDSFFHRLEESFLVEEDKKHERHPIFGNIVDEVAYHEKYPTIYHLRKKLVDSTDKADLRLIYLALAHMIKFRGHFLIEGDLNPDNSDVDKLFIQLVQTYNQLFEENPINASGVDAKAILSARLSKSRRLENLIAQLPGEKKNGLFGNLIALSLGLTPNFKSNFDLAEDAKLQLSKDTYDDDLDNLLAQIGDQYADLFLAAKNLSDAILLSDILRVNTEITKAPLSASMIKRYDEHHQDLTLLKALVRQQLPEKYKEIFFDQSKNGYAGYIDGGASQEEFYKFIKPILEKMDGTEELLVKLNREDLLRKQRTFDNGSIPHQIHLGELHAILRRQEDFYPFLKDNREKIEKILTFRIPYYVGPLARGNSRFAWMTRKSEETITPWNFEEVVDKGASAQSFIERMTNFDKNLPNEKVLPKHSLLYEYFTVYNELTKVKYVTEGMRKPAFLSGEQKKAIVDLLFKTNRKVTVKQLKEDYFKKIECFDSVEISGVEDRFNASLGTYHDLLKIIKDKDFLDNEENEDILEDIVLTLTLFEDREMIEERLKTYAHLFDDKVMKQLKRRRYTGWGRLSRKLINGIRDKQSGKTILDFLKSDGFANRNFMQLIHDDSLTFKEDIQKAQVSGQGDSLHEHIANLAGSPAIKKGILQTVKVVDELVKVMGRHKPENIVIEMARENQTTQKGQKNSRERMKRIEEGIKELGSQILKEHPVENTQLQNEKLYLYYLQNGRDMYVDQELDINRLSDYDVDHIVPQSFLKDDSIDNKVLTRSDKARGKSDNVPSEEVVKKMKNYWRQLLNAKLITQRKFDNLTKAERGGLSELDKAGFIKRQLVETRQITKHVAQILDSRMNTKYDENDKLIREVKVITLKSKLVSDFRKDFQFYKVREINNYHHAHDAYLNAVVGTALIKKYPKLESEFVYGDYKVYDVRKMIAKSEQEIGKATAKYFFYSNIMNFFKTEITLANGEIRKRPLIETNGETGEIVWDKGRDFATVRKVLSMPQVNIVKKTEVQTGGFSKESILPKRNSDKLIARKKDWDPKKYGGFDSPTVAYSVLVVAKVEKGKSKKLKSVKELLGITIMERSSFEKNPIDFLEAKGYKEVKKDLIIKLPKYSLFELENGRKRMLASAGELQKGNELALPSKYVNFLYLASHYEKLKGSPEDNEQKQLFVEQHKHYLDEIIEQISEFSKRVILADANLDKVLSAYNKHRDKPIREQAENIIHLFTLTNLGAPAAFKYFDTTIDRKRYTSTKEVLDATLIHQSITGLYETRIDLSQLGGDGGEAAAKGGSGGGGGGLEHLPRPPEISQFPLNPERLQALQHLVRKALEAGHIEPYTGPGNNPVFPVKKANGTWRFIHDLRATNSLTVDLSSSSPGPPDLSSLPTTLAHLQTIDLKDAFFQIPLPKQFQPYFAFTVPQQCNYGPGTRYAWKVLPQGFKNSPTLFEMQLASILQPIRQAFPQCVILQYMDDILLASPSPEDLQQLSEATMASLISHGLPVSQDKTQQTPGTIKFLGQIISPNHITYDAVPTVPIRSRWALPELQALLGEIQWVSKGTPTLRQPLHSLYCALQGHTDPRDQIYLNPSQVQSLMQLQQALSQNCRSRLAQTLPLLGAIMLTLTGTTTVVFQSKQQWPLVWLHAPLPHTSQCPWGQLLASAVLLLDKYTLQSYGLLCQTIHHNISIQTFNQFIQTSDHPSVPILLHHSHRFKNLGAQTGELWNTFLKTAAPLAPVKALTPVFTLSPIIINTAPCLFSDGSTSQAAYILWDKHILSQRSFPLPPPHKSAQQAELLGLLHGLSSARSWHCLNIFLDSKYLYHYLRTLALGTFQGKSSQAPFQALLPRLLAHKVIYLHHVRSHTNLPDPISKLNALTDALLITPILAGKRTADGSEFEKRTADGSEFESPKKKAKVE

SEQ ID NO: 1500 - protein, 2008 aa, synthetic construct
MPAAKRVKLDGGDKKYSIGLDIGTNSVGWAVITDEYKVPSKKFKVLGNTDRHSIKKNLIGALLFDSGETAEATRLKRTARRRYTRRKNRICYLQEIFSNEMAKVDDSFFHRLEESFLVEEDKKHERHPIFGNIVDEVAYHEKYPTIYHLRKKLVDSTDKADLRLIYLALAHMIKFRGHFLIEGDLNPDNSDVDKLFIQLVQTYNQLFEENPINASGVDAKAILSARLSKSRRLENLIAQLPGEKKNGLFGNLIALSLGLTPNFKSNFDLAEDAKLQLSKDTYDDDLDNLLAQIGDQYADLFLAAKNLSDAILLSDILRVNTEITKAPLSASMIKRYDEHHQDLTLLKALVRQQLPEKYKEIFFDQSKNGYAGYIDGGASQEEFYKFIKPILEKMDGTEELLVKLNREDLLRKQRTFDNGSIPHQIHLGELHAILRRQEDFYPFLKDNREKIEKILTFRIPYYVGPLARGNSRFAWMTRKSEETITPWNFEEVVDKGASAQSFIERMTNFDKNLPNEKVLPKHSLLYEYFTVYNELTKVKYVTEGMRKPAFLSGEQKKAIVDLLFKTNRKVTVKQLKEDYFKKIECFDSVEISGVEDRFNASLGTYHDLLKIIKDKDFLDNEENEDILEDIVLTLTLFEDREMIEERLKTYAHLFDDKVMKQLKRRRYTGWGRLSRKLINGIRDKQSGKTILDFLKSDGFANRNFMQLIHDDSLTFKEDIQKAQVSGQGDSLHEHIANLAGSPAIKKGILQTVKVVDELVKVMGRHKPENIVIEMARENQTTQKGQKNSRERMKRIEEGIKELGSQILKEHPVENTQLQNEKLYLYYLQNGRDMYVDQELDINRLSDYDVDHIVPQSFLKDDSIDNKVLTRSDKARGKSDNVPSEEVVKKMKNYWRQLLNAKLITQRKFDNLTKAERGGLSELDKAGFIKRQLVETRQITKHVAQILDSRMNTKYDENDKLIREVKVITLKSKLVSDFRKDFQFYKVREINNYHHAHDAYLNAVVGTALIKKYPKLESEFVYGDYKVYDVRKMIAKSEQEIGKATAKYFFYSNIMNFFKTEITLANGEIRKRPLIETNGETGEIVWDKGRDFATVRKVLSMPQVNIVKKTEVQTGGFSKESILPKRNSDKLIARKKDWDPKKYGGFDSPTVAYSVLVVAKVEKGKSKKLKSVKELLGITIMERSSFEKNPIDFLEAKGYKEVKKDLIIKLPKYSLFELENGRKRMLASAGELQKGNELALPSKYVNFLYLASHYEKLKGSPEDNEQKQLFVEQHKHYLDEIIEQISEFSKRVILADANLDKVLSAYNKHRDKPIREQAENIIHLFTLTNLGAPAAFKYFDTTIDRKRYTSTKEVLDATLIHQSITGLYETRIDLSQLGGDGGPAPAPAPAPAPGGGLEHLPRPPEISQFPLNPERLQALQHLVRKALEAGHIEPYTGPGNNPVFPVKKANGTWRFIHDLRATNSLTVDLSSSSPGPPDLSSLPTTLAHLQTIDLKDAFFQIPLPKQFQPYFAFTVPQQCNYGPGTRYAWKVLPQGFKNSPTLFQMQLASILQPIRQAFPQCVILQYMDDILLASPSPEDLQQLSEATMASLISHGLPVSQDKTQQTPGTIKFLGQIISPNHITYDAVPTVPIRSRWALPELQALLGEIQWVSKGTPTLRQPLHSLYCALQGHTDPRDQIYLNPSQVQSLMQLQQALSQNCRSRLAQTLPLLGAIMLTLTGTTTVVFQSKQQWPLVWLHAPLPHTSQCPWGQLLASAVLLLDKYTLQSYGLLCQTIHHNISIQTFNQFIQTSDHPSVPILLHHSHRFKNLGAQTGELWNTFLKTAAPLAPVKALTPVFTLSPIIINTAPCLFSDGSTSQAAYILWDKHILSQRSFPLPPPHKSAQQAELLGLLHGLSSARSWHCLNIFLDSKYLYHYLRTLAWGTFQGKSSQAPFQALLPRLLAHKVIYLHHVRSHTNLPDPISKLNALTDALLITPILAGKRTADGSEFEKRTADGSEFESPKKKAKVE

SEQ ID NO: 1501 - protein, 2006 aa, synthetic construct
MPAAKRVKLDGGDKKYSIGLDIGTNSVGWAVITDEYKVPSKKFKVLGNTDRHSIKKNLIGALLFDSGETAEATRLKRTARRRYTRRKNRICYLQEIFSNEMAKVDDSFFHRLEESFLVEEDKKHERHPIFGNIVDEVAYHEKYPTIYHLRKKLVDSTDKADLRLIYLALAHMIKFRGHFLIEGDLNPDNSDVDKLFIQLVQTYNQLFEENPINASGVDAKAILSARLSKSRRLENLIAQLPGEKKNGLFGNLIALSLGLTPNFKSNFDLAEDAKLQLSKDTYDDDLDNLLAQIGDQYADLFLAAKNLSDAILLSDILRVNTEITKAPLSASMIKRYDEHHQDLTLLKALVRQQLPEKYKEIFFDQSKNGYAGYIDGGASQEEFYKFIKPILEKMDGTEELLVKLNREDLLRKQRTFDNGSIPHQIHLGELHAILRRQEDFYPFLKDNREKIEKILTFRIPYYVGPLARGNSRFAWMTRKSEETITPWNFEEVVDKGASAQSFIERMTNFDKNLPNEKVLPKHSLLYEYFTVYNELTKVKYVTEGMRKPAFLSGEQKKAIVDLLFKTNRKVTVKQLKEDYFKKIECFDSVEISGVEDRFNASLGTYHDLLKIIKDKDFLDNEENEDILEDIVLTLTLFEDREMIEERLKTYAHLFDDKVMKQLKRRRYTGWGRLSRKLINGIRDKQSGKTILDFLKSDGFANRNFMQLIHDDSLTFKEDIQKAQVSGQGDSLHEHIANLAGSPAIKKGILQTVKVVDELVKVMGRHKPENIVIEMARENQTTQKGQKNSRERMKRIEEGIKELGSQILKEHPVENTQLQNEKLYLYYLQNGRDMYVDQELDINRLSDYDVDHIVPQSFLKDDSIDNKVLTRSDKARGKSDNVPSEEVVKKMKNYWRQLLNAKLITQRKFDNLTKAERGGLSELDKAGFIKRQLVETRQITKHVAQILDSRMNTKYDENDKLIREVKVITLKSKLVSDFRKDFQFYKVREINNYHHAHDAYLNAVVGTALIKKYPKLESEFVYGDYKVYDVRKMIAKSEQEIGKATAKYFFYSNIMNFFKTEITLANGEIRKRPLIETNGETGEIVWDKGRDFATVRKVLSMPQVNIVKKTEVQTGGFSKESILPKRNSDKLIARKKDWDPKKYGGFDSPTVAYSVLVVAKVEKGKSKKLKSVKELLGITIMERSSFEKNPIDFLEAKGYKEVKKDLIIKLPKYSLFELENGRKRMLASAGELQKGNELALPSKYVNFLYLASHYEKLKGSPEDNEQKQLFVEQHKHYLDEIIEQISEFSKRVILADANLDKVLSAYNKHRDKPIREQAENIIHLFTLTNLGAPAAFKYFDTTIDRKRYTSTKEVLDATLIHQSITGLYETRIDLSQLGGDGGGGGGGSPAPGGGLEHLPRPPEISQFPLNPERLQALQHLVRKALEAGHIEPYTGPGNNPVFPVKKANGTWRFIHDLRATNSLTVDLSSSSPGPPDLSSLPTTLAHLQTIDLKDAFFQIPLPKQFQPYFAFTVPQQCNYGPGTRYAWKVLPQGFKNSPTLFQMQLASILQPIRQAFPQCVILQYMDDILLASPSPEDLQQLSEATMASLISHGLPVSQDKTQQTPGTIKFLGQIISPNHITYDAVPTVPIRSRWALPELQALLGEIQWVSKGTPTLRQPLHSLYCALQGHTDPRDQIYLNPSQVQSLMQLQQALSQNCRSRLAQTLPLLGAIMLTLTGTTTVVFQSKQQWPLVWLHAPLPHTSQCPWGQLLASAVLLLDKYTLQSYGLLCQTIHHNISIQTFNQFIQTSDHPSVPILLHHSHRFKNLGAQTGELWNTFLKTAAPLAPVKALTPVFTLSPIIINTAPCLFSDGSTSQAAYILWDKHILSQRSFPLPPPHKSAQQAELLGLLHGLSSARSWHCLNIFLDSKYLYHYLRTLAWGTFQGKSSQAPFQALLPRLLAHKVIYLHHVRSHTNLPDPISKLNALTDALLITPILAGKRTADGSEFEKRTADGSEFESPKKKAKVE

SEQ ID NO: 1502 - protein, 2012 aa, synthetic construct
MPAAKRVKLDGGDKKYSIGLDIGTNSVGWAVITDEYKVPSKKFKVLGNTDRHSIKKNLIGALLFDSGETAEATRLKRTARRRYTRRKNRICYLQEIFSNEMAKVDDSFFHRLEESFLVEEDKKHERHPIFGNIVDEVAYHEKYPTIYHLRKKLVDSTDKADLRLIYLALAHMIKFRGHFLIEGDLNPDNSDVDKLFIQLVQTYNQLFEENPINASGVDAKAILSARLSKSRRLENLIAQLPGEKKNGLFGNLIALSLGLTPNFKSNFDLAEDAKLQLSKDTYDDDLDNLLAQIGDQYADLFLAAKNLSDAILLSDILRVNTEITKAPLSASMIKRYDEHHQDLTLLKALVRQQLPEKYKEIFFDQSKNGYAGYIDGGASQEEFYKFIKPILEKMDGTEELLVKLNREDLLRKQRTFDNGSIPHQIHLGELHAILRRQEDFYPFLKDNREKIEKILTFRIPYYVGPLARGNSRFAWMTRKSEETITPWNFEEVVDKGASAQSFIERMTNFDKNLPNEKVLPKHSLLYEYFTVYNELTKVKYVTEGMRKPAFLSGEQKKAIVDLLFKTNRKVTVKQLKEDYFKKIECFDSVEISGVEDRFNASLGTYHDLLKIIKDKDFLDNEENEDILEDIVLTLTLFEDREMIEERLKTYAHLFDDKVMKQLKRRRYTGWGRLSRKLINGIRDKQSGKTILDFLKSDGFANRNFMQLIHDDSLTFKEDIQKAQVSGQGDSLHEHIANLAGSPAIKKGILQTVKVVDELVKVMGRHKPENIVIEMARENQTTQKGQKNSRERMKRIEEGIKELGSQILKEHPVENTQLQNEKLYLYYLQNGRDMYVDQELDINRLSDYDVDHIVPQSFLKDDSIDNKVLTRSDKARGKSDNVPSEEVVKKMKNYWRQLLNAKLITQRKFDNLTKAERGGLSELDKAGFIKRQLVETRQITKHVAQILDSRMNTKYDENDKLIREVKVITLKSKLVSDFRKDFQFYKVREINNYHHAHDAYLNAVVGTALIKKYPKLESEFVYGDYKVYDVRKMIAKSEQEIGKATAKYFFYSNIMNFFKTEITLANGEIRKRPLIETNGETGEIVWDKGRDFATVRKVLSMPQVNIVKKTEVQTGGFSKESILPKRNSDKLIARKKDWDPKKYGGFDSPTVAYSVLVVAKVEKGKSKKLKSVKELLGITIMERSSFEKNPIDFLEAKGYKEVKKDLIIKLPKYSLFELENGRKRMLASAGELQKGNELALPSKYVNFLYLASHYEKLKGSPEDNEQKQLFVEQHKHYLDEIIEQISEFSKRVILADANLDKVLSAYNKHRDKPIREQAENIIHLFTLTNLGAPAAFKYFDTTIDRKRYTSTKEVLDATLIHQSITGLYETRIDLSQLGGDGGGGSGGSGGSGGSGGSGGGLEHLPRPPEISQFPLNPERLQALQHLVRKALEAGHIEPYTGPGNNPVFPVKKANGTWRFIHDLRATNSLTVDLSSSSPGPPDLSSLPTTLAHLQTIDLKDAFFQIPLPKQFQPYFAFTVPQQCNYGPGTRYAWKVLPQGFKNSPTLFQMQLASILQPIRQAFPQCVILQYMDDILLASPSPEDLQQLSEATMASLISHGLPVSQDKTQQTPGTIKFLGQIISPNHITYDAVPTVPIRSRWALPELQALLGEIQWVSKGTPTLRQPLHSLYCALQGHTDPRDQIYLNPSQVQSLMQLQQALSQNCRSRLAQTLPLLGAIMLTLTGTTTVVFQSKQQWPLVWLHAPLPHTSQCPWGQLLASAVLLLDKYTLQSYGLLCQTIHHNISIQTFNQFIQTSDHPSVPILLHHSHRFKNLGAQTGELWNTFLKTAAPLAPVKALTPVFTLSPIIINTAPCLFSDGSTSQAAYILWDKHILSQRSFPLPPPHKSAQQAELLGLLHGLSSARSWHCLNIFLDSKYLYHYLRTLAWGTFQGKSSQAPFQALLPRLLAHKVIYLHHVRSHTNLPDPISKLNALTDALLITPILAGKRTADGSEFEKRTADGSEFESPKKKAKVE

SEQ ID NO: 1503 - protein, 2015 aa, synthetic construct
MPAAKRVKLDGGDKKYSIGLDIGTNSVGWAVITDEYKVPSKKFKVLGNTDRHSIKKNLIGALLFDSGETAEATRLKRTARRRYTRRKNRICYLQEIFSNEMAKVDDSFFHRLEESFLVEEDKKHERHPIFGNIVDEVAYHEKYPTIYHLRKKLVDSTDKADLRLIYLALAHMIKFRGHFLIEGDLNPDNSDVDKLFIQLVQTYNQLFEENPINASGVDAKAILSARLSKSRRLENLIAQLPGEKKNGLFGNLIALSLGLTPNFKSNFDLAEDAKLQLSKDTYDDDLDNLLAQIGDQYADLFLAAKNLSDAILLSDILRVNTEITKAPLSASMIKRYDEHHQDLTLLKALVRQQLPEKYKEIFFDQSKNGYAGYIDGGASQEEFYKFIKPILEKMDGTEELLVKLNREDLLRKQRTFDNGSIPHQIHLGELHAILRRQEDFYPFLKDNREKIEKILTFRIPYYVGPLARGNSRFAWMTRKSEETITPWNFEEVVDKGASAQSFIERMTNFDKNLPNEKVLPKHSLLYEYFTVYNELTKVKYVTEGMRKPAFLSGEQKKAIVDLLFKTNRKVTVKQLKEDYFKKIECFDSVEISGVEDRFNASLGTYHDLLKIIKDKDFLDNEENEDILEDIVLTLTLFEDREMIEERLKTYAHLFDDKVMKQLKRRRYTGWGRLSRKLINGIRDKQSGKTILDFLKSDGFANRNFMQLIHDDSLTFKEDIQKAQVSGQGDSLHEHIANLAGSPAIKKGILQTVKVVDELVKVMGRHKPENIVIEMARENQTTQKGQKNSRERMKRIEEGIKELGSQILKEHPVENTQLQNEKLYLYYLQNGRDMYVDQELDINRLSDYDVDHIVPQSFLKDDSIDNKVLTRSDKARGKSDNVPSEEVVKKMKNYWRQLLNAKLITQRKFDNLTKAERGGLSELDKAGFIKRQLVETRQITKHVAQILDSRMNTKYDENDKLIREVKVITLKSKLVSDFRKDFQFYKVREINNYHHAHDAYLNAVVGTALIKKYPKLESEFVYGDYKVYDVRKMIAKSEQEIGKATAKYFFYSNIMNFFKTEITLANGEIRKRPLIETNGETGEIVWDKGRDFATVRKVLSMPQVNIVKKTEVQTGGFSKESILPKRNSDKLIARKKDWDPKKYGGFDSPTVAYSVLVVAKVEKGKSKKLKSVKELLGITIMERSSFEKNPIDFLEAKGYKEVKKDLIIKLPKYSLFELENGRKRMLASAGELQKGNELALPSKYVNFLYLASHYEKLKGSPEDNEQKQLFVEQHKHYLDEIIEQISEFSKRVILADANLDKVLSAYNKHRDKPIREQAENIIHLFTLTNLGAPAAFKYFDTTIDRKRYTSTKEVLDATLIHQSITGLYETRIDLSQLGGDGGGGSGGSGGSGGSGGSGGSGGGLEHLPRPPEISQFPLNPERLQALQHLVRKALEAGHIEPYTGPGNNPVFPVKKANGTWRFIHDLRATNSLTVDLSSSSPGPPDLSSPPTTLAHLQTIDLKDAFFQIPLPKQFQPYFAFTVPQQCNYGPGTRYAWKVLPQGFKNSPTLFQMQLASILQPIRQAFPQCVILQYMDDILLASPSPEDLQQLSEATMASLISHGLPVSQDKTQQTPGTIKFLGQIISPNHITYDAVPTVPIRSRWALPELQALLGEIQWVSKGTPTLRQPLHSLYCALQGHTDPRDQIYLNPSQVQSLMQLQQALSQNCRSRLAQTLPLLGAIMLTLTGTTTVVFQSKQQWPLVWLHAPLPHTSQCPWGQLLASAVLLLDKYTLQSYGLLCQTIHHNISIQTFNQFIQTSDHPSVPILLHHSHRFKNLGAQTGELWNTFLKTAAPLAPVKALTPVFTLSPIIINTAPCLFSDGSTSQAAYILWDKHILSQRSFPLPPPHKSAQQAELLGLLHGLSSARSWHCLNIFLDSKYLYHYLRTLAWGTFQGKSSQAPFQALLPRLLAHKVIYLHHVRSHTNLPDPISKLNALTDALLITPILAGKRTADGSEFEKRTADGSEFESPKKKAKVE

SEQ ID NO: 1504 - protein, 2099 aa, synthetic construct
MPAAKRVKLDGGDKKYSIGLDIGTNSVGWAVITDEYKVPSKKFKVLGNTDRHSIKKNLIGALLFDSGETAEATRLKRTARRRYTRRKNRICYLQEIFSNEMAKVDDSFFHRLEESFLVEEDKKHERHPIFGNIVDEVAYHEKYPTIYHLRKKLVDSTDKADLRLIYLALAHMIKFRGHFLIEGDLNPDNSDVDKLFIQLVQTYNQLFEENPINASGVDAKAILSARLSKSRRLENLIAQLPGEKKNGLFGNLIALSLGLTPNFKSNFDLAEDAKLQLSKDTYDDDLDNLLAQIGDQYADLFLAAKNLSDAILLSDILRVNTEITKAPLSASMIKRYDEHHQDLTLLKALVRQQLPEKYKEIFFDQSKNGYAGYIDGGASQEEFYKFIKPILEKMDGTEELLVKLNREDLLRKQRTFDNGSIPHQIHLGELHAILRRQEDFYPFLKDNREKIEKILTFRIPYYVGPLARGNSRFAWMTRKSEETITPWNFEEVVDKGASAQSFIERMTNFDKNLPNEKVLPKHSLLYEYFTVYNELTKVKYVTEGMRKPAFLSGEQKKAIVDLLFKTNRKVTVKQLKEDYFKKIECFDSVEISGVEDRFNASLGTYHDLLKIIKDKDFLDNEENEDILEDIVLTLTLFEDREMIEERLKTYAHLFDDKVMKQLKRRRYTGWGRLSRKLINGIRDKQSGKTILDFLKSDGFANRNFMQLIHDDSLTFKEDIQKAQVSGQGDSLHEHIANLAGSPAIKKGILQTVKVVDELVKVMGRHKPENIVIEMARENQTTQKGQKNSRERMKRIEEGIKELGSQILKEHPVENTQLQNEKLYLYYLQNGRDMYVDQELDINRLSDYDVDHIVPQSFLKDDSIDNKVLTRSDKARGKSDNVPSEEVVKKMKNYWRQLLNAKLITQRKFDNLTKAERGGLSELDKAGFIKRQLVETRQITKHVAQILDSRMNTKYDENDKLIREVKVITLKSKLVSDFRKDFQFYKVREINNYHHAHDAYLNAVVGTALIKKYPKLESEFVYGDYKVYDVRKMIAKSEQEIGKATAKYFFYSNIMNFFKTEITLANGEIRKRPLIETNGETGEIVWDKGRDFATVRKVLSMPQVNIVKKTEVQTGGFSKESILPKRNSDKLIARKKDWDPKKYGGFDSPTVAYSVLVVAKVEKGKSKKLKSVKELLGITIMERSSFEKNPIDFLEAKGYKEVKKDLIIKLPKYSLFELENGRKRMLASAGELQKGNELALPSKYVNFLYLASHYEKLKGSPEDNEQKQLFVEQHKHYLDEIIEQISEFSKRVILADANLDKVLSAYNKHRDKPIREQAENIIHLFTLTNLGAPAAFKYFDTTIDRKRYTSTKEVLDATLIHQSITGLYETRIDLSQLGGDGGEAAAKPAPGGTVSLQDEHRLFDIPVTTSLPDVWLQDFPQAWAETGGLGRAKCQAPIIIDLKPTAVPVSIKQYPMSLEAHMGIRQHIIKFLELGVLRPCRSPWNTPLLPVKKPGTQDYRPVQDLREINKRTVDIHPTVPNPYNLLSTLKPDYSWYTVLDLKDAFFCLPLAPQSQELFAFEWKDPERGISGQLTWTRLPQGFKNSPTLFDEALHRDLTDFRTQHPEVTLLQYVDDLLLAAPTKKACTQGTRHLLQELGEKGYRASAKKAQICQTKVTYLGYILSEGKRWLTPGRIETVARIPPPRNPREVREFLGTAGFCRLWIPGFAELAAPLYALTKESTPFTWQTEHQLAFEALKKALLSAPALGLPDTSKPFTLFLDERQGIAKGVLTQKLGPWKRPVAYLSKKLDPVAAGWPPCLRIMAATAMLVKDSAKLTLGQPLTVITPHTLEAIVRQPPDRWITNARLTHYQALLLDTDRVQFGPPVTLNPATLLPVPENQPSPHDCRQVLAETHGTREDLKDQELPDADHTWYTDGSSYLDSGTRRAGAAVVDGHNTIWAQSLPPGTSAQKAELIALTKALELSKGKKANIYTDSRYAFATAHTHGSIYERRGLLTSEGKEIKNKAEIIALLKALFLPQEVAIIHCPGHQKGQDPVAVGNRQADRVARQAAMAEVLTLATEPDNTSHITAGKRTADGSEFEKRTADGSEFESPKKKAKVE

SEQ ID NO: 1505 - protein, 2100 aa, synthetic construct
MPAAKRVKLDGGDKKYSIGLDIGTNSVGWAVITDEYKVPSKKFKVLGNTDRHSIKKNLIGALLFDSGETAEATRLKRTARRRYTRRKNRICYLQEIFSNEMAKVDDSFFHRLEESFLVEEDKKHERHPIFGNIVDEVAYHEKYPTIYHLRKKLVDSTDKADLRLIYLALAHMIKFRGHFLIEGDLNPDNSDVDKLFIQLVQTYNQLFEENPINASGVDAKAILSARLSKSRRLENLIAQLPGEKKNGLFGNLIALSLGLTPNFKSNFDLAEDAKLQLSKDTYDDDLDNLLAQIGDQYADLFLAAKNLSDAILLSDILRVNTEITKAPLSASMIKRYDEHHQDLTLLKALVRQQLPEKYKEIFFDQSKNGYAGYIDGGASQEEFYKFIKPILEKMDGTEELLVKLNREDLLRKQRTFDNGSIPHQIHLGELHAILRRQEDFYPFLKDNREKIEKILTFRIPYYVGPLARGNSRFAWMTRKSEETITPWNFEEVVDKGASAQSFIERMTNFDKNLPNEKVLPKHSLLYEYFTVYNELTKVKYVTEGMRKPAFLSGEQKKAIVDLLFKTNRKVTVKQLKEDYFKKIECFDSVEISGVEDRFNASLGTYHDLLKIIKDKDFLDNEENEDILEDIVLTLTLFEDREMIEERLKTYAHLFDDKVMKQLKRRRYTGWGRLSRKLINGIRDKQSGKTILDFLKSDGFANRNFMQLIHDDSLTFKEDIQKAQVSGQGDSLHEHIANLAGSPAIKKGILQTVKVVDELVKVMGRHKPENIVIEMARENQTTQKGQKNSRERMKRIEEGIKELGSQILKEHPVENTQLQNEKLYLYYLQNGRDMYVDQELDINRLSDYDVDHIVPQSFLKDDSIDNKVLTRSDKARGKSDNVPSEEVVKKMKNYWRQLLNAKLITQRKFDNLTKAERGGLSELDKAGFIKRQLVETRQITKHVAQILDSRMNTKYDENDKLIREVKVITLKSKLVSDFRKDFQFYKVREINNYHHAHDAYLNAVVGTALIKKYPKLESEFVYGDYKVYDVRKMIAKSEQEIGKATAKYFFYSNIMNFFKTEITLANGEIRKRPLIETNGETGEIVWDKGRDFATVRKVLSMPQVNIVKKTEVQTGGFSKESILPKRNSDKLIARKKDWDPKKYGGFDSPTVAYSVLVVAKVEKGKSKKLKSVKELLGITIMERSSFEKNPIDFLEAKGYKEVKKDLIIKLPKYSLFELENGRKRMLASAGELQKGNELALPSKYVNFLYLASHYEKLKGSPEDNEQKQLFVEQHKHYLDEIIEQISEFSKRVILADANLDKVLSAYNKHRDKPIREQAENIIHLFTLTNLGAPAAFKYFDTTIDRKRYTSTKEVLDATLIHQSITGLYETRIDLSQLGGDGGGGGGSSPAPGGTVSLQDEHRLFDIPVTTSLPDVWLQDFPQAWAETGGLGRAKCQAPIIIDLKPTAVPVSIKQYPMSLEAHMGIRQHIIKFLELGVLRPCRSPWNTPLLPVKKPGTQDYRPVQDLREINKRTVDIHPTVPNPYNLLSTLKPDYSWYTVLDLKDAFFCLPLAPQSQELFAFEWKDPERGISGQLTWTRLPQGFKNSPTLFDEALHRDLTDFRTQHPEVTLLQYVDDLLLAAPTKKACTQGTRHLLQELGEKGYRASAKKAQICQTKVTYLGYILSEGKRWLTPGRIETVARIPPPRNPREVREFLGTAGFCRLWIPGFAELAAPLYALTKESTPFTWQTEHQLAFEALKKALLSAPALGLPDTSKPFTLFLDERQGIAKGVLTQKLGPWKRPVAYLSKKLDPVAAGWPPCLRIMAATAMLVKDSAKLTLGQPLTVITPHTLEAIVRQPPDRWITNARLTHYQALLLDTDRVQFGPPVTLNPATLLPVPENQPSPHDCRQVLAETHGTREDLKDQELPDADHTWYTDGSSYLDSGTRRAGAAVVDGHNTIWAQSLPPGTSAQKAELIALTKALELSKGKKANIYTDSRYAFATAHTHGSIYERRGLLTSEGKEIKNKAEIIALLKALFLPQEVAIIHCPGHQKGQDPVAVGNRQADRVARQAAMAEVLTLATEPDNTSHITAGKRTADGSEFEKRTADGSEFESPKKKAKVE

SEQ ID NO: 1506 - protein, 2100 aa, synthetic construct
MPAAKRVKLDGGDKKYSIGLDIGTNSVGWAVITDEYKVPSKKFKVLGNTDRHSIKKNLIGALLFDSGETAEATRLKRTARRRYTRRKNRICYLQEIFSNEMAKVDDSFFHRLEESFLVEEDKKHERHPIFGNIVDEVAYHEKYPTIYHLRKKLVDSTDKADLRLIYLALAHMIKFRGHFLIEGDLNPDNSDVDKLFIQLVQTYNQLFEENPINASGVDAKAILSARLSKSRRLENLIAQLPGEKKNGLFGNLIALSLGLTPNFKSNFDLAEDAKLQLSKDTYDDDLDNLLAQIGDQYADLFLAAKNLSDAILLSDILRVNTEITKAPLSASMIKRYDEHHQDLTLLKALVRQQLPEKYKEIFFDQSKNGYAGYIDGGASQEEFYKFIKPILEKMDGTEELLVKLNREDLLRKQRTFDNGSIPHQIHLGELHAILRRQEDFYPFLKDNREKIEKILTFRIPYYVGPLARGNSRFAWMTRKSEETITPWNFEEVVDKGASAQSFIERMTNFDKNLPNEKVLPKHSLLYEYFTVYNELTKVKYVTEGMRKPAFLSGEQKKAIVDLLFKTNRKVTVKQLKEDYFKKIECFDSVEISGVEDRFNASLGTYHDLLKIIKDKDFLDNEENEDILEDIVLTLTLFEDREMIEERLKTYAHLFDDKVMKQLKRRRYTGWGRLSRKLINGIRDKQSGKTILDFLKSDGFANRNFMQLIHDDSLTFKEDIQKAQVSGQGDSLHEHIANLAGSPAIKKGILQTVKVVDELVKVMGRHKPENIVIEMARENQTTQKGQKNSRERMKRIEEGIKELGSQILKEHPVENTQLQNEKLYLYYLQNGRDMYVDQELDINRLSDYDVDHIVPQSFLKDDSIDNKVLTRSDKARGKSDNVPSEEVVKKMKNYWRQLLNAKLITQRKFDNLTKAERGGLSELDKAGFIKRQLVETRQITKHVAQILDSRMNTKYDENDKLIREVKVITLKSKLVSDFRKDFQFYKVREINNYHHAHDAYLNAVVGTALIKKYPKLESEFVYGDYKVYDVRKMIAKSEQEIGKATAKYFFYSNIMNFFKTEITLANGEIRKRPLIETNGETGEIVWDKGRDFATVRKVLSMPQVNIVKKTEVQTGGFSKESILPKRNSDKLIARKKDWDPKKYGGFDSPTVAYSVLVVAKVEKGKSKKLKSVKELLGITIMERSSFEKNPIDFLEAKGYKEVKKDLIIKLPKYSLFELENGRKRMLASAGELQKGNELALPSKYVNFLYLASHYEKLKGSPEDNEQKQLFVEQHKHYLDEIIEQISEFSKRVILADANLDKVLSAYNKHRDKPIREQAENIIHLFTLTNLGAPAAFKYFDTTIDRKRYTSTKEVLDATLIHQSITGLYETRIDLSQLGGDGGPAPGGSGGGGGTVSLQDEHRLFDIPVTTSLPDVWLQDFPQAWAETGGLGRAKCQAPIIIDLKPTAVPVSIKQYPMSLEAHMGIRQHIIKFLELGVLRPCRSPWNTPLLPVKKPGTQDYRPVQDLREINKRTVDIHPTVPNPYNLLSTLKPDYSWYTVLDLKDAFFCLPLAPQSQELFAFEWKDPERGISGQLTWTRLPQGFKNSPTLFDEALHRDLTDFRTQHPEVTLLQYVDDLLLAAPTKKACTQGTRHLLQELGEKGYRASAKKAQICQTKVTYLGYILSEGKRWLTPGRIETVARIPPPRNPREVREFLGTAGFCRLWIPGFAELAAPLYALTKESTPFTWQTEHQLAFEALKKALLSAPALGLPDTSKPFTLFLDERQGIAKGVLTQKLGPWKRPVAYLSKKLDPVAAGWPPCLRIMAATAMLVKDSAKLTLGQPLTVITPHTLEAIVRQPPDRWITNARLTHYQALLLDTDRVQFGPPVTLNPATLLPVPENQPSPHDCRQVLAETHGTREDLKDQELPDADHTWYTDGSSYLDSGTRRAGAAVVDGHNTIWAQSLPPGTSAQKAELIALTKALELSKGKKANIYTDSRYAFATAHTHGSIYERRGLLTSEGKEIKNKAEIIALLKALFLPQEVAIIHCPGHQKGQDPVAVGNRQADRVARQAAMAEVLTLATEPDNTSHITAGKRTADGSEFEKRTADGSEFESPKKKAKVE

SEQ ID NO: 1507 - protein, 2106 aa, synthetic construct
MPAAKRVKLDGGDKKYSIGLDIGTNSVGWAVITDEYKVPSKKFKVLGNTDRHSIKKNLIGALLFDSGETAEATRLKRTARRRYTRRKNRICYLQEIFSNEMAKVDDSFFHRLEESFLVEEDKKHERHPIFGNIVDEVAYHEKYPTIYHLRKKLVDSTDKADLRLIYLALAHMIKFRGHFLIEGDLNPDNSDVDKLFIQLVQTYNQLFEENPINASGVDAKAILSARLSKSRRLENLIAQLPGEKKNGLFGNLIALSLGLTPNFKSNFDLAEDAKLQLSKDTYDDDLDNLLAQIGDQYADLFLAAKNLSDAILLSDILRVNTEITKAPLSASMIKRYDEHHQDLTLLKALVRQQLPEKYKEIFFDQSKNGYAGYIDGGASQEEFYKFIKPILEKMDGTEELLVKLNREDLLRKQRTFDNGSIPHQIHLGELHAILRRQEDFYPFLKDNREKIEKILTFRIPYYVGPLARGNSRFAWMTRKSEETITPWNFEEVVDKGASAQSFIERMTNFDKNLPNEKVLPKHSLLYEYFTVYNELTKVKYVTEGMRKPAFLSGEQKKAIVDLLFKTNRKVTVKQLKEDYFKKIECFDSVEISGVEDRFNASLGTYHDLLKIIKDKDFLDNEENEDILEDIVLTLTLFEDREMIEERLKTYAHLFDDKVMKQLKRRRYTGWGRLSRKLINGIRDKQSGKTILDFLKSDGFANRNFMQLIHDDSLTFKEDIQKAQVSGQGDSLHEHIANLAGSPAIKKGILQTVKVVDELVKVMGRHKPENIVIEMARENQTTQKGQKNSRERMKRIEEGIKELGSQILKEHPVENTQLQNEKLYLYYLQNGRDMYVDQELDINRLSDYDVDHIVPQSFLKDDSIDNKVLTRSDKARGKSDNVPSEEVVKKMKNYWRQLLNAKLITQRKFDNLTKAERGGLSELDKAGFIKRQLVETRQITKHVAQILDSRMNTKYDENDKLIREVKVITLKSKLVSDFRKDFQFYKVREINNYHHAHDAYLNAVVGTALIKKYPKLESEFVYGDYKVYDVRKMIAKSEQEIGKATAKYFFYSNIMNFFKTEITLANGEIRKRPLIETNGETGEIVWDKGRDFATVRKVLSMPQVNIVKKTEVQTGGFSKESILPKRNSDKLIARKKDWDPKKYGGFDSPTVAYSVLVVAKVEKGKSKKLKSVKELLGITIMERSSFEKNPIDFLEAKGYKEVKKDLIIKLPKYSLFELENGRKRMLASAGELQKGNELALPSKYVNFLYLASHYEKLKGSPEDNEQKQLFVEQHKHYLDEIIEQISEFSKRVILADANLDKVLSAYNKHRDKPIREQAENIIHLFTLTNLGAPAAFKYFDTTIDRKRYTSTKEVLDATLIHQSITGLYETRIDLSQLGGDGGGGSGGSGGSGGSGGSGGTVSLQDEHRLFDIPVTTSLPDVWLQDFPQAWAETGGLGRAKCQAPIIIDLKPTAVPVSIKQYPMSLEAHMGIRQHIIKFLELGVLRPCRSPWNTPLLPVKKPGTQDYRPVQDLREINKRTVDIHPTVPNPYNLLSTLKPDYSWYTVLDLKDAFFCLPLAPQSQELFAFEWKDPERGISGQLTWTRLPQGFKNSPTLFDEALHRDLTDFRTQHPEVTLLQYVDDLLLAAPTKKACTQGTRHLLQELGEKGYRASAKKAQICQTKVTYLGYILSEGKRWLTPGRIETVARIPPPRNPREVREFLGTAGFCRLWIPGFAELAAPLYALTKESTPFTWQTEHQLAFEALKKALLSAPALGLPDTSKPFTLFLDERQGIAKGVLTQKLGPWKRPVAYLSKKLDPVAAGWPPCLRIMAATAMLVKDSAKLTLGQPLTVITPHTLEAIVRQPPDRWITNARLTHYQALLLDTDRVQFGPPVTLNPATLLPVPENQPSPHDCRQVLAETHGTREDLKDQELPDADHTWYTDGSSYLDSGTRRAGAAVVDGHNTIWAQSLPPGTSAQKAELIALTKALELSKGKKANIYTDSRYAFATAHTHGSIYERRGLLTSEGKEIKNKAEIIALLKALFLPQEVAIIHCPGHQKGQDPVAVGNRQADRVARQAAMAEVLTLATEPDNTSHITAGKRTADGSEFEKRTADGSEFESPKKKAKVE

SEQ ID NO: 1508 - protein, 2100 aa, synthetic construct
MPAAKRVKLDGGDKKYSIGLDIGTNSVGWAVITDEYKVPSKKFKVLGNTDRHSIKKNLIGALLFDSGETAEATRLKRTARRRYTRRKNRICYLQEIFSNEMAKVDDSFFHRLEESFLVEEDKKHERHPIFGNIVDEVAYHEKYPTIYHLRKKLVDSTDKADLRLIYLALAHMIKFRGHFLIEGDLNPDNSDVDKLFIQLVQTYNQLFEENPINASGVDAKAILSARLSKSRRLENLIAQLPGEKKNGLFGNLIALSLGLTPNFKSNFDLAEDAKLQLSKDTYDDDLDNLLAQIGDQYADLFLAAKNLSDAILLSDILRVNTEITKAPLSASMIKRYDEHHQDLTLLKALVRQQLPEKYKEIFFDQSKNGYAGYIDGGASQEEFYKFIKPILEKMDGTEELLVKLNREDLLRKQRTFDNGSIPHQIHLGELHAILRRQEDFYPFLKDNREKIEKILTFRIPYYVGPLARGNSRFAWMTRKSEETITPWNFEEVVDKGASAQSFIERMTNFDKNLPNEKVLPKHSLLYEYFTVYNELTKVKYVTEGMRKPAFLSGEQKKAIVDLLFKTNRKVTVKQLKEDYFKKIECFDSVEISGVEDRFNASLGTYHDLLKIIKDKDFLDNEENEDILEDIVLTLTLFEDREMIEERLKTYAHLFDDKVMKQLKRRRYTGWGRLSRKLINGIRDKQSGKTILDFLKSDGFANRNFMQLIHDDSLTFKEDIQKAQVSGQGDSLHEHIANLAGSPAIKKGILQTVKVVDELVKVMGRHKPENIVIEMARENQTTQKGQKNSRERMKRIEEGIKELGSQILKEHPVENTQLQNEKLYLYYLQNGRDMYVDQELDINRLSDYDVDHIVPQSFLKDDSIDNKVLTRSDKARGKSDNVPSEEVVKKMKNYWRQLLNAKLITQRKFDNLTKAERGGLSELDKAGFIKRQLVETRQITKHVAQILDSRMNTKYDENDKLIREVKVITLKSKLVSDFRKDFQFYKVREINNYHHAHDAYLNAVVGTALIKKYPKLESEFVYGDYKVYDVRKMIAKSEQEIGKATAKYFFYSNIMNFFKTEITLANGEIRKRPLIETNGETGEIVWDKGRDFATVRKVLSMPQVNIVKKTEVQTGGFSKESILPKRNSDKLIARKKDWDPKKYGGFDSPTVAYSVLVVAKVEKGKSKKLKSVKELLGITIMERSSFEKNPIDFLEAKGYKEVKKDLIIKLPKYSLFELENGRKRMLASAGELQKGNELALPSKYVNFLYLASHYEKLKGSPEDNEQKQLFVEQHKHYLDEIIEQISEFSKRVILADANLDKVLSAYNKHRDKPIREQAENIIHLFTLTNLGAPAAFKYFDTTIDRKRYTSTKEVLDATLIHQSITGLYETRIDLSQLGGDGGGSSGGSPAPGGTVSLQDEHRLFDIPVTTSLPDVWLQDFPQAWAETGGLGRAKCQAPIIIDLKPTAVPVSIKQYPMSLEAHMGIRQHIIKFLELGVLRPCRSPWNTPLLPVKKPGTQDYRPVQDLREINKRTVDIHPTVPNPYNLLSTLKPDYSWYTVLDLKDAFFCLPLAPQSQELFAFEWKDPERGISGQLTWTRLPQGFKNSPTLFDEALHRDLTDFRTQHPEVTLLQYVDDLLLAAPTKKACTQGTRHLLQELGEKGYRASAKKAQICQTKVTYLGYILSEGKRWLTPGRIETVARIPPPRNPREVREFLGTAGFCRLWIPGFAELAAPLYALTKESTPFTWQTEHQLAFEALKKALLSAPALGLPDTSKPFTLFLDERQGIAKGVLTQKLGPWKRPVAYLSKKLDPVAAGWPPCLRIMAATAMLVKDSAKLTLGQPLTVITPHTLEAIVRQPPDRWITNARLTHYQALLLDTDRVQFGPPVTLNPATLLPVPENQPSPHDCRQVLAETHGTREDLKDQELPDADHTWYTDGSSYLDSGTRRAGAAVVDGHNTIWAQSLPPGTSAQKAELIALTKALELSKGKKANIYTDSRYAFATAHTHGSIYERRGLLTSEGKEIKNKAEIIALLKALFLPQEVAIIHCPGHQKGQDPVAVGNRQADRVARQAAMAEVLTLATEPDNTSHITAGKRTADGSEFEKRTADGSEFESPKKKAKVE

SEQ ID NO: 1509 - protein, 2097 aa, synthetic construct
MPAAKRVKLDGGDKKYSIGLDIGTNSVGWAVITDEYKVPSKKFKVLGNTDRHSIKKNLIGALLFDSGETAEATRLKRTARRRYTRRKNRICYLQEIFSNEMAKVDDSFFHRLEESFLVEEDKKHERHPIFGNIVDEVAYHEKYPTIYHLRKKLVDSTDKADLRLIYLALAHMIKFRGHFLIEGDLNPDNSDVDKLFIQLVQTYNQLFEENPINASGVDAKAILSARLSKSRRLENLIAQLPGEKKNGLFGNLIALSLGLTPNFKSNFDLAEDAKLQLSKDTYDDDLDNLLAQIGDQYADLFLAAKNLSDAILLSDILRVNTEITKAPLSASMIKRYDEHHQDLTLLKALVRQQLPEKYKEIFFDQSKNGYAGYIDGGASQEEFYKFIKPILEKMDGTEELLVKLNREDLLRKQRTFDNGSIPHQIHLGELHAILRRQEDFYPFLKDNREKIEKILTFRIPYYVGPLARGNSRFAWMTRKSEETITPWNFEEVVDKGASAQSFIERMTNFDKNLPNEKVLPKHSLLYEYFTVYNELTKVKYVTEGMRKPAFLSGEQKKAIVDLLFKTNRKVTVKQLKEDYFKKIECFDSVEISGVEDRFNASLGTYHDLLKIIKDKDFLDNEENEDILEDIVLTLTLFEDREMIEERLKTYAHLFDDKVMKQLKRRRYTGWGRLSRKLINGIRDKQSGKTILDFLKSDGFANRNFMQLIHDDSLTFKEDIQKAQVSGQGDSLHEHIANLAGSPAIKKGILQTVKVVDELVKVMGRHKPENIVIEMARENQTTQKGQKNSRERMKRIEEGIKELGSQILKEHPVENTQLQNEKLYLYYLQNGRDMYVDQELDINRLSDYDVDHIVPQSFLKDDSIDNKVLTRSDKARGKSDNVPSEEVVKKMKNYWRQLLNAKLITQRKFDNLTKAERGGLSELDKAGFIKRQLVETRQITKHVAQILDSRMNTKYDENDKLIREVKVITLKSKLVSDFRKDFQFYKVREINNYHHAHDAYLNAVVGTALIKKYPKLESEFVYGDYKVYDVRKMIAKSEQEIGKATAKYFFYSNIMNFFKTEITLANGEIRKRPLIETNGETGEIVWDKGRDFATVRKVLSMPQVNIVKKTEVQTGGFSKESILPKRNSDKLIARKKDWDPKKYGGFDSPTVAYSVLVVAKVEKGKSKKLKSVKELLGITIMERSSFEKNPIDFLEAKGYKEVKKDLIIKLPKYSLFELENGRKRMLASAGELQKGNELALPSKYVNFLYLASHYEKLKGSPEDNEQKQLFVEQHKHYLDEIIEQISEFSKRVILADANLDKVLSAYNKHRDKPIREQAENIIHLFTLTNLGAPAAFKYFDTTIDRKRYTSTKEVLDATLIHQSITGLYETRIDLSQLGGDGGPAPGSSGGTVSLQDEHRLFDIPVTTSLPDVWLQDFPQAWAETGGLGRAKCQAPIIIDLKPTAVPVSIKQYPMSLEAHMGIRQHIIKFLELGVLRPCRSPWNTPLLPVKKPGTQDYRPVQDLREINKRTVDIHPTVPNPYNLLSTLKPDYSWYTVLDLKDAFFCLPLAPQSQELFAFEWKDPERGISGQLTWTRLPQGFKNSPTLFDEALHRDLTDFRTQHPEVTLLQYVDDLLLAAPTKKACTQGTRHLLQELGEKGYRASAKKAQICQTKVTYLGYILSEGKRWLTPGRIETVARIPPPRNPREVREFLGTAGFCRLWIPGFAELAAPLYALTKESTPFTWQTEHQLAFEALKKALLSAPALGLPDTSKPFTLFLDERQGIAKGVLTQKLGPWKRPVAYLSKKLDPVAAGWPPCLRIMAATAMLVKDSAKLTLGQPLTVITPHTLEAIVRQPPDRWITNARLTHYQALLLDTDRVQFGPPVTLNPATLLPVPENQPSPHDCRQVLAETHGTREDLKDQELPDADHTWYTDGSSYLDSGTRRAGAAVVDGHNTIWAQSLPPGTSAQKAELIALTKALELSKGKKANIYTDSRYAFATAHTHGSIYERRGLLTSEGKEIKNKAEIIALLKALFLPQEVAIIHCPGHQKGQDPVAVGNRQADRVARQAAMAEVLTLATEPDNTSHITAGKRTADGSEFEKRTADGSEFESPKKKAKVE

SEQ ID NO: 1510 - protein, 2009 aa, synthetic construct
MPAAKRVKLDGGDKKYSIGLDIGTNSVGWAVITDEYKVPSKKFKVLGNTDRHSIKKNLIGALLFDSGETAEATRLKRTARRRYTRRKNRICYLQEIFSNEMAKVDDSFFHRLEESFLVEEDKKHERHPIFGNIVDEVAYHEKYPTIYHLRKKLVDSTDKADLRLIYLALAHMIKFRGHFLIEGDLNPDNSDVDKLFIQLVQTYNQLFEENPINASGVDAKAILSARLSKSRRLENLIAQLPGEKKNGLFGNLIALSLGLTPNFKSNFDLAEDAKLQLSKDTYDDDLDNLLAQIGDQYADLFLAAKNLSDAILLSDILRVNTEITKAPLSASMIKRYDEHHQDLTLLKALVRQQLPEKYKEIFFDQSKNGYAGYIDGGASQEEFYKFIKPILEKMDGTEELLVKLNREDLLRKQRTFDNGSIPHQIHLGELHAILRRQEDFYPFLKDNREKIEKILTFRIPYYVGPLARGNSRFAWMTRKSEETITPWNFEEVVDKGASAQSFIERMTNFDKNLPNEKVLPKHSLLYEYFTVYNELTKVKYVTEGMRKPAFLSGEQKKAIVDLLFKTNRKVTVKQLKEDYFKKIECFDSVEISGVEDRFNASLGTYHDLLKIIKDKDFLDNEENEDILEDIVLTLTLFEDREMIEERLKTYAHLFDDKVMKQLKRRRYTGWGRLSRKLINGIRDKQSGKTILDFLKSDGFANRNFMQLIHDDSLTFKEDIQKAQVSGQGDSLHEHIANLAGSPAIKKGILQTVKVVDELVKVMGRHKPENIVIEMARENQTTQKGQKNSRERMKRIEEGIKELGSQILKEHPVENTQLQNEKLYLYYLQNGRDMYVDQELDINRLSDYDVDHIVPQSFLKDDSIDNKVLTRSDKARGKSDNVPSEEVVKKMKNYWRQLLNAKLITQRKFDNLTKAERGGLSELDKAGFIKRQLVETRQITKHVAQILDSRMNTKYDENDKLIREVKVITLKSKLVSDFRKDFQFYKVREINNYHHAHDAYLNAVVGTALIKKYPKLESEFVYGDYKVYDVRKMIAKSEQEIGKATAKYFFYSNIMNFFKTEITLANGEIRKRPLIETNGETGEIVWDKGRDFATVRKVLSMPQVNIVKKTEVQTGGFSKESILPKRNSDKLIARKKDWDPKKYGGFDSPTVAYSVLVVAKVEKGKSKKLKSVKELLGITIMERSSFEKNPIDFLEAKGYKEVKKDLIIKLPKYSLFELENGRKRMLASAGELQKGNELALPSKYVNFLYLASHYEKLKGSPEDNEQKQLFVEQHKHYLDEIIEQISEFSKRVILADANLDKVLSAYNKHRDKPIREQAENIIHLFTLTNLGAPAAFKYFDTTIDRKRYTSTKEVLDATLIHQSITGLYETRIDLSQLGGDGGEAAAKGGGPAPGGGLEHLPPPPEVSQFPLNPERLQALTDLVSRALEAKHIEPYQGPGNNPIFPVKKPNGKWRFIHDLRATNSVTRDLASPSPGPPDLTSLPQGLPHLRTIDLTDAFFQIPLPTIFQPYFAFTLPQPNNYGPGTRYSWRVLPQGFKNSPTLFEQQLSHILTPVRKTFPNSLIIQYMDDILLASPAPGELAALTDKVTNALTKEGLPLSPEKTQATPGPIHFLGQVISQDCITYETLPSINVKSTWSLAELQSMLGELQWVSKGTPVLRSSLHQLYLALRGHRDPRDTIKLTSIQVQALRTIQKALTLNCRSRLVNQLPILALIMLRPTGTTAVLFQTKQKWPLVWLHTPHPATSLRPWGQLLANAVIILDKYSLQHYGQVCKSFHHNISNQALTYYLHTSDQSSVAILLQHSHRFHNLGAQPSGPWRSLLQMPQIFQNIDVLRPPFTISPVVINHAPCLFSDGSASKAAFIIWDRQVIHQQVLSLPSTCSAQAGELFGLLAGLQKSQPWVALNIFLDSKFLIGHLRRMALGAFPGPSTQCELHTQLLPLLQGKTVYVHHVRSHTLLQDPISRLNEATDALMLAPLLPLAGKRTADGSEFEKRTADGSEFESPKKKAKVE

SEQ ID NO: 1511 - protein, 2001 aa, synthetic construct
MPAAKRVKLDGGDKKYSIGLDIGTNSVGWAVITDEYKVPSKKFKVLGNTDRHSIKKNLIGALLFDSGETAEATRLKRTARRRYTRRKNRICYLQEIFSNEMAKVDDSFFHRLEESFLVEEDKKHERHPIFGNIVDEVAYHEKYPTIYHLRKKLVDSTDKADLRLIYLALAHMIKFRGHFLIEGDLNPDNSDVDKLFIQLVQTYNQLFEENPINASGVDAKAILSARLSKSRRLENLIAQLPGEKKNGLFGNLIALSLGLTPNFKSNFDLAEDAKLQLSKDTYDDDLDNLLAQIGDQYADLFLAAKNLSDAILLSDILRVNTEITKAPLSASMIKRYDEHHQDLTLLKALVRQQLPEKYKEIFFDQSKNGYAGYIDGGASQEEFYKFIKPILEKMDGTEELLVKLNREDLLRKQRTFDNGSIPHQIHLGELHAILRRQEDFYPFLKDNREKIEKILTFRIPYYVGPLARGNSRFAWMTRKSEETITPWNFEEVVDKGASAQSFIERMTNFDKNLPNEKVLPKHSLLYEYFTVYNELTKVKYVTEGMRKPAFLSGEQKKAIVDLLFKTNRKVTVKQLKEDYFKKIECFDSVEISGVEDRFNASLGTYHDLLKIIKDKDFLDNEENEDILEDIVLTLTLFEDREMIEERLKTYAHLFDDKVMKQLKRRRYTGWGRLSRKLINGIRDKQSGKTILDFLKSDGFANRNFMQLIHDDSLTFKEDIQKAQVSGQGDSLHEHIANLAGSPAIKKGILQTVKVVDELVKVMGRHKPENIVIEMARENQTTQKGQKNSRERMKRIEEGIKELGSQILKEHPVENTQLQNEKLYLYYLQNGRDMYVDQELDINRLSDYDVDHIVPQSFLKDDSIDNKVLTRSDKARGKSDNVPSEEVVKKMKNYWRQLLNAKLITQRKFDNLTKAERGGLSELDKAGFIKRQLVETRQITKHVAQILDSRMNTKYDENDKLIREVKVITLKSKLVSDFRKDFQFYKVREINNYHHAHDAYLNAVVGTALIKKYPKLESEFVYGDYKVYDVRKMIAKSEQEIGKATAKYFFYSNIMNFFKTEITLANGEIRKRPLIETNGETGEIVWDKGRDFATVRKVLSMPQVNIVKKTEVQTGGFSKESILPKRNSDKLIARKKDWDPKKYGGFDSPTVAYSVLVVAKVEKGKSKKLKSVKELLGITIMERSSFEKNPIDFLEAKGYKEVKKDLIIKLPKYSLFELENGRKRMLASAGELQKGNELALPSKYVNFLYLASHYEKLKGSPEDNEQKQLFVEQHKHYLDEIIEQISEFSKRVILADANLDKVLSAYNKHRDKPIREQAENIIHLFTLTNLGAPAAFKYFDTTIDRKRYTSTKEVLDATLIHQSITGLYETRIDLSQLGGDGGGGSGGGLEHLPPPPEVSQFPLNPERLQALTDLVSRALEAKHIEPYQGPGNNPIFPVKKPNGKWRFIHDLRATNSVTRDLASPSPGPPDLTSLPQGLPHLRTIDLTDAFFQIPLPTIFQPYFAFTLPQPNNYGPGTRYSWRVLPQGFKNSPTLFQQQLSHILTPVRKTFPNSLIIQYMDDILLASPAPGELAALTDKVTNALTKEGLPLSPEKTQATPGPIHFLGQVISQDCITYETLPSINVKSTWSLAELQSMLGELQWVSKGTPVLRSSLHQLYLALRGHRDPRDTIKLTSIQVQALRTIQKALTLNCRSRLVNQLPILALIMLRPTGTTAVLFQTKQKWPLVWLHTPHPATSLRPWGQLLANAVIILDKYSLQHYGQVCKSFHHNISNQALTYYLHTSDQSSVAILLQHSHRFHNLGAQPSGPWRSLLQMPQIFQNIDVLRPPFTISPVVINHAPCLFSDGSASKAAFIIWDRQVIHQQVLSLPSTCSAQAGELFGLLAGLQKSQPWVALNIFLDSKFLIGHLRRMAWGAFPGPSTQCELHTQLLPLLQGKTVYVHHVRSHTLLQDPISRLNEATDALMLAPLLPLAGKRTADGSEFEKRTADGSEFESPKKKAKVE

SEQ ID NO: 1512 - protein, 2004 aa, synthetic construct
MPAAKRVKLDGGDKKYSIGLDIGTNSVGWAVITDEYKVPSKKFKVLGNTDRHSIKKNLIGALLFDSGETAEATRLKRTARRRYTRRKNRICYLQEIFSNEMAKVDDSFFHRLEESFLVEEDKKHERHPIFGNIVDEVAYHEKYPTIYHLRKKLVDSTDKADLRLIYLALAHMIKFRGHFLIEGDLNPDNSDVDKLFIQLVQTYNQLFEENPINASGVDAKAILSARLSKSRRLENLIAQLPGEKKNGLFGNLIALSLGLTPNFKSNFDLAEDAKLQLSKDTYDDDLDNLLAQIGDQYADLFLAAKNLSDAILLSDILRVNTEITKAPLSASMIKRYDEHHQDLTLLKALVRQQLPEKYKEIFFDQSKNGYAGYIDGGASQEEFYKFIKPILEKMDGTEELLVKLNREDLLRKQRTFDNGSIPHQIHLGELHAILRRQEDFYPFLKDNREKIEKILTFRIPYYVGPLARGNSRFAWMTRKSEETITPWNFEEVVDKGASAQSFIERMTNFDKNLPNEKVLPKHSLLYEYFTVYNELTKVKYVTEGMRKPAFLSGEQKKAIVDLLFKTNRKVTVKQLKEDYFKKIECFDSVEISGVEDRFNASLGTYHDLLKIIKDKDFLDNEENEDILEDIVLTLTLFEDREMIEERLKTYAHLFDDKVMKQLKRRRYTGWGRLSRKLINGIRDKQSGKTILDFLKSDGFANRNFMQLIHDDSLTFKEDIQKAQVSGQGDSLHEHIANLAGSPAIKKGILQTVKVVDELVKVMGRHKPENIVIEMARENQTTQKGQKNSRERMKRIEEGIKELGSQILKEHPVENTQLQNEKLYLYYLQNGRDMYVDQELDINRLSDYDVDHIVPQSFLKDDSIDNKVLTRSDKARGKSDNVPSEEVVKKMKNYWRQLLNAKLITQRKFDNLTKAERGGLSELDKAGFIKRQLVETRQITKHVAQILDSRMNTKYDENDKLIREVKVITLKSKLVSDFRKDFQFYKVREINNYHHAHDAYLNAVVGTALIKKYPKLESEFVYGDYKVYDVRKMIAKSEQEIGKATAKYFFYSNIMNFFKTEITLANGEIRKRPLIETNGETGEIVWDKGRDFATVRKVLSMPQVNIVKKTEVQTGGFSKESILPKRNSDKLIARKKDWDPKKYGGFDSPTVAYSVLVVAKVEKGKSKKLKSVKELLGITIMERSSFEKNPIDFLEAKGYKEVKKDLIIKLPKYSLFELENGRKRMLASAGELQKGNELALPSKYVNFLYLASHYEKLKGSPEDNEQKQLFVEQHKHYLDEIIEQISEFSKRVILADANLDKVLSAYNKHRDKPIREQAENIIHLFTLTNLGAPAAFKYFDTTIDRKRYTSTKEVLDATLIHQSITGLYETRIDLSQLGGDGGGGSGGGGGGLEHLPPPPEVSQFPLNPERLQALTDLVSRALEAKHIEPYQGPGNNPIFPVKKPNGKWRFIHDLRATNSVTRDLASPSPGPPDLTSLPQGLPHLRTIDLTDAFFQIPLPTIFQPYFAFTLPQPNNYGPGTRYSWRVLPQGFKNSPTLFQQQLSHILTPVRKTFPNSLIIQYMDDILLASPAPGELAALTDKVTNALTKEGLPLSPEKTQATPGPIHFLGQVISQDCITYETLPSINVKSTWSLAELQSMLGELQWVSKGTPVLRSSLHQLYLALRGHRDPRDTIKLTSIQVQALRTIQKALTLNCRSRLVNQLPILALIMLRPTGTTAVLFQTKQKWPLVWLHTPHPATSLRPWGQLLANAVIILDKYSLQHYGQVCKSFHHNISNQALTYYLHTSDQSSVAILLQHSHRFHNLGAQPSGPWRSLLQMPQIFQNIDVLRPPFTISPVVINHAPCLFSDGSASKAAFIIWDRQVIHQQVLSLPSTCSAQAGELFGLLAGLQKSQPWVALNIFLDSKFLIGHLRRMAWGAFPGPSTQCELHTQLLPLLQGKTVYVHHVRSHTLLQDPISRLNEATDALMLAPLLPLAGKRTADGSEFEKRTADGSEFESPKKKAKVE

SEQ ID NO: 1513 - protein, 2007 aa, synthetic construct
MPAAKRVKLDGGDKKYSIGLDIGTNSVGWAVITDEYKVPSKKFKVLGNTDRHSIKKNLIGALLFDSGETAEATRLKRTARRRYTRRKNRICYLQEIFSNEMAKVDDSFFHRLEESFLVEEDKKHERHPIFGNIVDEVAYHEKYPTIYHLRKKLVDSTDKADLRLIYLALAHMIKFRGHFLIEGDLNPDNSDVDKLFIQLVQTYNQLFEENPINASGVDAKAILSARLSKSRRLENLIAQLPGEKKNGLFGNLIALSLGLTPNFKSNFDLAEDAKLQLSKDTYDDDLDNLLAQIGDQYADLFLAAKNLSDAILLSDILRVNTEITKAPLSASMIKRYDEHHQDLTLLKALVRQQLPEKYKEIFFDQSKNGYAGYIDGGASQEEFYKFIKPILEKMDGTEELLVKLNREDLLRKQRTFDNGSIPHQIHLGELHAILRRQEDFYPFLKDNREKIEKILTFRIPYYVGPLARGNSRFAWMTRKSEETITPWNFEEVVDKGASAQSFIERMTNFDKNLPNEKVLPKHSLLYEYFTVYNELTKVKYVTEGMRKPAFLSGEQKKAIVDLLFKTNRKVTVKQLKEDYFKKIECFDSVEISGVEDRFNASLGTYHDLLKIIKDKDFLDNEENEDILEDIVLTLTLFEDREMIEERLKTYAHLFDDKVMKQLKRRRYTGWGRLSRKLINGIRDKQSGKTILDFLKSDGFANRNFMQLIHDDSLTFKEDIQKAQVSGQGDSLHEHIANLAGSPAIKKGILQTVKVVDELVKVMGRHKPENIVIEMARENQTTQKGQKNSRERMKRIEEGIKELGSQILKEHPVENTQLQNEKLYLYYLQNGRDMYVDQELDINRLSDYDVDHIVPQSFLKDDSIDNKVLTRSDKARGKSDNVPSEEVVKKMKNYWRQLLNAKLITQRKFDNLTKAERGGLSELDKAGFIKRQLVETRQITKHVAQILDSRMNTKYDENDKLIREVKVITLKSKLVSDFRKDFQFYKVREINNYHHAHDAYLNAVVGTALIKKYPKLESEFVYGDYKVYDVRKMIAKSEQEIGKATAKYFFYSNIMNFFKTEITLANGEIRKRPLIETNGETGEIVWDKGRDFATVRKVLSMPQVNIVKKTEVQTGGFSKESILPKRNSDKLIARKKDWDPKKYGGFDSPTVAYSVLVVAKVEKGKSKKLKSVKELLGITIMERSSFEKNPIDFLEAKGYKEVKKDLIIKLPKYSLFELENGRKRMLASAGELQKGNELALPSKYVNFLYLASHYEKLKGSPEDNEQKQLFVEQHKHYLDEIIEQISEFSKRVILADANLDKVLSAYNKHRDKPIREQAENIIHLFTLTNLGAPAAFKYFDTTIDRKRYTSTKEVLDATLIHQSITGLYETRIDLSQLGGDGGPAPGGGGSSGGGLEHLPPPPEVSQFPLNPERLQALTDLVSRALEAKHIEPYQGPGNNPIFPVKKPNGKWRFIHDLRATNSVTRDLASPSPGPPDLTSLPQGLPHLRTIDLTDAFFQIPLPTIFQPYFAFTLPQPNNYGPGTRYSWRVLPQGFKNSPTLFQQQLSHILTPVRKTFPNSLIIQYMDDILLASPAPGELAALTDKVTNALTKEGLPLSPEKTQATPGPIHFLGQVISQDCITYETLPSINVKSTWSLAELQSMLGELQWVSKGTPVLRSSLHQLYLALRGHRDPRDTIKLTSIQVQALRTIQKALTLNCRSRLVNQLPILALIMLRPTGTTAVLFQTKQKWPLVWLHTPHPATSLRPWGQLLANAVIILDKYSLQHYGQVCKSFHHNISNQALTYYLHTSDQSSVAILLQHSHRFHNLGAQPSGPWRSLLQMPQIFQNIDVLRPPFTISPVVINHAPCLFSDGSASKAAFIIWDRQVIHQQVLSLPSTCSAQAGELFGLLAGLQKSQPWVALNIFLDSKFLIGHLRRMAWGAFPGPSTQCELHTQLLPLLQGKTVYVHHVRSHTLLQDPISRLNEATDALMLAPLLPLAGKRTADGSEFEKRTADGSEFESPKKKAKVE

SEQ ID NO: 1514 - protein, 2007 aa, synthetic construct
MPAAKRVKLDGGDKKYSIGLDIGTNSVGWAVITDEYKVPSKKFKVLGNTDRHSIKKNLIGALLFDSGETAEATRLKRTARRRYTRRKNRICYLQEIFSNEMAKVDDSFFHRLEESFLVEEDKKHERHPIFGNIVDEVAYHEKYPTIYHLRKKLVDSTDKADLRLIYLALAHMIKFRGHFLIEGDLNPDNSDVDKLFIQLVQTYNQLFEENPINASGVDAKAILSARLSKSRRLENLIAQLPGEKKNGLFGNLIALSLGLTPNFKSNFDLAEDAKLQLSKDTYDDDLDNLLAQIGDQYADLFLAAKNLSDAILLSDILRVNTEITKAPLSASMIKRYDEHHQDLTLLKALVRQQLPEKYKEIFFDQSKNGYAGYIDGGASQEEFYKFIKPILEKMDGTEELLVKLNREDLLRKQRTFDNGSIPHQIHLGELHAILRRQEDFYPFLKDNREKIEKILTFRIPYYVGPLARGNSRFAWMTRKSEETITPWNFEEVVDKGASAQSFIERMTNFDKNLPNEKVLPKHSLLYEYFTVYNELTKVKYVTEGMRKPAFLSGEQKKAIVDLLFKTNRKVTVKQLKEDYFKKIECFDSVEISGVEDRFNASLGTYHDLLKIIKDKDFLDNEENEDILEDIVLTLTLFEDREMIEERLKTYAHLFDDKVMKQLKRRRYTGWGRLSRKLINGIRDKQSGKTILDFLKSDGFANRNFMQLIHDDSLTFKEDIQKAQVSGQGDSLHEHIANLAGSPAIKKGILQTVKVVDELVKVMGRHKPENIVIEMARENQTTQKGQKNSRERMKRIEEGIKELGSQILKEHPVENTQLQNEKLYLYYLQNGRDMYVDQELDINRLSDYDVDHIVPQSFLKDDSIDNKVLTRSDKARGKSDNVPSEEVVKKMKNYWRQLLNAKLITQRKFDNLTKAERGGLSELDKAGFIKRQLVETRQITKHVAQILDSRMNTKYDENDKLIREVKVITLKSKLVSDFRKDFQFYKVREINNYHHAHDAYLNAVVGTALIKKYPKLESEFVYGDYKVYDVRKMIAKSEQEIGKATAKYFFYSNIMNFFKTEITLANGEIRKRPLIETNGETGEIVWDKGRDFATVRKVLSMPQVNIVKKTEVQTGGFSKESILPKRNSDKLIARKKDWDPKKYGGFDSPTVAYSVLVVAKVEKGKSKKLKSVKELLGITIMERSSFEKNPIDFLEAKGYKEVKKDLIIKLPKYSLFELENGRKRMLASAGELQKGNELALPSKYVNFLYLASHYEKLKGSPEDNEQKQLFVEQHKHYLDEIIEQISEFSKRVILADANLDKVLSAYNKHRDKPIREQAENIIHLFTLTNLGAPAAFKYFDTTIDRKRYTSTKEVLDATLIHQSITGLYETRIDLSQLGGDGGGGGPAPGSSGGGLEHLPPPPEVSQFPLNPERLQALTDLVSRALEAKHIEPYQGPGNNPIFPVKKPNGKWRFIHDLRATNSVTRDLASPSPGPPDLTSPPQGLPHLRTIDLTDAFFQIPLPTIFQPYFAFTLPQPNNYGPGTRYSWRVLPQGFKNSPTLFQQQLSHILTPVRKTFPNSLIIQYMDDILLASPAPGELAALTDKVTNALTKEGLPLSPEKTQATPGPIHFLGQVISQDCITYETLPSINVKSTWSLAELQSMLGELQWVSKGTPVLRSSLHQLYLALRGHRDPRDTIKLTSIQVQALRTIQKALTLNCRSRLVNQLPILALIMLRPTGTTAVLFQTKQKWPLVWLHTPHPATSLRPWGQLLANAVIILDKYSLQHYGQVCKSFHHNISNQALTYYLHTSDQSSVAILLQHSHRFHNLGAQPSGPWRSLLQMPQIFQNIDVLRPPFTISPVVINHAPCLFSDGSASKAAFIIWDRQVIHQQVLSLPSTCSAQAGELFGLLAGLQKSQPWVALNIFLDSKFLIGHLRRMAWGAFPGPSTQCELHTQLLPLLQGKTVYVHHVRSHTLLQDPISRLNEATDALMLAPLLPLAGKRTADGSEFEKRTADGSEFESPKKKAKVE

SEQ ID NO: 1515 - protein, 2007 aa, synthetic construct
MPAAKRVKLDGGDKKYSIGLDIGTNSVGWAVITDEYKVPSKKFKVLGNTDRHSIKKNLIGALLFDSGETAEATRLKRTARRRYTRRKNRICYLQEIFSNEMAKVDDSFFHRLEESFLVEEDKKHERHPIFGNIVDEVAYHEKYPTIYHLRKKLVDSTDKADLRLIYLALAHMIKFRGHFLIEGDLNPDNSDVDKLFIQLVQTYNQLFEENPINASGVDAKAILSARLSKSRRLENLIAQLPGEKKNGLFGNLIALSLGLTPNFKSNFDLAEDAKLQLSKDTYDDDLDNLLAQIGDQYADLFLAAKNLSDAILLSDILRVNTEITKAPLSASMIKRYDEHHQDLTLLKALVRQQLPEKYKEIFFDQSKNGYAGYIDGGASQEEFYKFIKPILEKMDGTEELLVKLNREDLLRKQRTFDNGSIPHQIHLGELHAILRRQEDFYPFLKDNREKIEKILTFRIPYYVGPLARGNSRFAWMTRKSEETITPWNFEEVVDKGASAQSFIERMTNFDKNLPNEKVLPKHSLLYEYFTVYNELTKVKYVTEGMRKPAFLSGEQKKAIVDLLFKTNRKVTVKQLKEDYFKKIECFDSVEISGVEDRFNASLGTYHDLLKIIKDKDFLDNEENEDILEDIVLTLTLFEDREMIEERLKTYAHLFDDKVMKQLKRRRYTGWGRLSRKLINGIRDKQSGKTILDFLKSDGFANRNFMQLIHDDSLTFKEDIQKAQVSGQGDSLHEHIANLAGSPAIKKGILQTVKVVDELVKVMGRHKPENIVIEMARENQTTQKGQKNSRERMKRIEEGIKELGSQILKEHPVENTQLQNEKLYLYYLQNGRDMYVDQELDINRLSDYDVDHIVPQSFLKDDSIDNKVLTRSDKARGKSDNVPSEEVVKKMKNYWRQLLNAKLITQRKFDNLTKAERGGLSELDKAGFIKRQLVETRQITKHVAQILDSRMNTKYDENDKLIREVKVITLKSKLVSDFRKDFQFYKVREINNYHHAHDAYLNAVVGTALIKKYPKLESEFVYGDYKVYDVRKMIAKSEQEIGKATAKYFFYSNIMNFFKTEITLANGEIRKRPLIETNGETGEIVWDKGRDFATVRKVLSMPQVNIVKKTEVQTGGFSKESILPKRNSDKLIARKKDWDPKKYGGFDSPTVAYSVLVVAKVEKGKSKKLKSVKELLGITIMERSSFEKNPIDFLEAKGYKEVKKDLIIKLPKYSLFELENGRKRMLASAGELQKGNELALPSKYVNFLYLASHYEKLKGSPEDNEQKQLFVEQHKHYLDEIIEQISEFSKRVILADANLDKVLSAYNKHRDKPIREQAENIIHLFTLTNLGAPAAFKYFDTTIDRKRYTSTKEVLDATLIHQSITGLYETRIDLSQLGGDGGGSSGGGPAPGGGLEHLPPPPEVSQFPLNPERLQALTDLVSRALEAKHIEPYQGPGNNPIFPVKKPNGKWRFIHDLRATNSVTRDLASPSPGPPDLTSPPQGLPHLRTIDLTDAFFQIPLPTIFQPYFAFTLPQPNNYGPGTRYSWRVLPQGFKNSPTLFQQQLSHILTPVRKTFPNSLIIQYMDDILLASPAPGELAALTDKVTNALTKEGLPLSPEKTQATPGPIHFLGQVISQDCITYETLPSINVKSTWSLAELQSMLGELQWVSKGTPVLRSSLHQLYLALRGHRDPRDTIKLTSIQVQALRTIQKALTLNCRSRLVNQLPILALIMLRPTGTTAVLFQTKQKWPLVWLHTPHPATSLRPWGQLLANAVIILDKYSLQHYGQVCKSFHHNISNQALTYYLHTSDQSSVAILLQHSHRFHNLGAQPSGPWRSLLQMPQIFQNIDVLRPPFTISPVVINHAPCLFSDGSASKAAFIIWDRQVIHQQVLSLPSTCSAQAGELFGLLAGLQKSQPWVALNIFLDSKFLIGHLRRMAWGAFPGPSTQCELHTQLLPLLQGKTVYVHHVRSHTLLQDPISRLNEATDALMLAPLLPLAGKRTADGSEFEKRTADGSEFESPKKKAKVE

SEQ ID NO: 1516 - protein, 2006 aa, synthetic construct
MPAAKRVKLDGGDKKYSIGLDIGTNSVGWAVITDEYKVPSKKFKVLGNTDRHSIKKNLIGALLFDSGETAEATRLKRTARRRYTRRKNRICYLQEIFSNEMAKVDDSFFHRLEESFLVEEDKKHERHPIFGNIVDEVAYHEKYPTIYHLRKKLVDSTDKADLRLIYLALAHMIKFRGHFLIEGDLNPDNSDVDKLFIQLVQTYNQLFEENPINASGVDAKAILSARLSKSRRLENLIAQLPGEKKNGLFGNLIALSLGLTPNFKSNFDLAEDAKLQLSKDTYDDDLDNLLAQIGDQYADLFLAAKNLSDAILLSDILRVNTEITKAPLSASMIKRYDEHHQDLTLLKALVRQQLPEKYKEIFFDQSKNGYAGYIDGGASQEEFYKFIKPILEKMDGTEELLVKLNREDLLRKQRTFDNGSIPHQIHLGELHAILRRQEDFYPFLKDNREKIEKILTFRIPYYVGPLARGNSRFAWMTRKSEETITPWNFEEVVDKGASAQSFIERMTNFDKNLPNEKVLPKHSLLYEYFTVYNELTKVKYVTEGMRKPAFLSGEQKKAIVDLLFKTNRKVTVKQLKEDYFKKIECFDSVEISGVEDRFNASLGTYHDLLKIIKDKDFLDNEENEDILEDIVLTLTLFEDREMIEERLKTYAHLFDDKVMKQLKRRRYTGWGRLSRKLINGIRDKQSGKTILDFLKSDGFANRNFMQLIHDDSLTFKEDIQKAQVSGQGDSLHEHIANLAGSPAIKKGILQTVKVVDELVKVMGRHKPENIVIEMARENQTTQKGQKNSRERMKRIEEGIKELGSQILKEHPVENTQLQNEKLYLYYLQNGRDMYVDQELDINRLSDYDVDHIVPQSFLKDDSIDNKVLTRSDKARGKSDNVPSEEVVKKMKNYWRQLLNAKLITQRKFDNLTKAERGGLSELDKAGFIKRQLVETRQITKHVAQILDSRMNTKYDENDKLIREVKVITLKSKLVSDFRKDFQFYKVREINNYHHAHDAYLNAVVGTALIKKYPKLESEFVYGDYKVYDVRKMIAKSEQEIGKATAKYFFYSNIMNFFKTEITLANGEIRKRPLIETNGETGEIVWDKGRDFATVRKVLSMPQVNIVKKTEVQTGGFSKESILPKRNSDKLIARKKDWDPKKYGGFDSPTVAYSVLVVAKVEKGKSKKLKSVKELLGITIMERSSFEKNPIDFLEAKGYKEVKKDLIIKLPKYSLFELENGRKRMLASAGELQKGNELALPSKYVNFLYLASHYEKLKGSPEDNEQKQLFVEQHKHYLDEIIEQISEFSKRVILADANLDKVLSAYNKHRDKPIREQAENIIHLFTLTNLGAPAAFKYFDTTIDRKRYTSTKEVLDATLIHQSITGLYETRIDLSQLGGDGGGGSEAAAKGGGLEHLPPPPEVSQFPLNPERLQALTDLVSRALEAKHIEPYQGPGNNPIFPVKKPNGKWRFIHDLRATNSVTRDLASPSPGPPDLTSPPQGLPHLRTIDLTDAFFQIPLPTIFQPYFAFTLPQPNNYGPGTRYSWRVLPQGFKNSPTLFQQQLSHILTPVRKTFPNSLIIQYMDDILLASPAPGELAALTDKVTNALTKEGLPLSPEKTQATPGPIHFLGQVISQDCITYETLPSINVKSTWSLAELQSMLGELQWVSKGTPVLRSSLHQLYLALRGHRDPRDTIKLTSIQVQALRTIQKALTLNCRSRLVNQLPILALIMLRPTGTTAVLFQTKQKWPLVWLHTPHPATSLRPWGQLLANAVIILDKYSLQHYGQVCKSFHHNISNQALTYYLHTSDQSSVAILLQHSHRFHNLGAQPSGPWRSLLQMPQIFQNIDVLRPPFTISPVVINHAPCLFSDGSASKAAFIIWDRQVIHQQVLSLPSTCSAQAGELFGLLAGLQKSQPWVALNIFLDSKFLIGHLRRMAWGAFPGPSTQCELHTQLLPLLQGKTVYVHHVRSHTLLQDPISRLNEATDALMLAPLLPLAGKRTADGSEFEKRTADGSEFESPKKKAKVE

SEQ ID NO: 1517 - protein, 2009 aa, synthetic construct
MPAAKRVKLDGGDKKYSIGLDIGTNSVGWAVITDEYKVPSKKFKVLGNTDRHSIKKNLIGALLFDSGETAEATRLKRTARRRYTRRKNRICYLQEIFSNEMAKVDDSFFHRLEESFLVEEDKKHERHPIFGNIVDEVAYHEKYPTIYHLRKKLVDSTDKADLRLIYLALAHMIKFRGHFLIEGDLNPDNSDVDKLFIQLVQTYNQLFEENPINASGVDAKAILSARLSKSRRLENLIAQLPGEKKNGLFGNLIALSLGLTPNFKSNFDLAEDAKLQLSKDTYDDDLDNLLAQIGDQYADLFLAAKNLSDAILLSDILRVNTEITKAPLSASMIKRYDEHHQDLTLLKALVRQQLPEKYKEIFFDQSKNGYAGYIDGGASQEEFYKFIKPILEKMDGTEELLVKLNREDLLRKQRTFDNGSIPHQIHLGELHAILRRQEDFYPFLKDNREKIEKILTFRIPYYVGPLARGNSRFAWMTRKSEETITPWNFEEVVDKGASAQSFIERMTNFDKNLPNEKVLPKHSLLYEYFTVYNELTKVKYVTEGMRKPAFLSGEQKKAIVDLLFKTNRKVTVKQLKEDYFKKIECFDSVEISGVEDRFNASLGTYHDLLKIIKDKDFLDNEENEDILEDIVLTLTLFEDREMIEERLKTYAHLFDDKVMKQLKRRRYTGWGRLSRKLINGIRDKQSGKTILDFLKSDGFANRNFMQLIHDDSLTFKEDIQKAQVSGQGDSLHEHIANLAGSPAIKKGILQTVKVVDELVKVMGRHKPENIVIEMARENQTTQKGQKNSRERMKRIEEGIKELGSQILKEHPVENTQLQNEKLYLYYLQNGRDMYVDQELDINRLSDYDVDHIVPQSFLKDDSIDNKVLTRSDKARGKSDNVPSEEVVKKMKNYWRQLLNAKLITQRKFDNLTKAERGGLSELDKAGFIKRQLVETRQITKHVAQILDSRMNTKYDENDKLIREVKVITLKSKLVSDFRKDFQFYKVREINNYHHAHDAYLNAVVGTALIKKYPKLESEFVYGDYKVYDVRKMIAKSEQEIGKATAKYFFYSNIMNFFKTEITLANGEIRKRPLIETNGETGEIVWDKGRDFATVRKVLSMPQVNIVKKTEVQTGGFSKESILPKRNSDKLIARKKDWDPKKYGGFDSPTVAYSVLVVAKVEKGKSKKLKSVKELLGITIMERSSFEKNPIDFLEAKGYKEVKKDLIIKLPKYSLFELENGRKRMLASAGELQKGNELALPSKYVNFLYLASHYEKLKGSPEDNEQKQLFVEQHKHYLDEIIEQISEFSKRVILADANLDKVLSAYNKHRDKPIREQAENIIHLFTLTNLGAPAAFKYFDTTIDRKRYTSTKEVLDATLIHQSITGLYETRIDLSQLGGDGGPAPEAAAKGSSGGGLEHLPPPPEVSQFPLNPERLQALTDLVSRALEAKHIEPYQGPGNNPIFPVKKPNGKWRFIHDLRATNSVTRDLASPSPGPPDLTSPPQGLPHLRTIDLTDAFFQIPLPTIFQPYFAFTLPQPNNYGPGTRYSWRVLPQGFKNSPTLFQQQLSHILTPVRKTFPNSLIIQYMDDILLASPAPGELAALTDKVTNALTKEGLPLSPEKTQATPGPIHFLGQVISQDCITYETLPSINVKSTWSLAELQSMLGELQWVSKGTPVLRSSLHQLYLALRGHRDPRDTIKLTSIQVQALRTIQKALTLNCRSRLVNQLPILALIMLRPTGTTAVLFQTKQKWPLVWLHTPHPATSLRPWGQLLANAVIILDKYSLQHYGQVCKSFHHNISNQALTYYLHTSDQSSVAILLQHSHRFHNLGAQPSGPWRSLLQMPQIFQNIDVLRPPFTISPVVINHAPCLFSDGSASKAAFIIWDRQVIHQQVLSLPSTCSAQAGELFGLLAGLQKSQPWVALNIFLDSKFLIGHLRRMAWGAFPGPSTQCELHTQLLPLLQGKTVYVHHVRSHTLLQDPISRLNEATDALMLAPLLPLAGKRTADGSEFEKRTADGSEFESPKKKAKVE

SEQ ID NO: 1518 - protein, 2007 aa, synthetic construct
MPAAKRVKLDGGDKKYSIGLDIGTNSVGWAVITDEYKVPSKKFKVLGNTDRHSIKKNLIGALLFDSGETAEATRLKRTARRRYTRRKNRICYLQEIFSNEMAKVDDSFFHRLEESFLVEEDKKHERHPIFGNIVDEVAYHEKYPTIYHLRKKLVDSTDKADLRLIYLALAHMIKFRGHFLIEGDLNPDNSDVDKLFIQLVQTYNQLFEENPINASGVDAKAILSARLSKSRRLENLIAQLPGEKKNGLFGNLIALSLGLTPNFKSNFDLAEDAKLQLSKDTYDDDLDNLLAQIGDQYADLFLAAKNLSDAILLSDILRVNTEITKAPLSASMIKRYDEHHQDLTLLKALVRQQLPEKYKEIFFDQSKNGYAGYIDGGASQEEFYKFIKPILEKMDGTEELLVKLNREDLLRKQRTFDNGSIPHQIHLGELHAILRRQEDFYPFLKDNREKIEKILTFRIPYYVGPLARGNSRFAWMTRKSEETITPWNFEEVVDKGASAQSFIERMTNFDKNLPNEKVLPKHSLLYEYFTVYNELTKVKYVTEGMRKPAFLSGEQKKAIVDLLFKTNRKVTVKQLKEDYFKKIECFDSVEISGVEDRFNASLGTYHDLLKIIKDKDFLDNEENEDILEDIVLTLTLFEDREMIEERLKTYAHLFDDKVMKQLKRRRYTGWGRLSRKLINGIRDKQSGKTILDFLKSDGFANRNFMQLIHDDSLTFKEDIQKAQVSGQGDSLHEHIANLAGSPAIKKGILQTVKVVDELVKVMGRHKPENIVIEMARENQTTQKGQKNSRERMKRIEEGIKELGSQILKEHPVENTQLQNEKLYLYYLQNGRDMYVDQELDINRLSDYDVDHIVPQSFLKDDSIDNKVLTRSDKARGKSDNVPSEEVVKKMKNYWRQLLNAKLITQRKFDNLTKAERGGLSELDKAGFIKRQLVETRQITKHVAQILDSRMNTKYDENDKLIREVKVITLKSKLVSDFRKDFQFYKVREINNYHHAHDAYLNAVVGTALIKKYPKLESEFVYGDYKVYDVRKMIAKSEQEIGKATAKYFFYSNIMNFFKTEITLANGEIRKRPLIETNGETGEIVWDKGRDFATVRKVLSMPQVNIVKKTEVQTGGFSKESILPKRNSDKLIARKKDWDPKKYGGFDSPTVAYSVLVVAKVEKGKSKKLKSVKELLGITIMERSSFEKNPIDFLEAKGYKEVKKDLIIKLPKYSLFELENGRKRMLASAGELQKGNELALPSKYVNFLYLASHYEKLKGSPEDNEQKQLFVEQHKHYLDEIIEQISEFSKRVILADANLDKVLSAYNKHRDKPIREQAENIIHLFTLTNLGAPAAFKYFDTTIDRKRYTSTKEVLDATLIHQSITGLYETRIDLSQLGGDGGGGGGSSGGSGGGLEHLPPPPEVSQFPLNPERLQALTDLVSRALEAKHIEPYQGPGNNPIFPVKKPNGKWRFIHDLRATNSLTRDLASPSPGPPDLTSLPQDLPHLRTIDLTDAFFQIPLPAVFQPYFAFTLPQPNNHGPGTRYSWRVLPQGFKNSPTLFEQQLSHILAPVRKAFPNSLIIQYMDDILLASPALRELTALTDKVTNALTKEGLPMSLEKTQATPGSIHFLGQVISPDCITYETLPSIHVKSIWSLAELQSMLGELQWVSKGTPVLRSSLHQLYLALRGHRDPRDTIELTSTQVQALKTIQKALALNCRSRLVSQLPILALIILRPTGTTAVLFQTKQKWPLVWLHTPHPATSLRPWGQLLANAIITLDKYSLQHYGQICKSFHHNISNQALTYYLHTSDQSSVAILLQHSHRFHNLGAQPSGPWRSLLQVPQIFQNIDVLRPPFIISPVVIDHAPCLFSDGATSKAAFILWDKQVIHQQVLPLPSTCSAQAGELFGLLAGLQKSKPWPALNIFLDSKFLIGHLRRMALGAFLGPSTQCDLHARLFPLLQGKTVYVHHVRSHTLLQDPISRLNEATDALMLAPLLPLAGKRTADGSEFEKRTADGSEFESPKKKAKVE

SEQ ID NO: 1519 - protein, 2007 aa, synthetic construct
MPAAKRVKLDGGDKKYSIGLDIGTNSVGWAVITDEYKVPSKKFKVLGNTDRHSIKKNLIGALLFDSGETAEATRLKRTARRRYTRRKNRICYLQEIFSNEMAKVDDSFFHRLEESFLVEEDKKHERHPIFGNIVDEVAYHEKYPTIYHLRKKLVDSTDKADLRLIYLALAHMIKFRGHFLIEGDLNPDNSDVDKLFIQLVQTYNQLFEENPINASGVDAKAILSARLSKSRRLENLIAQLPGEKKNGLFGNLIALSLGLTPNFKSNFDLAEDAKLQLSKDTYDDDLDNLLAQIGDQYADLFLAAKNLSDAILLSDILRVNTEITKAPLSASMIKRYDEHHQDLTLLKALVRQQLPEKYKEIFFDQSKNGYAGYIDGGASQEEFYKFIKPILEKMDGTEELLVKLNREDLLRKQRTFDNGSIPHQIHLGELHAILRRQEDFYPFLKDNREKIEKILTFRIPYYVGPLARGNSRFAWMTRKSEETITPWNFEEVVDKGASAQSFIERMTNFDKNLPNEKVLPKHSLLYEYFTVYNELTKVKYVTEGMRKPAFLSGEQKKAIVDLLFKTNRKVTVKQLKEDYFKKIECFDSVEISGVEDRFNASLGTYHDLLKIIKDKDFLDNEENEDILEDIVLTLTLFEDREMIEERLKTYAHLFDDKVMKQLKRRRYTGWGRLSRKLINGIRDKQSGKTILDFLKSDGFANRNFMQLIHDDSLTFKEDIQKAQVSGQGDSLHEHIANLAGSPAIKKGILQTVKVVDELVKVMGRHKPENIVIEMARENQTTQKGQKNSRERMKRIEEGIKELGSQILKEHPVENTQLQNEKLYLYYLQNGRDMYVDQELDINRLSDYDVDHIVPQSFLKDDSIDNKVLTRSDKARGKSDNVPSEEVVKKMKNYWRQLLNAKLITQRKFDNLTKAERGGLSELDKAGFIKRQLVETRQITKHVAQILDSRMNTKYDENDKLIREVKVITLKSKLVSDFRKDFQFYKVREINNYHHAHDAYLNAVVGTALIKKYPKLESEFVYGDYKVYDVRKMIAKSEQEIGKATAKYFFYSNIMNFFKTEITLANGEIRKRPLIETNGETGEIVWDKGRDFATVRKVLSMPQVNIVKKTEVQTGGFSKESILPKRNSDKLIARKKDWDPKKYGGFDSPTVAYSVLVVAKVEKGKSKKLKSVKELLGITIMERSSFEKNPIDFLEAKGYKEVKKDLIIKLPKYSLFELENGRKRMLASAGELQKGNELALPSKYVNFLYLASHYEKLKGSPEDNEQKQLFVEQHKHYLDEIIEQISEFSKRVILADANLDKVLSAYNKHRDKPIREQAENIIHLFTLTNLGAPAAFKYFDTTIDRKRYTSTKEVLDATLIHQSITGLYETRIDLSQLGGDGGGGGGSSPAPGGGLEHLPPPPEVSQFPLNPERLQALTDLVSRALEAKHIEPYQGPGNNPIFPVKKPNGKWRFIHDLRATNSLTRDLASPSPGPPDLTSLPQDLPHLRTIDLTDAFFQIPLPAVFQPYFAFTLPQPNNHGPGTRYSWRVLPQGFKNSPTLFQQQLSHILAPVRKAFPNSLIIQYMDDILLASPALRELTALTDKVTNALTKEGLPMSLEKTQATPGSIHFLGQVISPDCITYETLPSIHVKSIWSLAELQSMLGELQWVSKGTPVLRSSLHQLYLALRGHRDPRDTIELTSTQVQALKTIQKALALNCRSRLVSQLPILALIILRPTGTTAVLFQTKQKWPLVWLHTPHPATSLRPWGQLLANAIITLDKYSLQHYGQICKSFHHNISNQALTYYLHTSDQSSVAILLQHSHRFHNLGAQPSGPWRSLLQVPQIFQNIDVLRPPFIISPVVIDHAPCLFSDGATSKAAFILWDKQVIHQQVLPLPSTCSAQAGELFGLLAGLQKSKPWPALNIFLDSKFLIGHLRRMAWGAFLGPSTQCDLHARLFPLLQGKTVYVHHVRSHTLLQDPISRLNEATDALMLAPLLPLAGKRTADGSEFEKRTADGSEFESPKKKAKVE

SEQ ID NO: 1520 - protein, 2009 aa, synthetic construct
MPAAKRVKLDGGDKKYSIGLDIGTNSVGWAVITDEYKVPSKKFKVLGNTDRHSIKKNLIGALLFDSGETAEATRLKRTARRRYTRRKNRICYLQEIFSNEMAKVDDSFFHRLEESFLVEEDKKHERHPIFGNIVDEVAYHEKYPTIYHLRKKLVDSTDKADLRLIYLALAHMIKFRGHFLIEGDLNPDNSDVDKLFIQLVQTYNQLFEENPINASGVDAKAILSARLSKSRRLENLIAQLPGEKKNGLFGNLIALSLGLTPNFKSNFDLAEDAKLQLSKDTYDDDLDNLLAQIGDQYADLFLAAKNLSDAILLSDILRVNTEITKAPLSASMIKRYDEHHQDLTLLKALVRQQLPEKYKEIFFDQSKNGYAGYIDGGASQEEFYKFIKPILEKMDGTEELLVKLNREDLLRKQRTFDNGSIPHQIHLGELHAILRRQEDFYPFLKDNREKIEKILTFRIPYYVGPLARGNSRFAWMTRKSEETITPWNFEEVVDKGASAQSFIERMTNFDKNLPNEKVLPKHSLLYEYFTVYNELTKVKYVTEGMRKPAFLSGEQKKAIVDLLFKTNRKVTVKQLKEDYFKKIECFDSVEISGVEDRFNASLGTYHDLLKIIKDKDFLDNEENEDILEDIVLTLTLFEDREMIEERLKTYAHLFDDKVMKQLKRRRYTGWGRLSRKLINGIRDKQSGKTILDFLKSDGFANRNFMQLIHDDSLTFKEDIQKAQVSGQGDSLHEHIANLAGSPAIKKGILQTVKVVDELVKVMGRHKPENIVIEMARENQTTQKGQKNSRERMKRIEEGIKELGSQILKEHPVENTQLQNEKLYLYYLQNGRDMYVDQELDINRLSDYDVDHIVPQSFLKDDSIDNKVLTRSDKARGKSDNVPSEEVVKKMKNYWRQLLNAKLITQRKFDNLTKAERGGLSELDKAGFIKRQLVETRQITKHVAQILDSRMNTKYDENDKLIREVKVITLKSKLVSDFRKDFQFYKVREINNYHHAHDAYLNAVVGTALIKKYPKLESEFVYGDYKVYDVRKMIAKSEQEIGKATAKYFFYSNIMNFFKTEITLANGEIRKRPLIETNGETGEIVWDKGRDFATVRKVLSMPQVNIVKKTEVQTGGFSKESILPKRNSDKLIARKKDWDPKKYGGFDSPTVAYSVLVVAKVEKGKSKKLKSVKELLGITIMERSSFEKNPIDFLEAKGYKEVKKDLIIKLPKYSLFELENGRKRMLASAGELQKGNELALPSKYVNFLYLASHYEKLKGSPEDNEQKQLFVEQHKHYLDEIIEQISEFSKRVILADANLDKVLSAYNKHRDKPIREQAENIIHLFTLTNLGAPAAFKYFDTTIDRKRYTSTKEVLDATLIHQSITGLYETRIDLSQLGGDGGPAPEAAAKGGGGGGLEHLPPPPEVSQFPLNPERLQALTDLVSRALEAKHIEPYQGPGNNPIFPVKKPNGKWRFIHDLRATNSLTRDLASPSPGPPDLTSLPQDLPHLRTIDLTDAFFQIPLPAVFQPYFAFTLPQPNNHGPGTRYSWRVLPQGFKNSPTLFQQQLSHILAPVRKAFPNSLIIQYMDDILLASPALRELTALTDKVTNALTKEGLPMSLEKTQATPGSIHFLGQVISPDCITYETLPSIHVKSIWSLAELQSMLGELQWVSKGTPVLRSSLHQLYLALRGHRDPRDTIELTSTQVQALKTIQKALALNCRSRLVSQLPILALIILRPTGTTAVLFQTKQKWPLVWLHTPHPATSLRPWGQLLANAIITLDKYSLQHYGQICKSFHHNISNQALTYYLHTSDQSSVAILLQHSHRFHNLGAQPSGPWRSLLQVPQIFQNIDVLRPPFIISPVVIDHAPCLFSDGATSKAAFILWDKQVIHQQVLPLPSTCSAQAGELFGLLAGLQKSKPWPALNIFLDSKFLIGHLRRMAWGAFLGPSTQCDLHARLFPLLQGKTVYVHHVRSHTLLQDPISRLNEATDALMLAPLLPLAGKRTADGSEFEKRTADGSEFESPKKKAKVE

SEQ ID NO: 1521 - protein, 2023 aa, synthetic construct
MPAAKRVKLDGGDKKYSIGLDIGTNSVGWAVITDEYKVPSKKFKVLGNTDRHSIKKNLIGALLFDSGETAEATRLKRTARRRYTRRKNRICYLQEIFSNEMAKVDDSFFHRLEESFLVEEDKKHERHPIFGNIVDEVAYHEKYPTIYHLRKKLVDSTDKADLRLIYLALAHMIKFRGHFLIEGDLNPDNSDVDKLFIQLVQTYNQLFEENPINASGVDAKAILSARLSKSRRLENLIAQLPGEKKNGLFGNLIALSLGLTPNFKSNFDLAEDAKLQLSKDTYDDDLDNLLAQIGDQYADLFLAAKNLSDAILLSDILRVNTEITKAPLSASMIKRYDEHHQDLTLLKALVRQQLPEKYKEIFFDQSKNGYAGYIDGGASQEEFYKFIKPILEKMDGTEELLVKLNREDLLRKQRTFDNGSIPHQIHLGELHAILRRQEDFYPFLKDNREKIEKILTFRIPYYVGPLARGNSRFAWMTRKSEETITPWNFEEVVDKGASAQSFIERMTNFDKNLPNEKVLPKHSLLYEYFTVYNELTKVKYVTEGMRKPAFLSGEQKKAIVDLLFKTNRKVTVKQLKEDYFKKIECFDSVEISGVEDRFNASLGTYHDLLKIIKDKDFLDNEENEDILEDIVLTLTLFEDREMIEERLKTYAHLFDDKVMKQLKRRRYTGWGRLSRKLINGIRDKQSGKTILDFLKSDGFANRNFMQLIHDDSLTFKEDIQKAQVSGQGDSLHEHIANLAGSPAIKKGILQTVKVVDELVKVMGRHKPENIVIEMARENQTTQKGQKNSRERMKRIEEGIKELGSQILKEHPVENTQLQNEKLYLYYLQNGRDMYVDQELDINRLSDYDVDHIVPQSFLKDDSIDNKVLTRSDKARGKSDNVPSEEVVKKMKNYWRQLLNAKLITQRKFDNLTKAERGGLSELDKAGFIKRQLVETRQITKHVAQILDSRMNTKYDENDKLIREVKVITLKSKLVSDFRKDFQFYKVREINNYHHAHDAYLNAVVGTALIKKYPKLESEFVYGDYKVYDVRKMIAKSEQEIGKATAKYFFYSNIMNFFKTEITLANGEIRKRPLIETNGETGEIVWDKGRDFATVRKVLSMPQVNIVKKTEVQTGGFSKESILPKRNSDKLIARKKDWDPKKYGGFDSPTVAYSVLVVAKVEKGKSKKLKSVKELLGITIMERSSFEKNPIDFLEAKGYKEVKKDLIIKLPKYSLFELENGRKRMLASAGELQKGNELALPSKYVNFLYLASHYEKLKGSPEDNEQKQLFVEQHKHYLDEIIEQISEFSKRVILADANLDKVLSAYNKHRDKPIREQAENIIHLFTLTNLGAPAAFKYFDTTIDRKRYTSTKEVLDATLIHQSITGLYETRIDLSQLGGDGGGGGGSGGGGSGGGGSGGGGSGGGGSGGGLEHLPPPPEVSQFPLNPERLQALTDLVSRALEAKHIEPYQGPGNNPIFPVKKPNGKWRFIHDLRATNSLTRDLASPSPGPPDLTSLPQDLPHLRTIDLTDAFFQIPLPAVFQPYFAFTLPQPNNHGPGTRYSWRVLPQGFKNSPTLFQQQLSHILAPVRKAFPNSLIIQYMDDILLASPALRELTALTDKVTNALTKEGLPMSLEKTQATPGSIHFLGQVISPDCITYETLPSIHVKSIWSLAELQSMLGELQWVSKGTPVLRSSLHQLYLALRGHRDPRDTIELTSTQVQALKTIQKALALNCRSRLVSQLPILALIILRPTGTTAVLFQTKQKWPLVWLHTPHPATSLRPWGQLLANAIITLDKYSLQHYGQICKSFHHNISNQALTYYLHTSDQSSVAILLQHSHRFHNLGAQPSGPWRSLLQVPQIFQNIDVLRPPFIISPVVIDHAPCLFSDGATSKAAFILWDKQVIHQQVLPLPSTCSAQAGELFGLLAGLQKSKPWPALNIFLDSKFLIGHLRRMAWGAFLGPSTQCDLHARLFPLLQGKTVYVHHVRSHTLLQDPISRLNEATDALMLAPLLPLAGKRTADGSEFEKRTADGSEFESPKKKAKVE

SEQ ID NO: 1522 - protein, 2006 aa, synthetic construct
MPAAKRVKLDGGDKKYSIGLDIGTNSVGWAVITDEYKVPSKKFKVLGNTDRHSIKKNLIGALLFDSGETAEATRLKRTARRRYTRRKNRICYLQEIFSNEMAKVDDSFFHRLEESFLVEEDKKHERHPIFGNIVDEVAYHEKYPTIYHLRKKLVDSTDKADLRLIYLALAHMIKFRGHFLIEGDLNPDNSDVDKLFIQLVQTYNQLFEENPINASGVDAKAILSARLSKSRRLENLIAQLPGEKKNGLFGNLIALSLGLTPNFKSNFDLAEDAKLQLSKDTYDDDLDNLLAQIGDQYADLFLAAKNLSDAILLSDILRVNTEITKAPLSASMIKRYDEHHQDLTLLKALVRQQLPEKYKEIFFDQSKNGYAGYIDGGASQEEFYKFIKPILEKMDGTEELLVKLNREDLLRKQRTFDNGSIPHQIHLGELHAILRRQEDFYPFLKDNREKIEKILTFRIPYYVGPLARGNSRFAWMTRKSEETITPWNFEEVVDKGASAQSFIERMTNFDKNLPNEKVLPKHSLLYEYFTVYNELTKVKYVTEGMRKPAFLSGEQKKAIVDLLFKTNRKVTVKQLKEDYFKKIECFDSVEISGVEDRFNASLGTYHDLLKIIKDKDFLDNEENEDILEDIVLTLTLFEDREMIEERLKTYAHLFDDKVMKQLKRRRYTGWGRLSRKLINGIRDKQSGKTILDFLKSDGFANRNFMQLIHDDSLTFKEDIQKAQVSGQGDSLHEHIANLAGSPAIKKGILQTVKVVDELVKVMGRHKPENIVIEMARENQTTQKGQKNSRERMKRIEEGIKELGSQILKEHPVENTQLQNEKLYLYYLQNGRDMYVDQELDINRLSDYDVDHIVPQSFLKDDSIDNKVLTRSDKARGKSDNVPSEEVVKKMKNYWRQLLNAKLITQRKFDNLTKAERGGLSELDKAGFIKRQLVETRQITKHVAQILDSRMNTKYDENDKLIREVKVITLKSKLVSDFRKDFQFYKVREINNYHHAHDAYLNAVVGTALIKKYPKLESEFVYGDYKVYDVRKMIAKSEQEIGKATAKYFFYSNIMNFFKTEITLANGEIRKRPLIETNGETGEIVWDKGRDFATVRKVLSMPQVNIVKKTEVQTGGFSKESILPKRNSDKLIARKKDWDPKKYGGFDSPTVAYSVLVVAKVEKGKSKKLKSVKELLGITIMERSSFEKNPIDFLEAKGYKEVKKDLIIKLPKYSLFELENGRKRMLASAGELQKGNELALPSKYVNFLYLASHYEKLKGSPEDNEQKQLFVEQHKHYLDEIIEQISEFSKRVILADANLDKVLSAYNKHRDKPIREQAENIIHLFTLTNLGAPAAFKYFDTTIDRKRYTSTKEVLDATLIHQSITGLYETRIDLSQLGGDGGEAAAKGGSGGGLEHLPPPPEVSQFPLNPERLQALTDLVSRALEAKHIEPYQGPGNNPIFPVKKPNGKWRFIHDLRATNSLTRDLASPSPGPPDLTSLPQDLPHLRTIDLTDAFFQIPLPAVFQPYFAFTLPQPNNHGPGTRYSWRVLPQGFKNSPTLFQQQLSHILAPVRKAFPNSLIIQYMDDILLASPALRELTALTDKVTNALTKEGLPMSLEKTQATPGSIHFLGQVISPDCITYETLPSIHVKSIWSLAELQSMLGELQWVSKGTPVLRSSLHQLYLALRGHRDPRDTIELTSTQVQALKTIQKALALNCRSRLVSQLPILALIILRPTGTTAVLFQTKQKWPLVWLHTPHPATSLRPWGQLLANAIITLDKYSLQHYGQICKSFHHNISNQALTYYLHTSDQSSVAILLQHSHRFHNLGAQPSGPWRSLLQVPQIFQNIDVLRPPFIISPVVIDHAPCLFSDGATSKAAFILWDKQVIHQQVLPLPSTCSAQAGELFGLLAGLQKSKPWPALNIFLDSKFLIGHLRRMAWGAFLGPSTQCDLHARLFPLLQGKTVYVHHVRSHTLLQDPISRLNEATDALMLAPLLPLAGKRTADGSEFEKRTADGSEFESPKKKAKVE

SEQ ID NO: 1523 - protein, 2007 aa, synthetic construct
MPAAKRVKLDGGDKKYSIGLDIGTNSVGWAVITDEYKVPSKKFKVLGNTDRHSIKKNLIGALLFDSGETAEATRLKRTARRRYTRRKNRICYLQEIFSNEMAKVDDSFFHRLEESFLVEEDKKHERHPIFGNIVDEVAYHEKYPTIYHLRKKLVDSTDKADLRLIYLALAHMIKFRGHFLIEGDLNPDNSDVDKLFIQLVQTYNQLFEENPINASGVDAKAILSARLSKSRRLENLIAQLPGEKKNGLFGNLIALSLGLTPNFKSNFDLAEDAKLQLSKDTYDDDLDNLLAQIGDQYADLFLAAKNLSDAILLSDILRVNTEITKAPLSASMIKRYDEHHQDLTLLKALVRQQLPEKYKEIFFDQSKNGYAGYIDGGASQEEFYKFIKPILEKMDGTEELLVKLNREDLLRKQRTFDNGSIPHQIHLGELHAILRRQEDFYPFLKDNREKIEKILTFRIPYYVGPLARGNSRFAWMTRKSEETITPWNFEEVVDKGASAQSFIERMTNFDKNLPNEKVLPKHSLLYEYFTVYNELTKVKYVTEGMRKPAFLSGEQKKAIVDLLFKTNRKVTVKQLKEDYFKKIECFDSVEISGVEDRFNASLGTYHDLLKIIKDKDFLDNEENEDILEDIVLTLTLFEDREMIEERLKTYAHLFDDKVMKQLKRRRYTGWGRLSRKLINGIRDKQSGKTILDFLKSDGFANRNFMQLIHDDSLTFKEDIQKAQVSGQGDSLHEHIANLAGSPAIKKGILQTVKVVDELVKVMGRHKPENIVIEMARENQTTQKGQKNSRERMKRIEEGIKELGSQILKEHPVENTQLQNEKLYLYYLQNGRDMYVDQELDINRLSDYDVDHIVPQSFLKDDSIDNKVLTRSDKARGKSDNVPSEEVVKKMKNYWRQLLNAKLITQRKFDNLTKAERGGLSELDKAGFIKRQLVETRQITKHVAQILDSRMNTKYDENDKLIREVKVITLKSKLVSDFRKDFQFYKVREINNYHHAHDAYLNAVVGTALIKKYPKLESEFVYGDYKVYDVRKMIAKSEQEIGKATAKYFFYSNIMNFFKTEITLANGEIRKRPLIETNGETGEIVWDKGRDFATVRKVLSMPQVNIVKKTEVQTGGFSKESILPKRNSDKLIARKKDWDPKKYGGFDSPTVAYSVLVVAKVEKGKSKKLKSVKELLGITIMERSSFEKNPIDFLEAKGYKEVKKDLIIKLPKYSLFELENGRKRMLASAGELQKGNELALPSKYVNFLYLASHYEKLKGSPEDNEQKQLFVEQHKHYLDEIIEQISEFSKRVILADANLDKVLSAYNKHRDKPIREQAENIIHLFTLTNLGAPAAFKYFDTTIDRKRYTSTKEVLDATLIHQSITGLYETRIDLSQLGGDGGGGGGSSGGSGGGLEHLPPPPEVSQFPLNPERLQALTDLVSRALEAKHIEPYQGPGNNPIFPVKKPNGKWRFIHDLRATNSLTRDLASPSPGPPDLTSLPQDLPHLRTIDLTDAFFQIPLPAVFQPYFAFTLPQPNNHGPGTRYSWRVLPQGFKNSPTLFQQQLSHILAPVRKAFPNSLIIQYMDDILLASPALRELTALTDKVTNALTKEGLPMSLEKTQATPGSIHFLGQVISPDCITYETLPSIHVKSIWSLAELQSMLGELQWVSKGTPVLRSSLHQLYLALRGHRDPRDTIELTSTQVQALKTIQKALALNCRSRLVSQLPILALIILRPTGTTAVLFQTKQKWPLVWLHTPHPATSLRPWGQLLANAIITLDKYSLQHYGQICKSFHHNISNQALTYYLHTSDQSSVAILLQHSHRFHNLGAQPSGPWRSLLQVPQIFQNIDVLRPPFIISPVVIDHAPCLFSDGATSKAAFILWDKQVIHQQVLPLPSTCSAQAGELFGLLAGLQKSKPWPALNIFLDSKFLIGHLRRMAWGAFLGPSTQCDLHARLFPLLQGKTVYVHHVRSHTLLQDPISRLNEATDALMLAPLLPLAGKRTADGSEFEKRTADGSEFESPKKKAKVE

SEQ ID NO: 1524 - protein, 2009 aa, synthetic construct
MPAAKRVKLDGGDKKYSIGLDIGTNSVGWAVITDEYKVPSKKFKVLGNTDRHSIKKNLIGALLFDSGETAEATRLKRTARRRYTRRKNRICYLQEIFSNEMAKVDDSFFHRLEESFLVEEDKKHERHPIFGNIVDEVAYHEKYPTIYHLRKKLVDSTDKADLRLIYLALAHMIKFRGHFLIEGDLNPDNSDVDKLFIQLVQTYNQLFEENPINASGVDAKAILSARLSKSRRLENLIAQLPGEKKNGLFGNLIALSLGLTPNFKSNFDLAEDAKLQLSKDTYDDDLDNLLAQIGDQYADLFLAAKNLSDAILLSDILRVNTEITKAPLSASMIKRYDEHHQDLTLLKALVRQQLPEKYKEIFFDQSKNGYAGYIDGGASQEEFYKFIKPILEKMDGTEELLVKLNREDLLRKQRTFDNGSIPHQIHLGELHAILRRQEDFYPFLKDNREKIEKILTFRIPYYVGPLARGNSRFAWMTRKSEETITPWNFEEVVDKGASAQSFIERMTNFDKNLPNEKVLPKHSLLYEYFTVYNELTKVKYVTEGMRKPAFLSGEQKKAIVDLLFKTNRKVTVKQLKEDYFKKIECFDSVEISGVEDRFNASLGTYHDLLKIIKDKDFLDNEENEDILEDIVLTLTLFEDREMIEERLKTYAHLFDDKVMKQLKRRRYTGWGRLSRKLINGIRDKQSGKTILDFLKSDGFANRNFMQLIHDDSLTFKEDIQKAQVSGQGDSLHEHIANLAGSPAIKKGILQTVKVVDELVKVMGRHKPENIVIEMARENQTTQKGQKNSRERMKRIEEGIKELGSQILKEHPVENTQLQNEKLYLYYLQNGRDMYVDQELDINRLSDYDVDHIVPQSFLKDDSIDNKVLTRSDKARGKSDNVPSEEVVKKMKNYWRQLLNAKLITQRKFDNLTKAERGGLSELDKAGFIKRQLVETRQITKHVAQILDSRMNTKYDENDKLIREVKVITLKSKLVSDFRKDFQFYKVREINNYHHAHDAYLNAVVGTALIKKYPKLESEFVYGDYKVYDVRKMIAKSEQEIGKATAKYFFYSNIMNFFKTEITLANGEIRKRPLIETNGETGEIVWDKGRDFATVRKVLSMPQVNIVKKTEVQTGGFSKESILPKRNSDKLIARKKDWDPKKYGGFDSPTVAYSVLVVAKVEKGKSKKLKSVKELLGITIMERSSFEKNPIDFLEAKGYKEVKKDLIIKLPKYSLFELENGRKRMLASAGELQKGNELALPSKYVNFLYLASHYEKLKGSPEDNEQKQLFVEQHKHYLDEIIEQISEFSKRVILADANLDKVLSAYNKHRDKPIREQAENIIHLFTLTNLGAPAAFKYFDTTIDRKRYTSTKEVLDATLIHQSITGLYETRIDLSQLGGDGGEAAAKGGSGGGGGGLEHLPPPPEVSQFPLNPERLQALTDLVSRALEAKHIEPYQGPGNNPIFPVKKPNGKWRFIHDLRATNSLTRDLASPSPGPPDLTSLPQDLPHLRTIDLTDAFFQIPLPAVFQPYFAFTLPQPNNHGPGTRYSWRVLPQGFKNSPTLFQQQLSHILAPVRKAFPNSLIIQYMDDILLASPALRELTALTDKVTNALTKEGLPMSLEKTQATPGSIHFLGQVISPDCITYETLPSIHVKSIWSLAELQSMLGELQWVSKGTPVLRSSLHQLYLALRGHRDPRDTIELTSTQVQALKTIQKALALNCRSRLVSQLPILALIILRPTGTTAVLFQTKQKWPLVWLHTPHPATSLRPWGQLLANAIITLDKYSLQHYGQICKSFHHNISNQALTYYLHTSDQSSVAILLQHSHRFHNLGAQPSGPWRSLLQVPQIFQNIDVLRPPFIISPVVIDHAPCLFSDGATSKAAFILWDKQVIHQQVLPLPSTCSAQAGELFGLLAGLQKSKPWPALNIFLDSKFLIGHLRRMAWGAFLGPSTQCDLHARLFPLLQGKTVYVHHVRSHTLLQDPISRLNEATDALMLAPLLPLAGKRTADGSEFEKRTADGSEFESPKKKAKVE

SEQ ID NO: 1525 - protein, 2007 aa, synthetic construct
MPAAKRVKLDGGDKKYSIGLDIGTNSVGWAVITDEYKVPSKKFKVLGNTDRHSIKKNLIGALLFDSGETAEATRLKRTARRRYTRRKNRICYLQEIFSNEMAKVDDSFFHRLEESFLVEEDKKHERHPIFGNIVDEVAYHEKYPTIYHLRKKLVDSTDKADLRLIYLALAHMIKFRGHFLIEGDLNPDNSDVDKLFIQLVQTYNQLFEENPINASGVDAKAILSARLSKSRRLENLIAQLPGEKKNGLFGNLIALSLGLTPNFKSNFDLAEDAKLQLSKDTYDDDLDNLLAQIGDQYADLFLAAKNLSDAILLSDILRVNTEITKAPLSASMIKRYDEHHQDLTLLKALVRQQLPEKYKEIFFDQSKNGYAGYIDGGASQEEFYKFIKPILEKMDGTEELLVKLNREDLLRKQRTFDNGSIPHQIHLGELHAILRRQEDFYPFLKDNREKIEKILTFRIPYYVGPLARGNSRFAWMTRKSEETITPWNFEEVVDKGASAQSFIERMTNFDKNLPNEKVLPKHSLLYEYFTVYNELTKVKYVTEGMRKPAFLSGEQKKAIVDLLFKTNRKVTVKQLKEDYFKKIECFDSVEISGVEDRFNASLGTYHDLLKIIKDKDFLDNEENEDILEDIVLTLTLFEDREMIEERLKTYAHLFDDKVMKQLKRRRYTGWGRLSRKLINGIRDKQSGKTILDFLKSDGFANRNFMQLIHDDSLTFKEDIQKAQVSGQGDSLHEHIANLAGSPAIKKGILQTVKVVDELVKVMGRHKPENIVIEMARENQTTQKGQKNSRERMKRIEEGIKELGSQILKEHPVENTQLQNEKLYLYYLQNGRDMYVDQELDINRLSDYDVDHIVPQSFLKDDSIDNKVLTRSDKARGKSDNVPSEEVVKKMKNYWRQLLNAKLITQRKFDNLTKAERGGLSELDKAGFIKRQLVETRQITKHVAQILDSRMNTKYDENDKLIREVKVITLKSKLVSDFRKDFQFYKVREINNYHHAHDAYLNAVVGTALIKKYPKLESEFVYGDYKVYDVRKMIAKSEQEIGKATAKYFFYSNIMNFFKTEITLANGEIRKRPLIETNGETGEIVWDKGRDFATVRKVLSMPQVNIVKKTEVQTGGFSKESILPKRNSDKLIARKKDWDPKKYGGFDSPTVAYSVLVVAKVEKGKSKKLKSVKELLGITIMERSSFEKNPIDFLEAKGYKEVKKDLIIKLPKYSLFELENGRKRMLASAGELQKGNELALPSKYVNFLYLASHYEKLKGSPEDNEQKQLFVEQHKHYLDEIIEQISEFSKRVILADANLDKVLSAYNKHRDKPIREQAENIIHLFTLTNLGAPAAFKYFDTTIDRKRYTSTKEVLDATLIHQSITGLYETRIDLSQLGGDGGGSSPAPGGGGGGLEHLPPPPEVSQFPLNPERLQALTDLVSRALEAKHIEPYQGPGNNPIFPVKKPNGKWRFIHDLRATNSLTRDLASPSPGPPDLTSLPQDLPHLRTIDLTDAFFQIPLPAVFQPYFAFTLPQPNNHGPGTRYSWRVLPQGFKNSPTLFQQQLSHILAPVRKAFPNSLIIQYMDDILLASPALRELTALTDKVTNALTKEGLPMSLEKTQATPGSIHFLGQVISPDCITYETLPSIHVKSIWSLAELQSMLGELQWVSKGTPVLRSSLHQLYLALRGHRDPRDTIELTSTQVQALKTIQKALALNCRSRLVSQLPILALIILRPTGTTAVLFQTKQKWPLVWLHTPHPATSLRPWGQLLANAIITLDKYSLQHYGQICKSFHHNISNQALTYYLHTSDQSSVAILLQHSHRFHNLGAQPSGPWRSLLQVPQIFQNIDVLRPPFIISPVVIDHAPCLFSDGATSKAAFILWDKQVIHQQVLPLPSTCSAQAGELFGLLAGLQKSKPWPALNIFLDSKFLIGHLRRMAWGAFLGPSTQCDLHARLFPLLQGKTVYVHHVRSHTLLQDPISRLNEATDALMLAPLLPLAGKRTADGSEFEKRTADGSEFESPKKKAKVE

SEQ ID NO: 1526 - protein, 2009 aa, synthetic construct
MPAAKRVKLDGGDKKYSIGLDIGTNSVGWAVITDEYKVPSKKFKVLGNTDRHSIKKNLIGALLFDSGETAEATRLKRTARRRYTRRKNRICYLQEIFSNEMAKVDDSFFHRLEESFLVEEDKKHERHPIFGNIVDEVAYHEKYPTIYHLRKKLVDSTDKADLRLIYLALAHMIKFRGHFLIEGDLNPDNSDVDKLFIQLVQTYNQLFEENPINASGVDAKAILSARLSKSRRLENLIAQLPGEKKNGLFGNLIALSLGLTPNFKSNFDLAEDAKLQLSKDTYDDDLDNLLAQIGDQYADLFLAAKNLSDAILLSDILRVNTEITKAPLSASMIKRYDEHHQDLTLLKALVRQQLPEKYKEIFFDQSKNGYAGYIDGGASQEEFYKFIKPILEKMDGTEELLVKLNREDLLRKQRTFDNGSIPHQIHLGELHAILRRQEDFYPFLKDNREKIEKILTFRIPYYVGPLARGNSRFAWMTRKSEETITPWNFEEVVDKGASAQSFIERMTNFDKNLPNEKVLPKHSLLYEYFTVYNELTKVKYVTEGMRKPAFLSGEQKKAIVDLLFKTNRKVTVKQLKEDYFKKIECFDSVEISGVEDRFNASLGTYHDLLKIIKDKDFLDNEENEDILEDIVLTLTLFEDREMIEERLKTYAHLFDDKVMKQLKRRRYTGWGRLSRKLINGIRDKQSGKTILDFLKSDGFANRNFMQLIHDDSLTFKEDIQKAQVSGQGDSLHEHIANLAGSPAIKKGILQTVKVVDELVKVMGRHKPENIVIEMARENQTTQKGQKNSRERMKRIEEGIKELGSQILKEHPVENTQLQNEKLYLYYLQNGRDMYVDQELDINRLSDYDVDHIVPQSFLKDDSIDNKVLTRSDKARGKSDNVPSEEVVKKMKNYWRQLLNAKLITQRKFDNLTKAERGGLSELDKAGFIKRQLVETRQITKHVAQILDSRMNTKYDENDKLIREVKVITLKSKLVSDFRKDFQFYKVREINNYHHAHDAYLNAVVGTALIKKYPKLESEFVYGDYKVYDVRKMIAKSEQEIGKATAKYFFYSNIMNFFKTEITLANGEIRKRPLIETNGETGEIVWDKGRDFATVRKVLSMPQVNIVKKTEVQTGGFSKESILPKRNSDKLIARKKDWDPKKYGGFDSPTVAYSVLVVAKVEKGKSKKLKSVKELLGITIMERSSFEKNPIDFLEAKGYKEVKKDLIIKLPKYSLFELENGRKRMLASAGELQKGNELALPSKYVNFLYLASHYEKLKGSPEDNEQKQLFVEQHKHYLDEIIEQISEFSKRVILADANLDKVLSAYNKHRDKPIREQAENIIHLFTLTNLGAPAAFKYFDTTIDRKRYTSTKEVLDATLIHQSITGLYETRIDLSQLGGDGGEAAAKGGGGSSGGGLEHLPPPPEVSQFPLNPERLQALTDLVSRALEAKHIEPYQGPGNNPIFPVKKPNGKWRFIHDLRATNSLTRDLASPSPGPPDLTSLPQDLPHLRTIDLTDAFFQIPLPAVFQPYFAFTLPQPNNHGPGTRYSWRVLPQGFKNSPTLFQQQLSHILAPVRKAFPNSLIIQYMDDILLASPALRELTALTDKVTNALTKEGLPMSLEKTQATPGSIHFLGQVISPDCITYETLPSIHVKSIWSLAELQSMLGELQWVSKGTPVLRSSLHQLYLALRGHRDPRDTIELTSTQVQALKTIQKALALNCRSRLVSQLPILALIILRPTGTTAVLFQTKQKWPLVWLHTPHPATSLRPWGQLLANAIITLDKYSLQHYGQICKSFHHNISNQALTYYLHTSDQSSVAILLQHSHRFHNLGAQPSGPWRSLLQVPQIFQNIDVLRPPFIISPVVIDHAPCLFSDGATSKAAFILWDKQVIHQQVLPLPSTCSAQAGELFGLLAGLQKSKPWPALNIFLDSKFLIGHLRRMAWGAFLGPSTQCDLHARLFPLLQGKTVYVHHVRSHTLLQDPISRLNEATDALMLAPLLPLAGKRTADGSEFEKRTADGSEFESPKKKAKVE

SEQ ID NO: 1527 - protein, 2007 aa, synthetic construct
MPAAKRVKLDGGDKKYSIGLDIGTNSVGWAVITDEYKVPSKKFKVLGNTDRHSIKKNLIGALLFDSGETAEATRLKRTARRRYTRRKNRICYLQEIFSNEMAKVDDSFFHRLEESFLVEEDKKHERHPIFGNIVDEVAYHEKYPTIYHLRKKLVDSTDKADLRLIYLALAHMIKFRGHFLIEGDLNPDNSDVDKLFIQLVQTYNQLFEENPINASGVDAKAILSARLSKSRRLENLIAQLPGEKKNGLFGNLIALSLGLTPNFKSNFDLAEDAKLQLSKDTYDDDLDNLLAQIGDQYADLFLAAKNLSDAILLSDILRVNTEITKAPLSASMIKRYDEHHQDLTLLKALVRQQLPEKYKEIFFDQSKNGYAGYIDGGASQEEFYKFIKPILEKMDGTEELLVKLNREDLLRKQRTFDNGSIPHQIHLGELHAILRRQEDFYPFLKDNREKIEKILTFRIPYYVGPLARGNSRFAWMTRKSEETITPWNFEEVVDKGASAQSFIERMTNFDKNLPNEKVLPKHSLLYEYFTVYNELTKVKYVTEGMRKPAFLSGEQKKAIVDLLFKTNRKVTVKQLKEDYFKKIECFDSVEISGVEDRFNASLGTYHDLLKIIKDKDFLDNEENEDILEDIVLTLTLFEDREMIEERLKTYAHLFDDKVMKQLKRRRYTGWGRLSRKLINGIRDKQSGKTILDFLKSDGFANRNFMQLIHDDSLTFKEDIQKAQVSGQGDSLHEHIANLAGSPAIKKGILQTVKVVDELVKVMGRHKPENIVIEMARENQTTQKGQKNSRERMKRIEEGIKELGSQILKEHPVENTQLQNEKLYLYYLQNGRDMYVDQELDINRLSDYDVDHIVPQSFLKDDSIDNKVLTRSDKARGKSDNVPSEEVVKKMKNYWRQLLNAKLITQRKFDNLTKAERGGLSELDKAGFIKRQLVETRQITKHVAQILDSRMNTKYDENDKLIREVKVITLKSKLVSDFRKDFQFYKVREINNYHHAHDAYLNAVVGTALIKKYPKLESEFVYGDYKVYDVRKMIAKSEQEIGKATAKYFFYSNIMNFFKTEITLANGEIRKRPLIETNGETGEIVWDKGRDFATVRKVLSMPQVNIVKKTEVQTGGFSKESILPKRNSDKLIARKKDWDPKKYGGFDSPTVAYSVLVVAKVEKGKSKKLKSVKELLGITIMERSSFEKNPIDFLEAKGYKEVKKDLIIKLPKYSLFELENGRKRMLASAGELQKGNELALPSKYVNFLYLASHYEKLKGSPEDNEQKQLFVEQHKHYLDEIIEQISEFSKRVILADANLDKVLSAYNKHRDKPIREQAENIIHLFTLTNLGAPAAFKYFDTTIDRKRYTSTKEVLDATLIHQSITGLYETRIDLSQLGGDGGPAPGGGGSSGGGLEHLPPPPEVSQFPLNPERLQALTDLVSRALEAKHIEPYQGPGNNPIFPVKKPNGKWRFIHDLRATNSLTRDLASPSPGPPDLTSPPQDLPHLRTIDLTDAFFQIPLPAVFQPYFAFTLPQPNNHGPGTRYSWRVLPQGFKNSPTLFQQQLSHILAPVRKAFPNSLIIQYMDDILLASPALRELTALTDKVTNALTKEGLPMSLEKTQATPGSIHFLGQVISPDCITYETLPSIHVKSIWSLAELQSMLGELQWVSKGTPVLRSSLHQLYLALRGHRDPRDTIELTSTQVQALKTIQKALALNCRSRLVSQLPILALIILRPTGTTAVLFQTKQKWPLVWLHTPHPATSLRPWGQLLANAIITLDKYSLQHYGQICKSFHHNISNQALTYYLHTSDQSSVAILLQHSHRFHNLGAQPSGPWRSLLQVPQIFQNIDVLRPPFIISPVVIDHAPCLFSDGATSKAAFILWDKQVIHQQVLPLPSTCSAQAGELFGLLAGLQKSKPWPALNIFLDSKFLIGHLRRMAWGAFLGPSTQCDLHARLFPLLQGKTVYVHHVRSHTLLQDPISRLNEATDALMLAPLLPLAGKRTADGSEFEKRTADGSEFESPKKKAKVE

SEQ ID NO: 1528 - protein, 2028 aa, synthetic construct
MPAAKRVKLDGGDKKYSIGLDIGTNSVGWAVITDEYKVPSKKFKVLGNTDRHSIKKNLIGALLFDSGETAEATRLKRTARRRYTRRKNRICYLQEIFSNEMAKVDDSFFHRLEESFLVEEDKKHERHPIFGNIVDEVAYHEKYPTIYHLRKKLVDSTDKADLRLIYLALAHMIKFRGHFLIEGDLNPDNSDVDKLFIQLVQTYNQLFEENPINASGVDAKAILSARLSKSRRLENLIAQLPGEKKNGLFGNLIALSLGLTPNFKSNFDLAEDAKLQLSKDTYDDDLDNLLAQIGDQYADLFLAAKNLSDAILLSDILRVNTEITKAPLSASMIKRYDEHHQDLTLLKALVRQQLPEKYKEIFFDQSKNGYAGYIDGGASQEEFYKFIKPILEKMDGTEELLVKLNREDLLRKQRTFDNGSIPHQIHLGELHAILRRQEDFYPFLKDNREKIEKILTFRIPYYVGPLARGNSRFAWMTRKSEETITPWNFEEVVDKGASAQSFIERMTNFDKNLPNEKVLPKHSLLYEYFTVYNELTKVKYVTEGMRKPAFLSGEQKKAIVDLLFKTNRKVTVKQLKEDYFKKIECFDSVEISGVEDRFNASLGTYHDLLKIIKDKDFLDNEENEDILEDIVLTLTLFEDREMIEERLKTYAHLFDDKVMKQLKRRRYTGWGRLSRKLINGIRDKQSGKTILDFLKSDGFANRNFMQLIHDDSLTFKEDIQKAQVSGQGDSLHEHIANLAGSPAIKKGILQTVKVVDELVKVMGRHKPENIVIEMARENQTTQKGQKNSRERMKRIEEGIKELGSQILKEHPVENTQLQNEKLYLYYLQNGRDMYVDQELDINRLSDYDVDHIVPQSFLKDDSIDNKVLTRSDKARGKSDNVPSEEVVKKMKNYWRQLLNAKLITQRKFDNLTKAERGGLSELDKAGFIKRQLVETRQITKHVAQILDSRMNTKYDENDKLIREVKVITLKSKLVSDFRKDFQFYKVREINNYHHAHDAYLNAVVGTALIKKYPKLESEFVYGDYKVYDVRKMIAKSEQEIGKATAKYFFYSNIMNFFKTEITLANGEIRKRPLIETNGETGEIVWDKGRDFATVRKVLSMPQVNIVKKTEVQTGGFSKESILPKRNSDKLIARKKDWDPKKYGGFDSPTVAYSVLVVAKVEKGKSKKLKSVKELLGITIMERSSFEKNPIDFLEAKGYKEVKKDLIIKLPKYSLFELENGRKRMLASAGELQKGNELALPSKYVNFLYLASHYEKLKGSPEDNEQKQLFVEQHKHYLDEIIEQISEFSKRVILADANLDKVLSAYNKHRDKPIREQAENIIHLFTLTNLGAPAAFKYFDTTIDRKRYTSTKEVLDATLIHQSITGLYETRIDLSQLGGDGGGGGGSGGGGSGGGGSGGGGSGGGGSGGGGSGGGLEHLPPPPEVSQFPLNPERLQALTDLVSRALEAKHIEPYQGPGNNPIFPVKKPNGKWRFIHDLRATNSLTRDLASPSPGPPDLTSPPQDLPHLRTIDLTDAFFQIPLPAVFQPYFAFTLPQPNNHGPGTRYSWRVLPQGFKNSPTLFQQQLSHILAPVRKAFPNSLIIQYMDDILLASPALRELTALTDKVTNALTKEGLPMSLEKTQATPGSIHFLGQVISPDCITYETLPSIHVKSIWSLAELQSMLGELQWVSKGTPVLRSSLHQLYLALRGHRDPRDTIELTSTQVQALKTIQKALALNCRSRLVSQLPILALIILRPTGTTAVLFQTKQKWPLVWLHTPHPATSLRPWGQLLANAIITLDKYSLQHYGQICKSFHHNISNQALTYYLHTSDQSSVAILLQHSHRFHNLGAQPSGPWRSLLQVPQIFQNIDVLRPPFIISPVVIDHAPCLFSDGATSKAAFILWDKQVIHQQVLPLPSTCSAQAGELFGLLAGLQKSKPWPALNIFLDSKFLIGHLRRMAWGAFLGPSTQCDLHARLFPLLQGKTVYVHHVRSHTLLQDPISRLNEATDALMLAPLLPLAGKRTADGSEFEKRTADGSEFESPKKKAKVE

SEQ ID NO: 1529 - protein, 2007 aa, synthetic construct
MPAAKRVKLDGGDKKYSIGLDIGTNSVGWAVITDEYKVPSKKFKVLGNTDRHSIKKNLIGALLFDSGETAEATRLKRTARRRYTRRKNRICYLQEIFSNEMAKVDDSFFHRLEESFLVEEDKKHERHPIFGNIVDEVAYHEKYPTIYHLRKKLVDSTDKADLRLIYLALAHMIKFRGHFLIEGDLNPDNSDVDKLFIQLVQTYNQLFEENPINASGVDAKAILSARLSKSRRLENLIAQLPGEKKNGLFGNLIALSLGLTPNFKSNFDLAEDAKLQLSKDTYDDDLDNLLAQIGDQYADLFLAAKNLSDAILLSDILRVNTEITKAPLSASMIKRYDEHHQDLTLLKALVRQQLPEKYKEIFFDQSKNGYAGYIDGGASQEEFYKFIKPILEKMDGTEELLVKLNREDLLRKQRTFDNGSIPHQIHLGELHAILRRQEDFYPFLKDNREKIEKILTFRIPYYVGPLARGNSRFAWMTRKSEETITPWNFEEVVDKGASAQSFIERMTNFDKNLPNEKVLPKHSLLYEYFTVYNELTKVKYVTEGMRKPAFLSGEQKKAIVDLLFKTNRKVTVKQLKEDYFKKIECFDSVEISGVEDRFNASLGTYHDLLKIIKDKDFLDNEENEDILEDIVLTLTLFEDREMIEERLKTYAHLFDDKVMKQLKRRRYTGWGRLSRKLINGIRDKQSGKTILDFLKSDGFANRNFMQLIHDDSLTFKEDIQKAQVSGQGDSLHEHIANLAGSPAIKKGILQTVKVVDELVKVMGRHKPENIVIEMARENQTTQKGQKNSRERMKRIEEGIKELGSQILKEHPVENTQLQNEKLYLYYLQNGRDMYVDQELDINRLSDYDVDHIVPQSFLKDDSIDNKVLTRSDKARGKSDNVPSEEVVKKMKNYWRQLLNAKLITQRKFDNLTKAERGGLSELDKAGFIKRQLVETRQITKHVAQILDSRMNTKYDENDKLIREVKVITLKSKLVSDFRKDFQFYKVREINNYHHAHDAYLNAVVGTALIKKYPKLESEFVYGDYKVYDVRKMIAKSEQEIGKATAKYFFYSNIMNFFKTEITLANGEIRKRPLIETNGETGEIVWDKGRDFATVRKVLSMPQVNIVKKTEVQTGGFSKESILPKRNSDKLIARKKDWDPKKYGGFDSPTVAYSVLVVAKVEKGKSKKLKSVKELLGITIMERSSFEKNPIDFLEAKGYKEVKKDLIIKLPKYSLFELENGRKRMLASAGELQKGNELALPSKYVNFLYLASHYEKLKGSPEDNEQKQLFVEQHKHYLDEIIEQISEFSKRVILADANLDKVLSAYNKHRDKPIREQAENIIHLFTLTNLGAPAAFKYFDTTIDRKRYTSTKEVLDATLIHQSITGLYETRIDLSQLGGDGGGGGGGSPAPGGGLEHLPPPPEVSQFPLNPERLQALTDLVSRALEAKHIEPYQGPGNNPIFPVKKPNGKWRFIHDLRATNSLTRDLASPSPGPPDLTSPPQDLPHLRTIDLTDAFFQIPLPAVFQPYFAFTLPQPNNHGPGTRYSWRVLPQGFKNSPTLFQQQLSHILAPVRKAFPNSLIIQYMDDILLASPALRELTALTDKVTNALTKEGLPMSLEKTQATPGSIHFLGQVISPDCITYETLPSIHVKSIWSLAELQSMLGELQWVSKGTPVLRSSLHQLYLALRGHRDPRDTIELTSTQVQALKTIQKALALNCRSRLVSQLPILALIILRPTGTTAVLFQTKQKWPLVWLHTPHPATSLRPWGQLLANAIITLDKYSLQHYGQICKSFHHNISNQALTYYLHTSDQSSVAILLQHSHRFHNLGAQPSGPWRSLLQVPQIFQNIDVLRPPFIISPVVIDHAPCLFSDGATSKAAFILWDKQVIHQQVLPLPSTCSAQAGELFGLLAGLQKSKPWPALNIFLDSKFLIGHLRRMAWGAFLGPSTQCDLHARLFPLLQGKTVYVHHVRSHTLLQDPISRLNEATDALMLAPLLPLAGKRTADGSEFEKRTADGSEFESPKKKAKVE

SEQ ID NO: 1530 - protein, 2004 aa, synthetic construct
MPAAKRVKLDGGDKKYSIGLDIGTNSVGWAVITDEYKVPSKKFKVLGNTDRHSIKKNLIGALLFDSGETAEATRLKRTARRRYTRRKNRICYLQEIFSNEMAKVDDSFFHRLEESFLVEEDKKHERHPIFGNIVDEVAYHEKYPTIYHLRKKLVDSTDKADLRLIYLALAHMIKFRGHFLIEGDLNPDNSDVDKLFIQLVQTYNQLFEENPINASGVDAKAILSARLSKSRRLENLIAQLPGEKKNGLFGNLIALSLGLTPNFKSNFDLAEDAKLQLSKDTYDDDLDNLLAQIGDQYADLFLAAKNLSDAILLSDILRVNTEITKAPLSASMIKRYDEHHQDLTLLKALVRQQLPEKYKEIFFDQSKNGYAGYIDGGASQEEFYKFIKPILEKMDGTEELLVKLNREDLLRKQRTFDNGSIPHQIHLGELHAILRRQEDFYPFLKDNREKIEKILTFRIPYYVGPLARGNSRFAWMTRKSEETITPWNFEEVVDKGASAQSFIERMTNFDKNLPNEKVLPKHSLLYEYFTVYNELTKVKYVTEGMRKPAFLSGEQKKAIVDLLFKTNRKVTVKQLKEDYFKKIECFDSVEISGVEDRFNASLGTYHDLLKIIKDKDFLDNEENEDILEDIVLTLTLFEDREMIEERLKTYAHLFDDKVMKQLKRRRYTGWGRLSRKLINGIRDKQSGKTILDFLKSDGFANRNFMQLIHDDSLTFKEDIQKAQVSGQGDSLHEHIANLAGSPAIKKGILQTVKVVDELVKVMGRHKPENIVIEMARENQTTQKGQKNSRERMKRIEEGIKELGSQILKEHPVENTQLQNEKLYLYYLQNGRDMYVDQELDINRLSDYDVDHIVPQSFLKDDSIDNKVLTRSDKARGKSDNVPSEEVVKKMKNYWRQLLNAKLITQRKFDNLTKAERGGLSELDKAGFIKRQLVETRQITKHVAQILDSRMNTKYDENDKLIREVKVITLKSKLVSDFRKDFQFYKVREINNYHHAHDAYLNAVVGTALIKKYPKLESEFVYGDYKVYDVRKMIAKSEQEIGKATAKYFFYSNIMNFFKTEITLANGEIRKRPLIETNGETGEIVWDKGRDFATVRKVLSMPQVNIVKKTEVQTGGFSKESILPKRNSDKLIARKKDWDPKKYGGFDSPTVAYSVLVVAKVEKGKSKKLKSVKELLGITIMERSSFEKNPIDFLEAKGYKEVKKDLIIKLPKYSLFELENGRKRMLASAGELQKGNELALPSKYVNFLYLASHYEKLKGSPEDNEQKQLFVEQHKHYLDEIIEQISEFSKRVILADANLDKVLSAYNKHRDKPIREQAENIIHLFTLTNLGAPAAFKYFDTTIDRKRYTSTKEVLDATLIHQSITGLYETRIDLSQLGGDGGGGGPAPGGHLPPPPQVDQFPLNLPERLQALNDLVSKALEAGHIEPYSGPGNNPVFPVKKPNGKWRFIHDLRATNAITTTLTSPSPGPPDLTSLPTALPHLQTIDLTDAFFQIPLPKQYQPYFAFTIPQPCNYGPGTRYAWTVLPQGFKNSPTLFQQQLAAVLNPMRKMFPTSTIVQYMDDILLASPTNEELQQLSQLTLQALTTHGLPISQEKTQQTPGQIRFLGQVISPNHITYESTPTIPIKSQWTLTELQVILGEIQWVSKGTPILRKHLQSLYSALHPYRDPRACITLTPQQLHALHAIQQALQHNCRGRLNPALPLLGLISLSTSGTTSVIFQPKQNWPLAWLHTPHPPTSLCPWGHLLACTILTLDKYTLQHYGQLCQSFHHNMSKQALCDFLRNSPHPSVGILIHHMGRFHNLGSQPSGPWKTLLHLPTLLQEPRLLRPIFTLSPVVLDTAPCLFSDGSPQKAAYVLWDQTILQQDITPLPSHETHSAQKGELLALICGLRAAKPWPSLNIFLDSKYLIKYLHSLAIGAFLGTSAHQTLQAALPPLLQGKTIYLHHVRSHTNLPDPISTFNEYTDSLILAPLVPLAGKRTADGSEFEKRTADGSEFESPKKKAKVE

SEQ ID NO: 1531 - protein, 2009 aa, synthetic construct
MPAAKRVKLDGGDKKYSIGLDIGTNSVGWAVITDEYKVPSKKFKVLGNTDRHSIKKNLIGALLFDSGETAEATRLKRTARRRYTRRKNRICYLQEIFSNEMAKVDDSFFHRLEESFLVEEDKKHERHPIFGNIVDEVAYHEKYPTIYHLRKKLVDSTDKADLRLIYLALAHMIKFRGHFLIEGDLNPDNSDVDKLFIQLVQTYNQLFEENPINASGVDAKAILSARLSKSRRLENLIAQLPGEKKNGLFGNLIALSLGLTPNFKSNFDLAEDAKLQLSKDTYDDDLDNLLAQIGDQYADLFLAAKNLSDAILLSDILRVNTEITKAPLSASMIKRYDEHHQDLTLLKALVRQQLPEKYKEIFFDQSKNGYAGYIDGGASQEEFYKFIKPILEKMDGTEELLVKLNREDLLRKQRTFDNGSIPHQIHLGELHAILRRQEDFYPFLKDNREKIEKILTFRIPYYVGPLARGNSRFAWMTRKSEETITPWNFEEVVDKGASAQSFIERMTNFDKNLPNEKVLPKHSLLYEYFTVYNELTKVKYVTEGMRKPAFLSGEQKKAIVDLLFKTNRKVTVKQLKEDYFKKIECFDSVEISGVEDRFNASLGTYHDLLKIIKDKDFLDNEENEDILEDIVLTLTLFEDREMIEERLKTYAHLFDDKVMKQLKRRRYTGWGRLSRKLINGIRDKQSGKTILDFLKSDGFANRNFMQLIHDDSLTFKEDIQKAQVSGQGDSLHEHIANLAGSPAIKKGILQTVKVVDELVKVMGRHKPENIVIEMARENQTTQKGQKNSRERMKRIEEGIKELGSQILKEHPVENTQLQNEKLYLYYLQNGRDMYVDQELDINRLSDYDVDHIVPQSFLKDDSIDNKVLTRSDKARGKSDNVPSEEVVKKMKNYWRQLLNAKLITQRKFDNLTKAERGGLSELDKAGFIKRQLVETRQITKHVAQILDSRMNTKYDENDKLIREVKVITLKSKLVSDFRKDFQFYKVREINNYHHAHDAYLNAVVGTALIKKYPKLESEFVYGDYKVYDVRKMIAKSEQEIGKATAKYFFYSNIMNFFKTEITLANGEIRKRPLIETNGETGEIVWDKGRDFATVRKVLSMPQVNIVKKTEVQTGGFSKESILPKRNSDKLIARKKDWDPKKYGGFDSPTVAYSVLVVAKVEKGKSKKLKSVKELLGITIMERSSFEKNPIDFLEAKGYKEVKKDLIIKLPKYSLFELENGRKRMLASAGELQKGNELALPSKYVNFLYLASHYEKLKGSPEDNEQKQLFVEQHKHYLDEIIEQISEFSKRVILADANLDKVLSAYNKHRDKPIREQAENIIHLFTLTNLGAPAAFKYFDTTIDRKRYTSTKEVLDATLIHQSITGLYETRIDLSQLGGDGGEAAAKGSSGGGGGHLPPPPQVDQFPLNLPERLQALNDLVSKALEAGHIEPYSGPGNNPVFPVKKPNGKWRFIHDLRATNAITTTLTSPSPGPPDLTSLPTALPHLQTIDLTDAFFQIPLPKQYQPYFAFTIPQPCNYGPGTRYAWTVLPQGFKNSPTLFQQQLAAVLNPMRKMFPTSTIVQYMDDILLASPTNEELQQLSQLTLQALTTHGLPISQEKTQQTPGQIRFLGQVISPNHITYESTPTIPIKSQWTLTELQVILGEIQWVSKGTPILRKHLQSLYSALHPYRDPRACITLTPQQLHALHAIQQALQHNCRGRLNPALPLLGLISLSTSGTTSVIFQPKQNWPLAWLHTPHPPTSLCPWGHLLACTILTLDKYTLQHYGQLCQSFHHNMSKQALCDFLRNSPHPSVGILIHHMGRFHNLGSQPSGPWKTLLHLPTLLQEPRLLRPIFTLSPVVLDTAPCLFSDGSPQKAAYVLWDQTILQQDITPLPSHETHSAQKGELLALICGLRAAKPWPSLNIFLDSKYLIKYLHSLAIGAFLGTSAHQTLQAALPPLLQGKTIYLHHVRSHTNLPDPISTFNEYTDSLILAPLVPLAGKRTADGSEFEKRTADGSEFESPKKKAKVE

SEQ ID NO: 1532 - protein, 2009 aa, synthetic construct
MPAAKRVKLDGGDKKYSIGLDIGTNSVGWAVITDEYKVPSKKFKVLGNTDRHSIKKNLIGALLFDSGETAEATRLKRTARRRYTRRKNRICYLQEIFSNEMAKVDDSFFHRLEESFLVEEDKKHERHPIFGNIVDEVAYHEKYPTIYHLRKKLVDSTDKADLRLIYLALAHMIKFRGHFLIEGDLNPDNSDVDKLFIQLVQTYNQLFEENPINASGVDAKAILSARLSKSRRLENLIAQLPGEKKNGLFGNLIALSLGLTPNFKSNFDLAEDAKLQLSKDTYDDDLDNLLAQIGDQYADLFLAAKNLSDAILLSDILRVNTEITKAPLSASMIKRYDEHHQDLTLLKALVRQQLPEKYKEIFFDQSKNGYAGYIDGGASQEEFYKFIKPILEKMDGTEELLVKLNREDLLRKQRTFDNGSIPHQIHLGELHAILRRQEDFYPFLKDNREKIEKILTFRIPYYVGPLARGNSRFAWMTRKSEETITPWNFEEVVDKGASAQSFIERMTNFDKNLPNEKVLPKHSLLYEYFTVYNELTKVKYVTEGMRKPAFLSGEQKKAIVDLLFKTNRKVTVKQLKEDYFKKIECFDSVEISGVEDRFNASLGTYHDLLKIIKDKDFLDNEENEDILEDIVLTLTLFEDREMIEERLKTYAHLFDDKVMKQLKRRRYTGWGRLSRKLINGIRDKQSGKTILDFLKSDGFANRNFMQLIHDDSLTFKEDIQKAQVSGQGDSLHEHIANLAGSPAIKKGILQTVKVVDELVKVMGRHKPENIVIEMARENQTTQKGQKNSRERMKRIEEGIKELGSQILKEHPVENTQLQNEKLYLYYLQNGRDMYVDQELDINRLSDYDVDHIVPQSFLKDDSIDNKVLTRSDKARGKSDNVPSEEVVKKMKNYWRQLLNAKLITQRKFDNLTKAERGGLSELDKAGFIKRQLVETRQITKHVAQILDSRMNTKYDENDKLIREVKVITLKSKLVSDFRKDFQFYKVREINNYHHAHDAYLNAVVGTALIKKYPKLESEFVYGDYKVYDVRKMIAKSEQEIGKATAKYFFYSNIMNFFKTEITLANGEIRKRPLIETNGETGEIVWDKGRDFATVRKVLSMPQVNIVKKTEVQTGGFSKESILPKRNSDKLIARKKDWDPKKYGGFDSPTVAYSVLVVAKVEKGKSKKLKSVKELLGITIMERSSFEKNPIDFLEAKGYKEVKKDLIIKLPKYSLFELENGRKRMLASAGELQKGNELALPSKYVNFLYLASHYEKLKGSPEDNEQKQLFVEQHKHYLDEIIEQISEFSKRVILADANLDKVLSAYNKHRDKPIREQAENIIHLFTLTNLGAPAAFKYFDTTIDRKRYTSTKEVLDATLIHQSITGLYETRIDLSQLGGDGGEAAAKGGSPAPGGHLPPPPQVDQFPLNLPERLQALNDLVSKALEAGHIEPYSGPGNNPVFPVKKPNGKWRFIHDLRATNAITTTLTSPSPGPPDLTSLPTALPHLQTIDLTDAFFQIPLPKQYQPYFAFTIPQPCNYGPGTRYAWTVLPQGFKNSPTLFQQQLAAVLNPMRKMFPTSTIVQYMDDILLASPTNEELQQLSQLTLQALTTHGLPISQEKTQQTPGQIRFLGQVISPNHITYESTPTIPIKSQWTLTELQVILGEIQWVSKGTPILRKHLQSLYSALHPYRDPRACITLTPQQLHALHAIQQALQHNCRGRLNPALPLLGLISLSTSGTTSVIFQPKQNWPLAWLHTPHPPTSLCPWGHLLACTILTLDKYTLQHYGQLCQSFHHNMSKQALCDFLRNSPHPSVGILIHHMGRFHNLGSQPSGPWKTLLHLPTLLQEPRLLRPIFTLSPVVLDTAPCLFSDGSPQKAAYVLWDQTILQQDITPLPSHETHSAQKGELLALICGLRAAKPWPSLNIFLDSKYLIKYLHSLAIGAFLGTSAHQTLQAALPPLLQGKTIYLHHVRSHTNLPDPISTFNEYTDSLILAPLVPLAGKRTADGSEFEKRTADGSEFESPKKKAKVE

SEQ ID NO: 1533 - protein, 2031 aa, synthetic construct
MPAAKRVKLDGGDKKYSIGLDIGTNSVGWAVITDEYKVPSKKFKVLGNTDRHSIKKNLIGALLFDSGETAEATRLKRTARRRYTRRKNRICYLQEIFSNEMAKVDDSFFHRLEESFLVEEDKKHERHPIFGNIVDEVAYHEKYPTIYHLRKKLVDSTDKADLRLIYLALAHMIKFRGHFLIEGDLNPDNSDVDKLFIQLVQTYNQLFEENPINASGVDAKAILSARLSKSRRLENLIAQLPGEKKNGLFGNLIALSLGLTPNFKSNFDLAEDAKLQLSKDTYDDDLDNLLAQIGDQYADLFLAAKNLSDAILLSDILRVNTEITKAPLSASMIKRYDEHHQDLTLLKALVRQQLPEKYKEIFFDQSKNGYAGYIDGGASQEEFYKFIKPILEKMDGTEELLVKLNREDLLRKQRTFDNGSIPHQIHLGELHAILRRQEDFYPFLKDNREKIEKILTFRIPYYVGPLARGNSRFAWMTRKSEETITPWNFEEVVDKGASAQSFIERMTNFDKNLPNEKVLPKHSLLYEYFTVYNELTKVKYVTEGMRKPAFLSGEQKKAIVDLLFKTNRKVTVKQLKEDYFKKIECFDSVEISGVEDRFNASLGTYHDLLKIIKDKDFLDNEENEDILEDIVLTLTLFEDREMIEERLKTYAHLFDDKVMKQLKRRRYTGWGRLSRKLINGIRDKQSGKTILDFLKSDGFANRNFMQLIHDDSLTFKEDIQKAQVSGQGDSLHEHIANLAGSPAIKKGILQTVKVVDELVKVMGRHKPENIVIEMARENQTTQKGQKNSRERMKRIEEGIKELGSQILKEHPVENTQLQNEKLYLYYLQNGRDMYVDQELDINRLSDYDVDHIVPQSFLKDDSIDNKVLTRSDKARGKSDNVPSEEVVKKMKNYWRQLLNAKLITQRKFDNLTKAERGGLSELDKAGFIKRQLVETRQITKHVAQILDSRMNTKYDENDKLIREVKVITLKSKLVSDFRKDFQFYKVREINNYHHAHDAYLNAVVGTALIKKYPKLESEFVYGDYKVYDVRKMIAKSEQEIGKATAKYFFYSNIMNFFKTEITLANGEIRKRPLIETNGETGEIVWDKGRDFATVRKVLSMPQVNIVKKTEVQTGGFSKESILPKRNSDKLIARKKDWDPKKYGGFDSPTVAYSVLVVAKVEKGKSKKLKSVKELLGITIMERSSFEKNPIDFLEAKGYKEVKKDLIIKLPKYSLFELENGRKRMLASAGELQKGNELALPSKYVNFLYLASHYEKLKGSPEDNEQKQLFVEQHKHYLDEIIEQISEFSKRVILADANLDKVLSAYNKHRDKPIREQAENIIHLFTLTNLGAPAAFKYFDTTIDRKRYTSTKEVLDATLIHQSITGLYETRIDLSQLGGDGGSGGSSGGSSGSETPGTSESATPESSGGSSGGSSGGHLPPPPQVDQFPLNLPERLQALNDLVSKALEAGHIEPYSGPGNNPVFPVKKPNGKWRFIHDLRATNAITTTLTSPSPGPPDLTSLPTALPHLQTIDLTDAFFQIPLPKQYQPYFAFTIPQPCNYGPGTRYAWTVLPQGFKNSPTLFQQQLAAVLNPMRKMFPTSTIVQYMDDILLASPTNEELQQLSQLTLQALTTHGLPISQEKTQQTPGQIRFLGQVISPNHITYESTPTIPIKSQWTLTELQVILGEIQWVSKGTPILRKHLQSLYSALHPYRDPRACITLTPQQLHALHAIQQALQHNCRGRLNPALPLLGLISLSTSGTTSVIFQPKQNWPLAWLHTPHPPTSLCPWGHLLACTILTLDKYTLQHYGQLCQSFHHNMSKQALCDFLRNSPHPSVGILIHHMGRFHNLGSQPSGPWKTLLHLPTLLQEPRLLRPIFTLSPVVLDTAPCLFSDGSPQKAAYVLWDQTILQQDITPLPSHETHSAQKGELLALICGLRAAKPWPSLNIFLDSKYLIKYLHSLAIGAFLGTSAHQTLQAALPPLLQGKTIYLHHVRSHTNLPDPISTFNEYTDSLILAPLVPLAGKRTADGSEFEKRTADGSEFESPKKKAKVE

SEQ ID NO: 1534 - protein, 2006 aa, synthetic construct
MPAAKRVKLDGGDKKYSIGLDIGTNSVGWAVITDEYKVPSKKFKVLGNTDRHSIKKNLIGALLFDSGETAEATRLKRTARRRYTRRKNRICYLQEIFSNEMAKVDDSFFHRLEESFLVEEDKKHERHPIFGNIVDEVAYHEKYPTIYHLRKKLVDSTDKADLRLIYLALAHMIKFRGHFLIEGDLNPDNSDVDKLFIQLVQTYNQLFEENPINASGVDAKAILSARLSKSRRLENLIAQLPGEKKNGLFGNLIALSLGLTPNFKSNFDLAEDAKLQLSKDTYDDDLDNLLAQIGDQYADLFLAAKNLSDAILLSDILRVNTEITKAPLSASMIKRYDEHHQDLTLLKALVRQQLPEKYKEIFFDQSKNGYAGYIDGGASQEEFYKFIKPILEKMDGTEELLVKLNREDLLRKQRTFDNGSIPHQIHLGELHAILRRQEDFYPFLKDNREKIEKILTFRIPYYVGPLARGNSRFAWMTRKSEETITPWNFEEVVDKGASAQSFIERMTNFDKNLPNEKVLPKHSLLYEYFTVYNELTKVKYVTEGMRKPAFLSGEQKKAIVDLLFKTNRKVTVKQLKEDYFKKIECFDSVEISGVEDRFNASLGTYHDLLKIIKDKDFLDNEENEDILEDIVLTLTLFEDREMIEERLKTYAHLFDDKVMKQLKRRRYTGWGRLSRKLINGIRDKQSGKTILDFLKSDGFANRNFMQLIHDDSLTFKEDIQKAQVSGQGDSLHEHIANLAGSPAIKKGILQTVKVVDELVKVMGRHKPENIVIEMARENQTTQKGQKNSRERMKRIEEGIKELGSQILKEHPVENTQLQNEKLYLYYLQNGRDMYVDQELDINRLSDYDVDHIVPQSFLKDDSIDNKVLTRSDKARGKSDNVPSEEVVKKMKNYWRQLLNAKLITQRKFDNLTKAERGGLSELDKAGFIKRQLVETRQITKHVAQILDSRMNTKYDENDKLIREVKVITLKSKLVSDFRKDFQFYKVREINNYHHAHDAYLNAVVGTALIKKYPKLESEFVYGDYKVYDVRKMIAKSEQEIGKATAKYFFYSNIMNFFKTEITLANGEIRKRPLIETNGETGEIVWDKGRDFATVRKVLSMPQVNIVKKTEVQTGGFSKESILPKRNSDKLIARKKDWDPKKYGGFDSPTVAYSVLVVAKVEKGKSKKLKSVKELLGITIMERSSFEKNPIDFLEAKGYKEVKKDLIIKLPKYSLFELENGRKRMLASAGELQKGNELALPSKYVNFLYLASHYEKLKGSPEDNEQKQLFVEQHKHYLDEIIEQISEFSKRVILADANLDKVLSAYNKHRDKPIREQAENIIHLFTLTNLGAPAAFKYFDTTIDRKRYTSTKEVLDATLIHQSITGLYETRIDLSQLGGDGGPAPEAAAKGGHLPPPPQVDQFPLNLPERLQALNDLVSKALEAGHIEPYSGPGNNPVFPVKKPNGKWRFIHDLRATNAITTTLTSPSPGPPDLTSLPTALPHLQTIDLTDAFFQIPLPKQYQPYFAFTIPQPCNYGPGTRYAWTVLPQGFKNSPTLFQQQLAAVLNPMRKMFPTSTIVQYMDDILLASPTNEELQQLSQLTLQALTTHGLPISQEKTQQTPGQIRFLGQVISPNHITYESTPTIPIKSQWTLTELQVILGEIQWVSKGTPILRKHLQSLYSALHPYRDPRACITLTPQQLHALHAIQQALQHNCRGRLNPALPLLGLISLSTSGTTSVIFQPKQNWPLAWLHTPHPPTSLCPWGHLLACTILTLDKYTLQHYGQLCQSFHHNMSKQALCDFLRNSPHPSVGILIHHMGRFHNLGSQPSGPWKTLLHLPTLLQEPRLLRPIFTLSPVVLDTAPCLFSDGSPQKAAYVLWDQTILQQDITPLPSHETHSAQKGELLALICGLRAAKPWPSLNIFLDSKYLIKYLHSLAIGAFLGTSAHQTLQAALPPLLQGKTIYLHHVRSHTNLPDPISTFNEYTDSLILAPLVPLAGKRTADGSEFEKRTADGSEFESPKKKAKVE

SEQ ID NO: 1535 - protein, 2007 aa, synthetic construct
MPAAKRVKLDGGDKKYSIGLDIGTNSVGWAVITDEYKVPSKKFKVLGNTDRHSIKKNLIGALLFDSGETAEATRLKRTARRRYTRRKNRICYLQEIFSNEMAKVDDSFFHRLEESFLVEEDKKHERHPIFGNIVDEVAYHEKYPTIYHLRKKLVDSTDKADLRLIYLALAHMIKFRGHFLIEGDLNPDNSDVDKLFIQLVQTYNQLFEENPINASGVDAKAILSARLSKSRRLENLIAQLPGEKKNGLFGNLIALSLGLTPNFKSNFDLAEDAKLQLSKDTYDDDLDNLLAQIGDQYADLFLAAKNLSDAILLSDILRVNTEITKAPLSASMIKRYDEHHQDLTLLKALVRQQLPEKYKEIFFDQSKNGYAGYIDGGASQEEFYKFIKPILEKMDGTEELLVKLNREDLLRKQRTFDNGSIPHQIHLGELHAILRRQEDFYPFLKDNREKIEKILTFRIPYYVGPLARGNSRFAWMTRKSEETITPWNFEEVVDKGASAQSFIERMTNFDKNLPNEKVLPKHSLLYEYFTVYNELTKVKYVTEGMRKPAFLSGEQKKAIVDLLFKTNRKVTVKQLKEDYFKKIECFDSVEISGVEDRFNASLGTYHDLLKIIKDKDFLDNEENEDILEDIVLTLTLFEDREMIEERLKTYAHLFDDKVMKQLKRRRYTGWGRLSRKLINGIRDKQSGKTILDFLKSDGFANRNFMQLIHDDSLTFKEDIQKAQVSGQGDSLHEHIANLAGSPAIKKGILQTVKVVDELVKVMGRHKPENIVIEMARENQTTQKGQKNSRERMKRIEEGIKELGSQILKEHPVENTQLQNEKLYLYYLQNGRDMYVDQELDINRLSDYDVDHIVPQSFLKDDSIDNKVLTRSDKARGKSDNVPSEEVVKKMKNYWRQLLNAKLITQRKFDNLTKAERGGLSELDKAGFIKRQLVETRQITKHVAQILDSRMNTKYDENDKLIREVKVITLKSKLVSDFRKDFQFYKVREINNYHHAHDAYLNAVVGTALIKKYPKLESEFVYGDYKVYDVRKMIAKSEQEIGKATAKYFFYSNIMNFFKTEITLANGEIRKRPLIETNGETGEIVWDKGRDFATVRKVLSMPQVNIVKKTEVQTGGFSKESILPKRNSDKLIARKKDWDPKKYGGFDSPTVAYSVLVVAKVEKGKSKKLKSVKELLGITIMERSSFEKNPIDFLEAKGYKEVKKDLIIKLPKYSLFELENGRKRMLASAGELQKGNELALPSKYVNFLYLASHYEKLKGSPEDNEQKQLFVEQHKHYLDEIIEQISEFSKRVILADANLDKVLSAYNKHRDKPIREQAENIIHLFTLTNLGAPAAFKYFDTTIDRKRYTSTKEVLDATLIHQSITGLYETRIDLSQLGGDGGGSSGGSGGGGGHLPPPPQVDQFPLNLPERLQALNDLVSKALEAGHIEPYSGPGNNPVFPVKKPNGKWRFIHDLRATNAITTTLTSPSPGPPDLTSLPTALPHLQTIDLTDAFFQIPLPKQYQPYFAFTIPQPCNYGPGTRYAWTVLPQGFKNSPTLFQQQLAAVLNPMRKMFPTSTIVQYMDDILLASPTNEELQQLSQLTLQALTTHGLPISQEKTQQTPGQIRFLGQVISPNHITYESTPTIPIKSQWTLTELQVILGEIQWVSKGTPILRKHLQSLYSALHPYRDPRACITLTPQQLHALHAIQQALQHNCRGRLNPALPLLGLISLSTSGTTSVIFQPKQNWPLAWLHTPHPPTSLCPWGHLLACTILTLDKYTLQHYGQLCQSFHHNMSKQALCDFLRNSPHPSVGILIHHMGRFHNLGSQPSGPWKTLLHLPTLLQEPRLLRPIFTLSPVVLDTAPCLFSDGSPQKAAYVLWDQTILQQDITPLPSHETHSAQKGELLALICGLRAAKPWPSLNIFLDSKYLIKYLHSLAIGAFLGTSAHQTLQAALPPLLQGKTIYLHHVRSHTNLPDPISTFNEYTDSLILAPLVPLAGKRTADGSEFEKRTADGSEFESPKKKAKVE

SEQ ID NO: 1536 - protein, 2007 aa, synthetic construct
MPAAKRVKLDGGDKKYSIGLDIGTNSVGWAVITDEYKVPSKKFKVLGNTDRHSIKKNLIGALLFDSGETAEATRLKRTARRRYTRRKNRICYLQEIFSNEMAKVDDSFFHRLEESFLVEEDKKHERHPIFGNIVDEVAYHEKYPTIYHLRKKLVDSTDKADLRLIYLALAHMIKFRGHFLIEGDLNPDNSDVDKLFIQLVQTYNQLFEENPINASGVDAKAILSARLSKSRRLENLIAQLPGEKKNGLFGNLIALSLGLTPNFKSNFDLAEDAKLQLSKDTYDDDLDNLLAQIGDQYADLFLAAKNLSDAILLSDILRVNTEITKAPLSASMIKRYDEHHQDLTLLKALVRQQLPEKYKEIFFDQSKNGYAGYIDGGASQEEFYKFIKPILEKMDGTEELLVKLNREDLLRKQRTFDNGSIPHQIHLGELHAILRRQEDFYPFLKDNREKIEKILTFRIPYYVGPLARGNSRFAWMTRKSEETITPWNFEEVVDKGASAQSFIERMTNFDKNLPNEKVLPKHSLLYEYFTVYNELTKVKYVTEGMRKPAFLSGEQKKAIVDLLFKTNRKVTVKQLKEDYFKKIECFDSVEISGVEDRFNASLGTYHDLLKIIKDKDFLDNEENEDILEDIVLTLTLFEDREMIEERLKTYAHLFDDKVMKQLKRRRYTGWGRLSRKLINGIRDKQSGKTILDFLKSDGFANRNFMQLIHDDSLTFKEDIQKAQVSGQGDSLHEHIANLAGSPAIKKGILQTVKVVDELVKVMGRHKPENIVIEMARENQTTQKGQKNSRERMKRIEEGIKELGSQILKEHPVENTQLQNEKLYLYYLQNGRDMYVDQELDINRLSDYDVDHIVPQSFLKDDSIDNKVLTRSDKARGKSDNVPSEEVVKKMKNYWRQLLNAKLITQRKFDNLTKAERGGLSELDKAGFIKRQLVETRQITKHVAQILDSRMNTKYDENDKLIREVKVITLKSKLVSDFRKDFQFYKVREINNYHHAHDAYLNAVVGTALIKKYPKLESEFVYGDYKVYDVRKMIAKSEQEIGKATAKYFFYSNIMNFFKTEITLANGEIRKRPLIETNGETGEIVWDKGRDFATVRKVLSMPQVNIVKKTEVQTGGFSKESILPKRNSDKLIARKKDWDPKKYGGFDSPTVAYSVLVVAKVEKGKSKKLKSVKELLGITIMERSSFEKNPIDFLEAKGYKEVKKDLIIKLPKYSLFELENGRKRMLASAGELQKGNELALPSKYVNFLYLASHYEKLKGSPEDNEQKQLFVEQHKHYLDEIIEQISEFSKRVILADANLDKVLSAYNKHRDKPIREQAENIIHLFTLTNLGAPAAFKYFDTTIDRKRYTSTKEVLDATLIHQSITGLYETRIDLSQLGGDGGPAPAPAPAPGGHLPPPPQVDQFPLNLPERLQALNDLVSKALEAGHIEPYSGPGNNPVFPVKKPNGKWRFIHDLRATNAITTTLTSPSPGPPDLTSLPTALPHLQTIDLTDAFFQIPLPKQYQPYFAFTIPQPCNYGPGTRYAWTVLPQGFKNSPTLFQQQLAAVLNPMRKMFPTSTIVQYMDDILLASPTNEELQQLSQLTLQALTTHGLPISQEKTQQTPGQIRFLGQVISPNHITYESTPTIPIKSQWTLTELQVILGEIQWVSKGTPILRKHLQSLYSALHPYRDPRACITLTPQQLHALHAIQQALQHNCRGRLNPALPLLGLISLSTSGTTSVIFQPKQNWPLAWLHTPHPPTSLCPWGHLLACTILTLDKYTLQHYGQLCQSFHHNMSKQALCDFLRNSPHPSVGILIHHMGRFHNLGSQPSGPWKTLLHLPTLLQEPRLLRPIFTLSPVVLDTAPCLFSDGSPQKAAYVLWDQTILQQDITPLPSHETHSAQKGELLALICGLRAAKPWPSLNIFLDSKYLIKYLHSLAIGAFLGTSAHQTLQAALPPLLQGKTIYLHHVRSHTNLPDPISTFNEYTDSLILAPLVPLAGKRTADGSEFEKRTADGSEFESPKKKAKVE

SEQ ID NO: 1537 - protein, 2010 aa, synthetic construct
MPAAKRVKLDGGDKKYSIGLDIGTNSVGWAVITDEYKVPSKKFKVLGNTDRHSIKKNLIGALLFDSGETAEATRLKRTARRRYTRRKNRICYLQEIFSNEMAKVDDSFFHRLEESFLVEEDKKHERHPIFGNIVDEVAYHEKYPTIYHLRKKLVDSTDKADLRLIYLALAHMIKFRGHFLIEGDLNPDNSDVDKLFIQLVQTYNQLFEENPINASGVDAKAILSARLSKSRRLENLIAQLPGEKKNGLFGNLIALSLGLTPNFKSNFDLAEDAKLQLSKDTYDDDLDNLLAQIGDQYADLFLAAKNLSDAILLSDILRVNTEITKAPLSASMIKRYDEHHQDLTLLKALVRQQLPEKYKEIFFDQSKNGYAGYIDGGASQEEFYKFIKPILEKMDGTEELLVKLNREDLLRKQRTFDNGSIPHQIHLGELHAILRRQEDFYPFLKDNREKIEKILTFRIPYYVGPLARGNSRFAWMTRKSEETITPWNFEEVVDKGASAQSFIERMTNFDKNLPNEKVLPKHSLLYEYFTVYNELTKVKYVTEGMRKPAFLSGEQKKAIVDLLFKTNRKVTVKQLKEDYFKKIECFDSVEISGVEDRFNASLGTYHDLLKIIKDKDFLDNEENEDILEDIVLTLTLFEDREMIEERLKTYAHLFDDKVMKQLKRRRYTGWGRLSRKLINGIRDKQSGKTILDFLKSDGFANRNFMQLIHDDSLTFKEDIQKAQVSGQGDSLHEHIANLAGSPAIKKGILQTVKVVDELVKVMGRHKPENIVIEMARENQTTQKGQKNSRERMKRIEEGIKELGSQILKEHPVENTQLQNEKLYLYYLQNGRDMYVDQELDINRLSDYDVDHIVPQSFLKDDSIDNKVLTRSDKARGKSDNVPSEEVVKKMKNYWRQLLNAKLITQRKFDNLTKAERGGLSELDKAGFIKRQLVETRQITKHVAQILDSRMNTKYDENDKLIREVKVITLKSKLVSDFRKDFQFYKVREINNYHHAHDAYLNAVVGTALIKKYPKLESEFVYGDYKVYDVRKMIAKSEQEIGKATAKYFFYSNIMNFFKTEITLANGEIRKRPLIETNGETGEIVWDKGRDFATVRKVLSMPQVNIVKKTEVQTGGFSKESILPKRNSDKLIARKKDWDPKKYGGFDSPTVAYSVLVVAKVEKGKSKKLKSVKELLGITIMERSSFEKNPIDFLEAKGYKEVKKDLIIKLPKYSLFELENGRKRMLASAGELQKGNELALPSKYVNFLYLASHYEKLKGSPEDNEQKQLFVEQHKHYLDEIIEQISEFSKRVILADANLDKVLSAYNKHRDKPIREQAENIIHLFTLTNLGAPAAFKYFDTTIDRKRYTSTKEVLDATLIHQSITGLYETRIDLSQLGGDGGEAAAKEAAAKEAAAKGGPLGTSDSPVTHADPIDWKSEEPVWVDQWPLTQEKLSAAQQLVQEQLRLGHIEPSTSAWNSPIFVIKKKSGKWRLLQDLRKVNETMMHMGALQPGLPTPSAIPDKSYIIVIDLKDCFYTIPLAPQDCKRFAFSLPSVNFKEPMQRYQWRVLPQGMTNSPTLCQKFVATAIAPVRQRFPQLYLVHYMDDILLAHTDEHLLYQAFSILKQHLSLNGLVIADEKIQTHFPYNYLGFSLYPRVYNTQLVKLQTDHLKTLNDFQKLLGDINWIRPYLKLPTYTLQPLFDILKGDSDPASPRTLSLEGRTALQSIEEAIRQQQITYCDYQRSWGLYILPTPRAPTGVLYQDKPLRWIYLSATPTKHLLPYYELVAKIIAKGRHEAIQYFGMEPPFICVPYALEQQDWLFQFSDNWSIAFANYPGQITHHYPSDKLLQFASSHAFIFPKIVRRQPIPEATLIFTDGSSNGTAALIINHQTYYAQTSFSSAQVVELFAVHQALLTVPTSFNLFTDSSYVVGALQMIETVPIIGTTSPEVLNLFTLIQQVLHCRQHPCFFGHIRAHSTLPGALVQGNHTADVLTKQVFFQSAGKRTADGSEFEKRTADGSEFESPKKKAKVE

SEQ ID NO: 1538 - protein, 2001 aa, synthetic construct
MPAAKRVKLDGGDKKYSIGLDIGTNSVGWAVITDEYKVPSKKFKVLGNTDRHSIKKNLIGALLFDSGETAEATRLKRTARRRYTRRKNRICYLQEIFSNEMAKVDDSFFHRLEESFLVEEDKKHERHPIFGNIVDEVAYHEKYPTIYHLRKKLVDSTDKADLRLIYLALAHMIKFRGHFLIEGDLNPDNSDVDKLFIQLVQTYNQLFEENPINASGVDAKAILSARLSKSRRLENLIAQLPGEKKNGLFGNLIALSLGLTPNFKSNFDLAEDAKLQLSKDTYDDDLDNLLAQIGDQYADLFLAAKNLSDAILLSDILRVNTEITKAPLSASMIKRYDEHHQDLTLLKALVRQQLPEKYKEIFFDQSKNGYAGYIDGGASQEEFYKFIKPILEKMDGTEELLVKLNREDLLRKQRTFDNGSIPHQIHLGELHAILRRQEDFYPFLKDNREKIEKILTFRIPYYVGPLARGNSRFAWMTRKSEETITPWNFEEVVDKGASAQSFIERMTNFDKNLPNEKVLPKHSLLYEYFTVYNELTKVKYVTEGMRKPAFLSGEQKKAIVDLLFKTNRKVTVKQLKEDYFKKIECFDSVEISGVEDRFNASLGTYHDLLKIIKDKDFLDNEENEDILEDIVLTLTLFEDREMIEERLKTYAHLFDDKVMKQLKRRRYTGWGRLSRKLINGIRDKQSGKTILDFLKSDGFANRNFMQLIHDDSLTFKEDIQKAQVSGQGDSLHEHIANLAGSPAIKKGILQTVKVVDELVKVMGRHKPENIVIEMARENQTTQKGQKNSRERMKRIEEGIKELGSQILKEHPVENTQLQNEKLYLYYLQNGRDMYVDQELDINRLSDYDVDHIVPQSFLKDDSIDNKVLTRSDKARGKSDNVPSEEVVKKMKNYWRQLLNAKLITQRKFDNLTKAERGGLSELDKAGFIKRQLVETRQITKHVAQILDSRMNTKYDENDKLIREVKVITLKSKLVSDFRKDFQFYKVREINNYHHAHDAYLNAVVGTALIKKYPKLESEFVYGDYKVYDVRKMIAKSEQEIGKATAKYFFYSNIMNFFKTEITLANGEIRKRPLIETNGETGEIVWDKGRDFATVRKVLSMPQVNIVKKTEVQTGGFSKESILPKRNSDKLIARKKDWDPKKYGGFDSPTVAYSVLVVAKVEKGKSKKLKSVKELLGITIMERSSFEKNPIDFLEAKGYKEVKKDLIIKLPKYSLFELENGRKRMLASAGELQKGNELALPSKYVNFLYLASHYEKLKGSPEDNEQKQLFVEQHKHYLDEIIEQISEFSKRVILADANLDKVLSAYNKHRDKPIREQAENIIHLFTLTNLGAPAAFKYFDTTIDRKRYTSTKEVLDATLIHQSITGLYETRIDLSQLGGDGGGSSGGGGGPLGTSDSPVTHADPIDWKSEEPVWVDQWPLTQEKLSAAQQLVQEQLRLGHIEPSTSAWNSPIFVIKKKSGKWRLLQDLRKVNETMMHMGALQPGLPTPSAIPDKSYIIVIDLKDCFYTIPLAPQDCKRFAFSLPSVNFKEPMQRYQWRVLPQGMTNSPTLCQKFVATAIAPVRQRFPQLYLVHYMDDILLAHTDEHLLYQAFSILKQHLSLNGLVIADEKIQTHFPYNYLGFSLYPRVYNTQLVKLQTDHLKTLNDFQKLLGDINWIRPYLKLPTYTLQPLFDILKGDSDPASPRTLSLEGRTALQSIEEAIRQQQITYCDYQRSWGLYILPTPRAPTGVLYQDKPLRWIYLSATPTKHLLPYYELVAKIIAKGRHEAIQYFGMEPPFICVPYALEQQDWLFQFSDNWSIAFANYPGQITHHYPSDKLLQFASSHAFIFPKIVRRQPIPEATLIFTDGSSNGTAALIINHQTYYAQTSFSSAQVVELFAVHQALLTVPTSFNLFTDSSYVVGALQMIETVPIIGTTSPEVLNLFTLIQQVLHCRQHPCFFGHIRAHSTLPGALVQGNHTADVLTKQVFFQSAGKRTADGSEFEKRTADGSEFESPKKKAKVE

SEQ ID NO: 1539 - protein, 2106 aa, synthetic construct
MPAAKRVKLDGGDKKYSIGLDIGTNSVGWAVITDEYKVPSKKFKVLGNTDRHSIKKNLIGALLFDSGETAEATRLKRTARRRYTRRKNRICYLQEIFSNEMAKVDDSFFHRLEESFLVEEDKKHERHPIFGNIVDEVAYHEKYPTIYHLRKKLVDSTDKADLRLIYLALAHMIKFRGHFLIEGDLNPDNSDVDKLFIQLVQTYNQLFEENPINASGVDAKAILSARLSKSRRLENLIAQLPGEKKNGLFGNLIALSLGLTPNFKSNFDLAEDAKLQLSKDTYDDDLDNLLAQIGDQYADLFLAAKNLSDAILLSDILRVNTEITKAPLSASMIKRYDEHHQDLTLLKALVRQQLPEKYKEIFFDQSKNGYAGYIDGGASQEEFYKFIKPILEKMDGTEELLVKLNREDLLRKQRTFDNGSIPHQIHLGELHAILRRQEDFYPFLKDNREKIEKILTFRIPYYVGPLARGNSRFAWMTRKSEETITPWNFEEVVDKGASAQSFIERMTNFDKNLPNEKVLPKHSLLYEYFTVYNELTKVKYVTEGMRKPAFLSGEQKKAIVDLLFKTNRKVTVKQLKEDYFKKIECFDSVEISGVEDRFNASLGTYHDLLKIIKDKDFLDNEENEDILEDIVLTLTLFEDREMIEERLKTYAHLFDDKVMKQLKRRRYTGWGRLSRKLINGIRDKQSGKTILDFLKSDGFANRNFMQLIHDDSLTFKEDIQKAQVSGQGDSLHEHIANLAGSPAIKKGILQTVKVVDELVKVMGRHKPENIVIEMARENQTTQKGQKNSRERMKRIEEGIKELGSQILKEHPVENTQLQNEKLYLYYLQNGRDMYVDQELDINRLSDYDVDHIVPQSFLKDDSIDNKVLTRSDKARGKSDNVPSEEVVKKMKNYWRQLLNAKLITQRKFDNLTKAERGGLSELDKAGFIKRQLVETRQITKHVAQILDSRMNTKYDENDKLIREVKVITLKSKLVSDFRKDFQFYKVREINNYHHAHDAYLNAVVGTALIKKYPKLESEFVYGDYKVYDVRKMIAKSEQEIGKATAKYFFYSNIMNFFKTEITLANGEIRKRPLIETNGETGEIVWDKGRDFATVRKVLSMPQVNIVKKTEVQTGGFSKESILPKRNSDKLIARKKDWDPKKYGGFDSPTVAYSVLVVAKVEKGKSKKLKSVKELLGITIMERSSFEKNPIDFLEAKGYKEVKKDLIIKLPKYSLFELENGRKRMLASAGELQKGNELALPSKYVNFLYLASHYEKLKGSPEDNEQKQLFVEQHKHYLDEIIEQISEFSKRVILADANLDKVLSAYNKHRDKPIREQAENIIHLFTLTNLGAPAAFKYFDTTIDRKRYTSTKEVLDATLIHQSITGLYETRIDLSQLGGDGGEAAAKGGGGSEAAAKGGTVSLQDEHRLFDIPVTTSLPDVWLQDFPQAWAETGGLGRAKCQAPIIIDLKPTAVPVSIKQYPMSLEAHMGIRQHIIKFLELGVLRPCRSPWNTPLLPVKKPGTQDYRPVQDLREINKRTVDIHPTVPNPYNLLSTLKPDYSWYTVLDLKDAFFCLPLAPQSQELFAFEWKDPERGISGQLTWTRLPQGFKNSPTLFNEALHRDLTDFRTQHPEVTLLQYVDDLLLAAPTKKACTQGTRHLLQELGEKGYRASAKKAQICQTKVTYLGYILSEGKRWLTPGRIETVARIPPPRNPREVREFLGTAGFCRLWIPGFAELAAPLYALTKPSTPFTWQTEHQLAFEALKKALLSAPALGLPDTSKPFTLFLDERQGIAKGVLTQKLGPWKRPVAYLSKKLDPVAAGWPPCLRIMAATAMLVKDSAKLTLGQPLTVITPHTLEAIVRQPPDRWITNARLTHYQALLLDTDRVQFGPPVTLNPATLLPVPENQPSPHDCRQVLAETHGTREDLKDQELPDADHTWYTDGSSYLDSGTRRAGAAVVDGHNTIWAQSLPPGTSAQKAELIALTKALELSKGKKANIYTDSRYAFATAHTHGSIYERRGWLTSEGKEIKNKAEIIALLKALFLPQEVAIIHCPGHQKGQDPVAVGNRQADRVARQAAMAEVLTLATEPDNTSHITAGKRTADGSEFEKRTADGSEFESPKKKAKVE

SEQ ID NO: 1540 - protein, 2102 aa, synthetic construct
MPAAKRVKLDGGDKKYSIGLDIGTNSVGWAVITDEYKVPSKKFKVLGNTDRHSIKKNLIGALLFDSGETAEATRLKRTARRRYTRRKNRICYLQEIFSNEMAKVDDSFFHRLEESFLVEEDKKHERHPIFGNIVDEVAYHEKYPTIYHLRKKLVDSTDKADLRLIYLALAHMIKFRGHFLIEGDLNPDNSDVDKLFIQLVQTYNQLFEENPINASGVDAKAILSARLSKSRRLENLIAQLPGEKKNGLFGNLIALSLGLTPNFKSNFDLAEDAKLQLSKDTYDDDLDNLLAQIGDQYADLFLAAKNLSDAILLSDILRVNTEITKAPLSASMIKRYDEHHQDLTLLKALVRQQLPEKYKEIFFDQSKNGYAGYIDGGASQEEFYKFIKPILEKMDGTEELLVKLNREDLLRKQRTFDNGSIPHQIHLGELHAILRRQEDFYPFLKDNREKIEKILTFRIPYYVGPLARGNSRFAWMTRKSEETITPWNFEEVVDKGASAQSFIERMTNFDKNLPNEKVLPKHSLLYEYFTVYNELTKVKYVTEGMRKPAFLSGEQKKAIVDLLFKTNRKVTVKQLKEDYFKKIECFDSVEISGVEDRFNASLGTYHDLLKIIKDKDFLDNEENEDILEDIVLTLTLFEDREMIEERLKTYAHLFDDKVMKQLKRRRYTGWGRLSRKLINGIRDKQSGKTILDFLKSDGFANRNFMQLIHDDSLTFKEDIQKAQVSGQGDSLHEHIANLAGSPAIKKGILQTVKVVDELVKVMGRHKPENIVIEMARENQTTQKGQKNSRERMKRIEEGIKELGSQILKEHPVENTQLQNEKLYLYYLQNGRDMYVDQELDINRLSDYDVDHIVPQSFLKDDSIDNKVLTRSDKARGKSDNVPSEEVVKKMKNYWRQLLNAKLITQRKFDNLTKAERGGLSELDKAGFIKRQLVETRQITKHVAQILDSRMNTKYDENDKLIREVKVITLKSKLVSDFRKDFQFYKVREINNYHHAHDAYLNAVVGTALIKKYPKLESEFVYGDYKVYDVRKMIAKSEQEIGKATAKYFFYSNIMNFFKTEITLANGEIRKRPLIETNGETGEIVWDKGRDFATVRKVLSMPQVNIVKKTEVQTGGFSKESILPKRNSDKLIARKKDWDPKKYGGFDSPTVAYSVLVVAKVEKGKSKKLKSVKELLGITIMERSSFEKNPIDFLEAKGYKEVKKDLIIKLPKYSLFELENGRKRMLASAGELQKGNELALPSKYVNFLYLASHYEKLKGSPEDNEQKQLFVEQHKHYLDEIIEQISEFSKRVILADANLDKVLSAYNKHRDKPIREQAENIIHLFTLTNLGAPAAFKYFDTTIDRKRYTSTKEVLDATLIHQSITGLYETRIDLSQLGGDGGGGGGSSEAAAKGGTVSLQDEHRLFDIPVTTSLPDVWLQDFPQAWAETGGLGRAKCQAPIIIDLKPTAVPVSIKQYPMSLEAHMGIRQHIIKFLELGVLRPCRSPWNTPLLPVKKPGTQDYRPVQDLREINKRTVDIHPTVPNPYNLLSTLKPDYSWYTVLDLKDAFFCLPLAPQSQELFAFEWKDPERGISGQLTWTRLPQGFKNSPTLFNEALHRDLTDFRTQHPEVTLLQYVDDLLLAAPTKKACTQGTRHLLQELGEKGYRASAKKAQICQTKVTYLGYILSEGKRWLTPGRIETVARIPPPRNPREVREFLGTAGFCRLWIPGFAELAAPLYALTKPSTPFTWQTEHQLAFEALKKALLSAPALGLPDTSKPFTLFLDERQGIAKGVLTQKLGPWKRPVAYLSKKLDPVAAGWPPCLRIMAATAMLVKDSAKLTLGQPLTVITPHTLEAIVRQPPDRWITNARLTHYQALLLDTDRVQFGPPVTLNPATLLPVPENQPSPHDCRQVLAETHGTREDLKDQELPDADHTWYTDGSSYLDSGTRRAGAAVVDGHNTIWAQSLPPGTSAQKAELIALTKALELSKGKKANIYTDSRYAFATAHTHGSIYERRGWLTSEGKEIKNKAEIIALLKALFLPQEVAIIHCPGHQKGQDPVAVGNRQADRVARQAAMAEVLTLATEPDNTSHITAGKRTADGSEFEKRTADGSEFESPKKKAKVE

SEQ ID NO: 1541 - protein, 2094 aa, synthetic construct
MPAAKRVKLDGGDKKYSIGLDIGTNSVGWAVITDEYKVPSKKFKVLGNTDRHSIKKNLIGALLFDSGETAEATRLKRTARRRYTRRKNRICYLQEIFSNEMAKVDDSFFHRLEESFLVEEDKKHERHPIFGNIVDEVAYHEKYPTIYHLRKKLVDSTDKADLRLIYLALAHMIKFRGHFLIEGDLNPDNSDVDKLFIQLVQTYNQLFEENPINASGVDAKAILSARLSKSRRLENLIAQLPGEKKNGLFGNLIALSLGLTPNFKSNFDLAEDAKLQLSKDTYDDDLDNLLAQIGDQYADLFLAAKNLSDAILLSDILRVNTEITKAPLSASMIKRYDEHHQDLTLLKALVRQQLPEKYKEIFFDQSKNGYAGYIDGGASQEEFYKFIKPILEKMDGTEELLVKLNREDLLRKQRTFDNGSIPHQIHLGELHAILRRQEDFYPFLKDNREKIEKILTFRIPYYVGPLARGNSRFAWMTRKSEETITPWNFEEVVDKGASAQSFIERMTNFDKNLPNEKVLPKHSLLYEYFTVYNELTKVKYVTEGMRKPAFLSGEQKKAIVDLLFKTNRKVTVKQLKEDYFKKIECFDSVEISGVEDRFNASLGTYHDLLKIIKDKDFLDNEENEDILEDIVLTLTLFEDREMIEERLKTYAHLFDDKVMKQLKRRRYTGWGRLSRKLINGIRDKQSGKTILDFLKSDGFANRNFMQLIHDDSLTFKEDIQKAQVSGQGDSLHEHIANLAGSPAIKKGILQTVKVVDELVKVMGRHKPENIVIEMARENQTTQKGQKNSRERMKRIEEGIKELGSQILKEHPVENTQLQNEKLYLYYLQNGRDMYVDQELDINRLSDYDVDHIVPQSFLKDDSIDNKVLTRSDKARGKSDNVPSEEVVKKMKNYWRQLLNAKLITQRKFDNLTKAERGGLSELDKAGFIKRQLVETRQITKHVAQILDSRMNTKYDENDKLIREVKVITLKSKLVSDFRKDFQFYKVREINNYHHAHDAYLNAVVGTALIKKYPKLESEFVYGDYKVYDVRKMIAKSEQEIGKATAKYFFYSNIMNFFKTEITLANGEIRKRPLIETNGETGEIVWDKGRDFATVRKVLSMPQVNIVKKTEVQTGGFSKESILPKRNSDKLIARKKDWDPKKYGGFDSPTVAYSVLVVAKVEKGKSKKLKSVKELLGITIMERSSFEKNPIDFLEAKGYKEVKKDLIIKLPKYSLFELENGRKRMLASAGELQKGNELALPSKYVNFLYLASHYEKLKGSPEDNEQKQLFVEQHKHYLDEIIEQISEFSKRVILADANLDKVLSAYNKHRDKPIREQAENIIHLFTLTNLGAPAAFKYFDTTIDRKRYTSTKEVLDATLIHQSITGLYETRIDLSQLGGDGGGGSGGTVSLQDEHRLFDIPVTTSLPDVWLQDFPQAWAETGGLGRAKCQAPIIIDLKPTAVPVSIKQYPMSLEAHMGIRQHIIKFLELGVLRPCRSPWNTPLLPVKKPGTQDYRPVQDLREINKRTVDIHPTVPNPYNLLSTLKPDYSWYTVLDLKDAFFCLPLAPQSQELFAFEWKDPERGISGQLTWTRLPQGFKNSPTLFNEALHRDLTDFRTQHPEVTLLQYVDDLLLAAPTKKACTQGTRHLLQELGEKGYRASAKKAQICQTKVTYLGYILSEGKRWLTPGRIETVARIPPPRNPREVREFLGTAGFCRLWIPGFAELAAPLYALTKPSTPFTWQTEHQLAFEALKKALLSAPALGLPDTSKPFTLFLDERQGIAKGVLTQKLGPWKRPVAYLSKKLDPVAAGWPPCLRIMAATAMLVKDSAKLTLGQPLTVITPHTLEAIVRQPPDRWITNARLTHYQALLLDTDRVQFGPPVTLNPATLLPVPENQPSPHDCRQVLAETHGTREDLKDQELPDADHTWYTDGSSYLDSGTRRAGAAVVDGHNTIWAQSLPPGTSAQKAELIALTKALELSKGKKANIYTDSRYAFATAHTHGSIYERRGWLTSEGKEIKNKAEIIALLKALFLPQEVAIIHCPGHQKGQDPVAVGNRQADRVARQAAMAEVLTLATEPDNTSHITAGKRTADGSEFEKRTADGSEFESPKKKAKVE

SEQ ID NO: 1542 - protein, 2137 aa, synthetic construct
MPAAKRVKLDGGDKKYSIGLDIGTNSVGWAVITDEYKVPSKKFKVLGNTDRHSIKKNLIGALLFDSGETAEATRLKRTARRRYTRRKNRICYLQEIFSNEMAKVDDSFFHRLEESFLVEEDKKHERHPIFGNIVDEVAYHEKYPTIYHLRKKLVDSTDKADLRLIYLALAHMIKFRGHFLIEGDLNPDNSDVDKLFIQLVQTYNQLFEENPINASGVDAKAILSARLSKSRRLENLIAQLPGEKKNGLFGNLIALSLGLTPNFKSNFDLAEDAKLQLSKDTYDDDLDNLLAQIGDQYADLFLAAKNLSDAILLSDILRVNTEITKAPLSASMIKRYDEHHQDLTLLKALVRQQLPEKYKEIFFDQSKNGYAGYIDGGASQEEFYKFIKPILEKMDGTEELLVKLNREDLLRKQRTFDNGSIPHQIHLGELHAILRRQEDFYPFLKDNREKIEKILTFRIPYYVGPLARGNSRFAWMTRKSEETITPWNFEEVVDKGASAQSFIERMTNFDKNLPNEKVLPKHSLLYEYFTVYNELTKVKYVTEGMRKPAFLSGEQKKAIVDLLFKTNRKVTVKQLKEDYFKKIECFDSVEISGVEDRFNASLGTYHDLLKIIKDKDFLDNEENEDILEDIVLTLTLFEDREMIEERLKTYAHLFDDKVMKQLKRRRYTGWGRLSRKLINGIRDKQSGKTILDFLKSDGFANRNFMQLIHDDSLTFKEDIQKAQVSGQGDSLHEHIANLAGSPAIKKGILQTVKVVDELVKVMGRHKPENIVIEMARENQTTQKGQKNSRERMKRIEEGIKELGSQILKEHPVENTQLQNEKLYLYYLQNGRDMYVDQELDINRLSDYDVDHIVPQSFLKDDSIDNKVLTRSDKARGKSDNVPSEEVVKKMKNYWRQLLNAKLITQRKFDNLTKAERGGLSELDKAGFIKRQLVETRQITKHVAQILDSRMNTKYDENDKLIREVKVITLKSKLVSDFRKDFQFYKVREINNYHHAHDAYLNAVVGTALIKKYPKLESEFVYGDYKVYDVRKMIAKSEQEIGKATAKYFFYSNIMNFFKTEITLANGEIRKRPLIETNGETGEIVWDKGRDFATVRKVLSMPQVNIVKKTEVQTGGFSKESILPKRNSDKLIARKKDWDPKKYGGFDSPTVAYSVLVVAKVEKGKSKKLKSVKELLGITIMERSSFEKNPIDFLEAKGYKEVKKDLIIKLPKYSLFELENGRKRMLASAGELQKGNELALPSKYVNFLYLASHYEKLKGSPEDNEQKQLFVEQHKHYLDEIIEQISEFSKRVILADANLDKVLSAYNKHRDKPIREQAENIIHLFTLTNLGAPAAFKYFDTTIDRKRYTSTKEVLDATLIHQSITGLYETRIDLSQLGGDGGAEAAAKEAAAKEAAAKEAAAKALEAEAAAKEAAAKEAAAKEAAAKAGGTVSLQDEHRLFDIPVTTSLPDVWLQDFPQAWAETGGLGRAKCQAPIIIDLKPTAVPVSIKQYPMSLEAHMGIRQHIIKFLELGVLRPCRSPWNTPLLPVKKPGTQDYRPVQDLREINKRTVDIHPTVPNPYNLLSTLKPDYSWYTVLDLKDAFFCLPLAPQSQELFAFEWKDPERGISGQLTWTRLPQGFKNSPTLFNEALHRDLTDFRTQHPEVTLLQYVDDLLLAAPTKKACTQGTRHLLQELGEKGYRASAKKAQICQTKVTYLGYILSEGKRWLTPGRIETVARIPPPRNPREVREFLGTAGFCRLWIPGFAELAAPLYALTKPSTPFTWQTEHQLAFEALKKALLSAPALGLPDTSKPFTLFLDERQGIAKGVLTQKLGPWKRPVAYLSKKLDPVAAGWPPCLRIMAATAMLVKDSAKLTLGQPLTVITPHTLEAIVRQPPDRWITNARLTHYQALLLDTDRVQFGPPVTLNPATLLPVPENQPSPHDCRQVLAETHGTREDLKDQELPDADHTWYTDGSSYLDSGTRRAGAAVVDGHNTIWAQSLPPGTSAQKAELIALTKALELSKGKKANIYTDSRYAFATAHTHGSIYERRGWLTSEGKEIKNKAEIIALLKALFLPQEVAIIHCPGHQKGQDPVAVGNRQADRVARQAAMAEVLTLATEPDNTSHITAGKRTADGSEFEKRTADGSEFESPKKKAKVE

SEQ ID NO: 1543 - protein, 2116 aa, synthetic construct
MPAAKRVKLDGGDKKYSIGLDIGTNSVGWAVITDEYKVPSKKFKVLGNTDRHSIKKNLIGALLFDSGETAEATRLKRTARRRYTRRKNRICYLQEIFSNEMAKVDDSFFHRLEESFLVEEDKKHERHPIFGNIVDEVAYHEKYPTIYHLRKKLVDSTDKADLRLIYLALAHMIKFRGHFLIEGDLNPDNSDVDKLFIQLVQTYNQLFEENPINASGVDAKAILSARLSKSRRLENLIAQLPGEKKNGLFGNLIALSLGLTPNFKSNFDLAEDAKLQLSKDTYDDDLDNLLAQIGDQYADLFLAAKNLSDAILLSDILRVNTEITKAPLSASMIKRYDEHHQDLTLLKALVRQQLPEKYKEIFFDQSKNGYAGYIDGGASQEEFYKFIKPILEKMDGTEELLVKLNREDLLRKQRTFDNGSIPHQIHLGELHAILRRQEDFYPFLKDNREKIEKILTFRIPYYVGPLARGNSRFAWMTRKSEETITPWNFEEVVDKGASAQSFIERMTNFDKNLPNEKVLPKHSLLYEYFTVYNELTKVKYVTEGMRKPAFLSGEQKKAIVDLLFKTNRKVTVKQLKEDYFKKIECFDSVEISGVEDRFNASLGTYHDLLKIIKDKDFLDNEENEDILEDIVLTLTLFEDREMIEERLKTYAHLFDDKVMKQLKRRRYTGWGRLSRKLINGIRDKQSGKTILDFLKSDGFANRNFMQLIHDDSLTFKEDIQKAQVSGQGDSLHEHIANLAGSPAIKKGILQTVKVVDELVKVMGRHKPENIVIEMARENQTTQKGQKNSRERMKRIEEGIKELGSQILKEHPVENTQLQNEKLYLYYLQNGRDMYVDQELDINRLSDYDVDHIVPQSFLKDDSIDNKVLTRSDKARGKSDNVPSEEVVKKMKNYWRQLLNAKLITQRKFDNLTKAERGGLSELDKAGFIKRQLVETRQITKHVAQILDSRMNTKYDENDKLIREVKVITLKSKLVSDFRKDFQFYKVREINNYHHAHDAYLNAVVGTALIKKYPKLESEFVYGDYKVYDVRKMIAKSEQEIGKATAKYFFYSNIMNFFKTEITLANGEIRKRPLIETNGETGEIVWDKGRDFATVRKVLSMPQVNIVKKTEVQTGGFSKESILPKRNSDKLIARKKDWDPKKYGGFDSPTVAYSVLVVAKVEKGKSKKLKSVKELLGITIMERSSFEKNPIDFLEAKGYKEVKKDLIIKLPKYSLFELENGRKRMLASAGELQKGNELALPSKYVNFLYLASHYEKLKGSPEDNEQKQLFVEQHKHYLDEIIEQISEFSKRVILADANLDKVLSAYNKHRDKPIREQAENIIHLFTLTNLGAPAAFKYFDTTIDRKRYTSTKEVLDATLIHQSITGLYETRIDLSQLGGDGGGGGGSGGGGSGGGGSGGGGSGGGGSGGTVSLQDEHRLFDIPVTTSLPDVWLQDFPQAWAETGGLGRAKCQAPIIIDLKPTAVPVSIKQYPMSLEAHMGIRQHIIKFLELGVLRPCRSPWNTPLLPVKKPGTQDYRPVQDLREINKRTVDIHPTVPNPYNLLSTLKPDYSWYTVLDLKDAFFCLPLAPQSQELFAFEWKDPERGISGQLTWTRLPQGFKNSPTLFNEALHRDLTDFRTQHPEVTLLQYVDDLLLAAPTKKACTQGTRHLLQELGEKGYRASAKKAQICQTKVTYLGYILSEGKRWLTPGRIETVARIPPPRNPREVREFLGTAGFCRLWIPGFAELAAPLYALTKPSTPFTWQTEHQLAFEALKKALLSAPALGLPDTSKPFTLFLDERQGIAKGVLTQKLGPWKRPVAYLSKKLDPVAAGWPPCLRIMAATAMLVKDSAKLTLGQPLTVITPHTLEAIVRQPPDRWITNARLTHYQALLLDTDRVQFGPPVTLNPATLLPVPENQPSPHDCRQVLAETHGTREDLKDQELPDADHTWYTDGSSYLDSGTRRAGAAVVDGHNTIWAQSLPPGTSAQKAELIALTKALELSKGKKANIYTDSRYAFATAHTHGSIYERRGWLTSEGKEIKNKAEIIALLKALFLPQEVAIIHCPGHQKGQDPVAVGNRQADRVARQAAMAEVLTLATEPDNTSHITAGKRTADGSEFEKRTADGSEFESPKKKAKVE

SEQ ID NO: 1544 - protein, 2099 aa, synthetic construct
MPAAKRVKLDGGDKKYSIGLDIGTNSVGWAVITDEYKVPSKKFKVLGNTDRHSIKKNLIGALLFDSGETAEATRLKRTARRRYTRRKNRICYLQEIFSNEMAKVDDSFFHRLEESFLVEEDKKHERHPIFGNIVDEVAYHEKYPTIYHLRKKLVDSTDKADLRLIYLALAHMIKFRGHFLIEGDLNPDNSDVDKLFIQLVQTYNQLFEENPINASGVDAKAILSARLSKSRRLENLIAQLPGEKKNGLFGNLIALSLGLTPNFKSNFDLAEDAKLQLSKDTYDDDLDNLLAQIGDQYADLFLAAKNLSDAILLSDILRVNTEITKAPLSASMIKRYDEHHQDLTLLKALVRQQLPEKYKEIFFDQSKNGYAGYIDGGASQEEFYKFIKPILEKMDGTEELLVKLNREDLLRKQRTFDNGSIPHQIHLGELHAILRRQEDFYPFLKDNREKIEKILTFRIPYYVGPLARGNSRFAWMTRKSEETITPWNFEEVVDKGASAQSFIERMTNFDKNLPNEKVLPKHSLLYEYFTVYNELTKVKYVTEGMRKPAFLSGEQKKAIVDLLFKTNRKVTVKQLKEDYFKKIECFDSVEISGVEDRFNASLGTYHDLLKIIKDKDFLDNEENEDILEDIVLTLTLFEDREMIEERLKTYAHLFDDKVMKQLKRRRYTGWGRLSRKLINGIRDKQSGKTILDFLKSDGFANRNFMQLIHDDSLTFKEDIQKAQVSGQGDSLHEHIANLAGSPAIKKGILQTVKVVDELVKVMGRHKPENIVIEMARENQTTQKGQKNSRERMKRIEEGIKELGSQILKEHPVENTQLQNEKLYLYYLQNGRDMYVDQELDINRLSDYDVDHIVPQSFLKDDSIDNKVLTRSDKARGKSDNVPSEEVVKKMKNYWRQLLNAKLITQRKFDNLTKAERGGLSELDKAGFIKRQLVETRQITKHVAQILDSRMNTKYDENDKLIREVKVITLKSKLVSDFRKDFQFYKVREINNYHHAHDAYLNAVVGTALIKKYPKLESEFVYGDYKVYDVRKMIAKSEQEIGKATAKYFFYSNIMNFFKTEITLANGEIRKRPLIETNGETGEIVWDKGRDFATVRKVLSMPQVNIVKKTEVQTGGFSKESILPKRNSDKLIARKKDWDPKKYGGFDSPTVAYSVLVVAKVEKGKSKKLKSVKELLGITIMERSSFEKNPIDFLEAKGYKEVKKDLIIKLPKYSLFELENGRKRMLASAGELQKGNELALPSKYVNFLYLASHYEKLKGSPEDNEQKQLFVEQHKHYLDEIIEQISEFSKRVILADANLDKVLSAYNKHRDKPIREQAENIIHLFTLTNLGAPAAFKYFDTTIDRKRYTSTKEVLDATLIHQSITGLYETRIDLSQLGGDGGEAAAKPAPGGTVSLQDEHRLFDIPVTTSLPDVWLQDFPQAWAETGGLGRAKCQAPIIIDLKPTAVPVSIKQYPMSLEAHMGIRQHIIKFLELGVLRPCRSPWNTPLLPVKKPGTQDYRPVQDLREINKRTVDIHPTVPNPYNLLSTLKPDYSWYTVLDLKDAFFCLPLAPQSQELFAFEWKDPERGISGQLTWTRLPQGFKNSPTLFNEALHRDLTDFRTQHPEVTLLQYVDDLLLAAPTKKACTQGTRHLLQELGEKGYRASAKKAQICQTKVTYLGYILSEGKRWLTPGRIETVARIPPPRNPREVREFLGTAGFCRLWIPGFAELAAPLYALTKPSTPFTWQTEHQLAFEALKKALLSAPALGLPDTSKPFTLFLDERQGIAKGVLTQKLGPWKRPVAYLSKKLDPVAAGWPPCLRIMAATAMLVKDSAKLTLGQPLTVITPHTLEAIVRQPPDRWITNARLTHYQALLLDTDRVQFGPPVTLNPATLLPVPENQPSPHDCRQVLAETHGTREDLKDQELPDADHTWYTDGSSYLDSGTRRAGAAVVDGHNTIWAQSLPPGTSAQKAELIALTKALELSKGKKANIYTDSRYAFATAHTHGSIYERRGWLTSEGKEIKNKAEIIALLKALFLPQEVAIIHCPGHQKGQDPVAVGNRQADRVARQAAMAEVLTLATEPDNTSHITAGKRTADGSEFEKRTADGSEFESPKKKAKVE

SEQ ID NO: 1545 - protein, 2094 aa, synthetic construct
MPAAKRVKLDGGDKKYSIGLDIGTNSVGWAVITDEYKVPSKKFKVLGNTDRHSIKKNLIGALLFDSGETAEATRLKRTARRRYTRRKNRICYLQEIFSNEMAKVDDSFFHRLEESFLVEEDKKHERHPIFGNIVDEVAYHEKYPTIYHLRKKLVDSTDKADLRLIYLALAHMIKFRGHFLIEGDLNPDNSDVDKLFIQLVQTYNQLFEENPINASGVDAKAILSARLSKSRRLENLIAQLPGEKKNGLFGNLIALSLGLTPNFKSNFDLAEDAKLQLSKDTYDDDLDNLLAQIGDQYADLFLAAKNLSDAILLSDILRVNTEITKAPLSASMIKRYDEHHQDLTLLKALVRQQLPEKYKEIFFDQSKNGYAGYIDGGASQEEFYKFIKPILEKMDGTEELLVKLNREDLLRKQRTFDNGSIPHQIHLGELHAILRRQEDFYPFLKDNREKIEKILTFRIPYYVGPLARGNSRFAWMTRKSEETITPWNFEEVVDKGASAQSFIERMTNFDKNLPNEKVLPKHSLLYEYFTVYNELTKVKYVTEGMRKPAFLSGEQKKAIVDLLFKTNRKVTVKQLKEDYFKKIECFDSVEISGVEDRFNASLGTYHDLLKIIKDKDFLDNEENEDILEDIVLTLTLFEDREMIEERLKTYAHLFDDKVMKQLKRRRYTGWGRLSRKLINGIRDKQSGKTILDFLKSDGFANRNFMQLIHDDSLTFKEDIQKAQVSGQGDSLHEHIANLAGSPAIKKGILQTVKVVDELVKVMGRHKPENIVIEMARENQTTQKGQKNSRERMKRIEEGIKELGSQILKEHPVENTQLQNEKLYLYYLQNGRDMYVDQELDINRLSDYDVDHIVPQSFLKDDSIDNKVLTRSDKARGKSDNVPSEEVVKKMKNYWRQLLNAKLITQRKFDNLTKAERGGLSELDKAGFIKRQLVETRQITKHVAQILDSRMNTKYDENDKLIREVKVITLKSKLVSDFRKDFQFYKVREINNYHHAHDAYLNAVVGTALIKKYPKLESEFVYGDYKVYDVRKMIAKSEQEIGKATAKYFFYSNIMNFFKTEITLANGEIRKRPLIETNGETGEIVWDKGRDFATVRKVLSMPQVNIVKKTEVQTGGFSKESILPKRNSDKLIARKKDWDPKKYGGFDSPTVAYSVLVVAKVEKGKSKKLKSVKELLGITIMERSSFEKNPIDFLEAKGYKEVKKDLIIKLPKYSLFELENGRKRMLASAGELQKGNELALPSKYVNFLYLASHYEKLKGSPEDNEQKQLFVEQHKHYLDEIIEQISEFSKRVILADANLDKVLSAYNKHRDKPIREQAENIIHLFTLTNLGAPAAFKYFDTTIDRKRYTSTKEVLDATLIHQSITGLYETRIDLSQLGGDGGGSSGGTVSLQDEHRLFDIPVTTSLPDVWLQDFPQAWAETGGLGRAKCQAPIIIDLKPTAVPVSIKQYPMSLEAHMGIRQHIIKFLELGVLRPCRSPWNTPLLPVKKPGTQDYRPVQDLREINKRTVDIHPTVPNPYNLLSTLKPDYSWYTVLDLKDAFFCLPLAPQSQELFAFEWKDPERGISGQLTWTRLPQGFKNSPTLFNEALHRDLTDFRTQHPEVTLLQYVDDLLLAAPTKKACTQGTRHLLQELGEKGYRASAKKAQICQTKVTYLGYILSEGKRWLTPGRIETVARIPPPRNPREVREFLGTAGFCRLWIPGFAELAAPLYALTKPSTPFTWQTEHQLAFEALKKALLSAPALGLPDTSKPFTLFLDERQGIAKGVLTQKLGPWKRPVAYLSKKLDPVAAGWPPCLRIMAATAMLVKDSAKLTLGQPLTVITPHTLEAIVRQPPDRWITNARLTHYQALLLDTDRVQFGPPVTLNPATLLPVPENQPSPHDCRQVLAETHGTREDLKDQELPDADHTWYTDGSSYLDSGTRRAGAAVVDGHNTIWAQSLPPGTSAQKAELIALTKALELSKGKKANIYTDSRYAFATAHTHGSIYERRGWLTSEGKEIKNKAEIIALLKALFLPQEVAIIHCPGHQKGQDPVAVGNRQADRVARQAAMAEVLTLATEPDNTSHITAGKRTADGSEFEKRTADGSEFESPKKKAKVE

SEQ ID NO: 1546 - protein, 2116 aa, synthetic construct
MPAAKRVKLDGGDKKYSIGLDIGTNSVGWAVITDEYKVPSKKFKVLGNTDRHSIKKNLIGALLFDSGETAEATRLKRTARRRYTRRKNRICYLQEIFSNEMAKVDDSFFHRLEESFLVEEDKKHERHPIFGNIVDEVAYHEKYPTIYHLRKKLVDSTDKADLRLIYLALAHMIKFRGHFLIEGDLNPDNSDVDKLFIQLVQTYNQLFEENPINASGVDAKAILSARLSKSRRLENLIAQLPGEKKNGLFGNLIALSLGLTPNFKSNFDLAEDAKLQLSKDTYDDDLDNLLAQIGDQYADLFLAAKNLSDAILLSDILRVNTEITKAPLSASMIKRYDEHHQDLTLLKALVRQQLPEKYKEIFFDQSKNGYAGYIDGGASQEEFYKFIKPILEKMDGTEELLVKLNREDLLRKQRTFDNGSIPHQIHLGELHAILRRQEDFYPFLKDNREKIEKILTFRIPYYVGPLARGNSRFAWMTRKSEETITPWNFEEVVDKGASAQSFIERMTNFDKNLPNEKVLPKHSLLYEYFTVYNELTKVKYVTEGMRKPAFLSGEQKKAIVDLLFKTNRKVTVKQLKEDYFKKIECFDSVEISGVEDRFNASLGTYHDLLKIIKDKDFLDNEENEDILEDIVLTLTLFEDREMIEERLKTYAHLFDDKVMKQLKRRRYTGWGRLSRKLINGIRDKQSGKTILDFLKSDGFANRNFMQLIHDDSLTFKEDIQKAQVSGQGDSLHEHIANLAGSPAIKKGILQTVKVVDELVKVMGRHKPENIVIEMARENQTTQKGQKNSRERMKRIEEGIKELGSQILKEHPVENTQLQNEKLYLYYLQNGRDMYVDQELDINRLSDYDVDHIVPQSFLKDDSIDNKVLTRSDKARGKSDNVPSEEVVKKMKNYWRQLLNAKLITQRKFDNLTKAERGGLSELDKAGFIKRQLVETRQITKHVAQILDSRMNTKYDENDKLIREVKVITLKSKLVSDFRKDFQFYKVREINNYHHAHDAYLNAVVGTALIKKYPKLESEFVYGDYKVYDVRKMIAKSEQEIGKATAKYFFYSNIMNFFKTEITLANGEIRKRPLIETNGETGEIVWDKGRDFATVRKVLSMPQVNIVKKTEVQTGGFSKESILPKRNSDKLIARKKDWDPKKYGGFDSPTVAYSVLVVAKVEKGKSKKLKSVKELLGITIMERSSFEKNPIDFLEAKGYKEVKKDLIIKLPKYSLFELENGRKRMLASAGELQKGNELALPSKYVNFLYLASHYEKLKGSPEDNEQKQLFVEQHKHYLDEIIEQISEFSKRVILADANLDKVLSAYNKHRDKPIREQAENIIHLFTLTNLGAPAAFKYFDTTIDRKRYTSTKEVLDATLIHQSITGLYETRIDLSQLGGDGGEAAAKEAAAKEAAAKEAAAKEAAAKGGTVSLQDEHRLFDIPVTTSLPDVWLQDFPQAWAETGGLGRAKCQAPIIIDLKPTAVPVSIKQYPMSLEAHMGIRQHIIKFLELGVLRPCRSPWNTPLLPVKKPGTQDYRPVQDLREINKRTVDIHPTVPNPYNLLSTLKPDYSWYTVLDLKDAFFCLPLAPQSQELFAFEWKDPERGISGQLTWTRLPQGFKNSPTLFNEALHRDLTDFRTQHPEVTLLQYVDDLLLAAPTKKACTQGTRHLLQELGEKGYRASAKKAQICQTKVTYLGYILSEGKRWLTPGRIETVARIPPPRNPREVREFLGTAGFCRLWIPGFAELAAPLYALTKPSTPFTWQTEHQLAFEALKKALLSAPALGLPDTSKPFTLFLDERQGIAKGVLTQKLGPWKRPVAYLSKKLDPVAAGWPPCLRIMAATAMLVKDSAKLTLGQPLTVITPHTLEAIVRQPPDRWITNARLTHYQALLLDTDRVQFGPPVTLNPATLLPVPENQPSPHDCRQVLAETHGTREDLKDQELPDADHTWYTDGSSYLDSGTRRAGAAVVDGHNTIWAQSLPPGTSAQKAELIALTKALELSKGKKANIYTDSRYAFATAHTHGSIYERRGWLTSEGKEIKNKAEIIALLKALFLPQEVAIIHCPGHQKGQDPVAVGNRQADRVARQAAMAEVLTLATEPDNTSHITAGKRTADGSEFEKRTADGSEFESPKKKAKVE

SEQ ID NO: 1547 - protein, 2099 aa, synthetic construct
MPAAKRVKLDGGDKKYSIGLDIGTNSVGWAVITDEYKVPSKKFKVLGNTDRHSIKKNLIGALLFDSGETAEATRLKRTARRRYTRRKNRICYLQEIFSNEMAKVDDSFFHRLEESFLVEEDKKHERHPIFGNIVDEVAYHEKYPTIYHLRKKLVDSTDKADLRLIYLALAHMIKFRGHFLIEGDLNPDNSDVDKLFIQLVQTYNQLFEENPINASGVDAKAILSARLSKSRRLENLIAQLPGEKKNGLFGNLIALSLGLTPNFKSNFDLAEDAKLQLSKDTYDDDLDNLLAQIGDQYADLFLAAKNLSDAILLSDILRVNTEITKAPLSASMIKRYDEHHQDLTLLKALVRQQLPEKYKEIFFDQSKNGYAGYIDGGASQEEFYKFIKPILEKMDGTEELLVKLNREDLLRKQRTFDNGSIPHQIHLGELHAILRRQEDFYPFLKDNREKIEKILTFRIPYYVGPLARGNSRFAWMTRKSEETITPWNFEEVVDKGASAQSFIERMTNFDKNLPNEKVLPKHSLLYEYFTVYNELTKVKYVTEGMRKPAFLSGEQKKAIVDLLFKTNRKVTVKQLKEDYFKKIECFDSVEISGVEDRFNASLGTYHDLLKIIKDKDFLDNEENEDILEDIVLTLTLFEDREMIEERLKTYAHLFDDKVMKQLKRRRYTGWGRLSRKLINGIRDKQSGKTILDFLKSDGFANRNFMQLIHDDSLTFKEDIQKAQVSGQGDSLHEHIANLAGSPAIKKGILQTVKVVDELVKVMGRHKPENIVIEMARENQTTQKGQKNSRERMKRIEEGIKELGSQILKEHPVENTQLQNEKLYLYYLQNGRDMYVDQELDINRLSDYDVDHIVPQSFLKDDSIDNKVLTRSDKARGKSDNVPSEEVVKKMKNYWRQLLNAKLITQRKFDNLTKAERGGLSELDKAGFIKRQLVETRQITKHVAQILDSRMNTKYDENDKLIREVKVITLKSKLVSDFRKDFQFYKVREINNYHHAHDAYLNAVVGTALIKKYPKLESEFVYGDYKVYDVRKMIAKSEQEIGKATAKYFFYSNIMNFFKTEITLANGEIRKRPLIETNGETGEIVWDKGRDFATVRKVLSMPQVNIVKKTEVQTGGFSKESILPKRNSDKLIARKKDWDPKKYGGFDSPTVAYSVLVVAKVEKGKSKKLKSVKELLGITIMERSSFEKNPIDFLEAKGYKEVKKDLIIKLPKYSLFELENGRKRMLASAGELQKGNELALPSKYVNFLYLASHYEKLKGSPEDNEQKQLFVEQHKHYLDEIIEQISEFSKRVILADANLDKVLSAYNKHRDKPIREQAENIIHLFTLTNLGAPAAFKYFDTTIDRKRYTSTKEVLDATLIHQSITGLYETRIDLSQLGGDGGEAAAKGGGGGTVSLQDEHRLFDIPVTTSLPDVWLQDFPQAWAETGGLGRAKCQAPIIIDLKPTAVPVSIKQYPMSLEAHMGIRQHIIKFLELGVLRPCRSPWNTPLLPVKKPGTQDYRPVQDLREINKRTVDIHPTVPNPYNLLSTLKPDYSWYTVLDLKDAFFCLPLAPQSQELFAFEWKDPERGISGQLTWTRLPQGFKNSPTLFNEALHRDLTDFRTQHPEVTLLQYVDDLLLAAPTKKACTQGTRHLLQELGEKGYRASAKKAQICQTKVTYLGYILSEGKRWLTPGRIETVARIPPPRNPREVREFLGTAGFCRLWIPGFAELAAPLYALTKPSTPFTWQTEHQLAFEALKKALLSAPALGLPDTSKPFTLFLDERQGIAKGVLTQKLGPWKRPVAYLSKKLDPVAAGWPPCLRIMAATAMLVKDSAKLTLGQPLTVITPHTLEAIVRQPPDRWITNARLTHYQALLLDTDRVQFGPPVTLNPATLLPVPENQPSPHDCRQVLAETHGTREDLKDQELPDADHTWYTDGSSYLDSGTRRAGAAVVDGHNTIWAQSLPPGTSAQKAELIALTKALELSKGKKANIYTDSRYAFATAHTHGSIYERRGWLTSEGKEIKNKAEIIALLKALFLPQEVAIIHCPGHQKGQDPVAVGNRQADRVARQAAMAEVLTLATEPDNTSHITAGKRTADGSEFEKRTADGSEFESPKKKAKVE

SEQ ID NO: 1548 - protein, 2097 aa, synthetic construct
MPAAKRVKLDGGDKKYSIGLDIGTNSVGWAVITDEYKVPSKKFKVLGNTDRHSIKKNLIGALLFDSGETAEATRLKRTARRRYTRRKNRICYLQEIFSNEMAKVDDSFFHRLEESFLVEEDKKHERHPIFGNIVDEVAYHEKYPTIYHLRKKLVDSTDKADLRLIYLALAHMIKFRGHFLIEGDLNPDNSDVDKLFIQLVQTYNQLFEENPINASGVDAKAILSARLSKSRRLENLIAQLPGEKKNGLFGNLIALSLGLTPNFKSNFDLAEDAKLQLSKDTYDDDLDNLLAQIGDQYADLFLAAKNLSDAILLSDILRVNTEITKAPLSASMIKRYDEHHQDLTLLKALVRQQLPEKYKEIFFDQSKNGYAGYIDGGASQEEFYKFIKPILEKMDGTEELLVKLNREDLLRKQRTFDNGSIPHQIHLGELHAILRRQEDFYPFLKDNREKIEKILTFRIPYYVGPLARGNSRFAWMTRKSEETITPWNFEEVVDKGASAQSFIERMTNFDKNLPNEKVLPKHSLLYEYFTVYNELTKVKYVTEGMRKPAFLSGEQKKAIVDLLFKTNRKVTVKQLKEDYFKKIECFDSVEISGVEDRFNASLGTYHDLLKIIKDKDFLDNEENEDILEDIVLTLTLFEDREMIEERLKTYAHLFDDKVMKQLKRRRYTGWGRLSRKLINGIRDKQSGKTILDFLKSDGFANRNFMQLIHDDSLTFKEDIQKAQVSGQGDSLHEHIANLAGSPAIKKGILQTVKVVDELVKVMGRHKPENIVIEMARENQTTQKGQKNSRERMKRIEEGIKELGSQILKEHPVENTQLQNEKLYLYYLQNGRDMYVDQELDINRLSDYDVDHIVPQSFLKDDSIDNKVLTRSDKARGKSDNVPSEEVVKKMKNYWRQLLNAKLITQRKFDNLTKAERGGLSELDKAGFIKRQLVETRQITKHVAQILDSRMNTKYDENDKLIREVKVITLKSKLVSDFRKDFQFYKVREINNYHHAHDAYLNAVVGTALIKKYPKLESEFVYGDYKVYDVRKMIAKSEQEIGKATAKYFFYSNIMNFFKTEITLANGEIRKRPLIETNGETGEIVWDKGRDFATVRKVLSMPQVNIVKKTEVQTGGFSKESILPKRNSDKLIARKKDWDPKKYGGFDSPTVAYSVLVVAKVEKGKSKKLKSVKELLGITIMERSSFEKNPIDFLEAKGYKEVKKDLIIKLPKYSLFELENGRKRMLASAGELQKGNELALPSKYVNFLYLASHYEKLKGSPEDNEQKQLFVEQHKHYLDEIIEQISEFSKRVILADANLDKVLSAYNKHRDKPIREQAENIIHLFTLTNLGAPAAFKYFDTTIDRKRYTSTKEVLDATLIHQSITGLYETRIDLSQLGGDGGGSSGGGGGTVSLQDEHRLFDIPVTTSLPDVWLQDFPQAWAETGGLGRAKCQAPIIIDLKPTAVPVSIKQYPMSLEAHMGIRQHIIKFLELGVLRPCRSPWNTPLLPVKKPGTQDYRPVQDLREINKRTVDIHPTVPNPYNLLSTLKPDYSWYTVLDLKDAFFCLPLAPQSQELFAFEWKDPERGISGQLTWTRLPQGFKNSPTLFNEALHRDLTDFRTQHPEVTLLQYVDDLLLAAPTKKACTQGTRHLLQELGEKGYRASAKKAQICQTKVTYLGYILSEGKRWLTPGRIETVARIPPPRNPREVREFLGTAGFCRLWIPGFAELAAPLYALTKPSTPFTWQTEHQLAFEALKKALLSAPALGLPDTSKPFTLFLDERQGIAKGVLTQKLGPWKRPVAYLSKKLDPVAAGWPPCLRIMAATAMLVKDSAKLTLGQPLTVITPHTLEAIVRQPPDRWITNARLTHYQALLLDTDRVQFGPPVTLNPATLLPVPENQPSPHDCRQVLAETHGTREDLKDQELPDADHTWYTDGSSYLDSGTRRAGAAVVDGHNTIWAQSLPPGTSAQKAELIALTKALELSKGKKANIYTDSRYAFATAHTHGSIYERRGWLTSEGKEIKNKAEIIALLKALFLPQEVAIIHCPGHQKGQDPVAVGNRQADRVARQAAMAEVLTLATEPDNTSHITAGKRTADGSEFEKRTADGSEFESPKKKAKVE

SEQ ID NO: 1549 - protein, 2102 aa, synthetic construct
MPAAKRVKLDGGDKKYSIGLDIGTNSVGWAVITDEYKVPSKKFKVLGNTDRHSIKKNLIGALLFDSGETAEATRLKRTARRRYTRRKNRICYLQEIFSNEMAKVDDSFFHRLEESFLVEEDKKHERHPIFGNIVDEVAYHEKYPTIYHLRKKLVDSTDKADLRLIYLALAHMIKFRGHFLIEGDLNPDNSDVDKLFIQLVQTYNQLFEENPINASGVDAKAILSARLSKSRRLENLIAQLPGEKKNGLFGNLIALSLGLTPNFKSNFDLAEDAKLQLSKDTYDDDLDNLLAQIGDQYADLFLAAKNLSDAILLSDILRVNTEITKAPLSASMIKRYDEHHQDLTLLKALVRQQLPEKYKEIFFDQSKNGYAGYIDGGASQEEFYKFIKPILEKMDGTEELLVKLNREDLLRKQRTFDNGSIPHQIHLGELHAILRRQEDFYPFLKDNREKIEKILTFRIPYYVGPLARGNSRFAWMTRKSEETITPWNFEEVVDKGASAQSFIERMTNFDKNLPNEKVLPKHSLLYEYFTVYNELTKVKYVTEGMRKPAFLSGEQKKAIVDLLFKTNRKVTVKQLKEDYFKKIECFDSVEISGVEDRFNASLGTYHDLLKIIKDKDFLDNEENEDILEDIVLTLTLFEDREMIEERLKTYAHLFDDKVMKQLKRRRYTGWGRLSRKLINGIRDKQSGKTILDFLKSDGFANRNFMQLIHDDSLTFKEDIQKAQVSGQGDSLHEHIANLAGSPAIKKGILQTVKVVDELVKVMGRHKPENIVIEMARENQTTQKGQKNSRERMKRIEEGIKELGSQILKEHPVENTQLQNEKLYLYYLQNGRDMYVDQELDINRLSDYDVDHIVPQSFLKDDSIDNKVLTRSDKARGKSDNVPSEEVVKKMKNYWRQLLNAKLITQRKFDNLTKAERGGLSELDKAGFIKRQLVETRQITKHVAQILDSRMNTKYDENDKLIREVKVITLKSKLVSDFRKDFQFYKVREINNYHHAHDAYLNAVVGTALIKKYPKLESEFVYGDYKVYDVRKMIAKSEQEIGKATAKYFFYSNIMNFFKTEITLANGEIRKRPLIETNGETGEIVWDKGRDFATVRKVLSMPQVNIVKKTEVQTGGFSKESILPKRNSDKLIARKKDWDPKKYGGFDSPTVAYSVLVVAKVEKGKSKKLKSVKELLGITIMERSSFEKNPIDFLEAKGYKEVKKDLIIKLPKYSLFELENGRKRMLASAGELQKGNELALPSKYVNFLYLASHYEKLKGSPEDNEQKQLFVEQHKHYLDEIIEQISEFSKRVILADANLDKVLSAYNKHRDKPIREQAENIIHLFTLTNLGAPAAFKYFDTTIDRKRYTSTKEVLDATLIHQSITGLYETRIDLSQLGGDGGGGSGSSEAAAKGGTVSLQDEHRLFDIPVTTSLPDVWLQDFPQAWAETGGLGRAKCQAPIIIDLKPTAVPVSIKQYPMSLEAHMGIRQHIIKFLELGVLRPCRSPWNTPLLPVKKPGTQDYRPVQDLREINKRTVDIHPTVPNPYNLLSTLKPDYSWYTVLDLKDAFFCLPLAPQSQELFAFEWKDPERGISGQLTWTRLPQGFKNSPTLFNEALHRDLTDFRTQHPEVTLLQYVDDLLLAAPTKKACTQGTRHLLQELGEKGYRASAKKAQICQTKVTYLGYILSEGKRWLTPGRIETVARIPPPRNPREVREFLGTAGFCRLWIPGFAELAAPLYALTKPSTPFTWQTEHQLAFEALKKALLSAPALGLPDTSKPFTLFLDERQGIAKGVLTQKLGPWKRPVAYLSKKLDPVAAGWPPCLRIMAATAMLVKDSAKLTLGQPLTVITPHTLEAIVRQPPDRWITNARLTHYQALLLDTDRVQFGPPVTLNPATLLPVPENQPSPHDCRQVLAETHGTREDLKDQELPDADHTWYTDGSSYLDSGTRRAGAAVVDGHNTIWAQSLPPGTSAQKAELIALTKALELSKGKKANIYTDSRYAFATAHTHGSIYERRGWLTSEGKEIKNKAEIIALLKALFLPQEVAIIHCPGHQKGQDPVAVGNRQADRVARQAAMAEVLTLATEPDNTSHITAGKRTADGSEFEKRTADGSEFESPKKKAKVE

SEQ ID NO: 1550 - protein, 2100 aa, synthetic construct
MPAAKRVKLDGGDKKYSIGLDIGTNSVGWAVITDEYKVPSKKFKVLGNTDRHSIKKNLIGALLFDSGETAEATRLKRTARRRYTRRKNRICYLQEIFSNEMAKVDDSFFHRLEESFLVEEDKKHERHPIFGNIVDEVAYHEKYPTIYHLRKKLVDSTDKADLRLIYLALAHMIKFRGHFLIEGDLNPDNSDVDKLFIQLVQTYNQLFEENPINASGVDAKAILSARLSKSRRLENLIAQLPGEKKNGLFGNLIALSLGLTPNFKSNFDLAEDAKLQLSKDTYDDDLDNLLAQIGDQYADLFLAAKNLSDAILLSDILRVNTEITKAPLSASMIKRYDEHHQDLTLLKALVRQQLPEKYKEIFFDQSKNGYAGYIDGGASQEEFYKFIKPILEKMDGTEELLVKLNREDLLRKQRTFDNGSIPHQIHLGELHAILRRQEDFYPFLKDNREKIEKILTFRIPYYVGPLARGNSRFAWMTRKSEETITPWNFEEVVDKGASAQSFIERMTNFDKNLPNEKVLPKHSLLYEYFTVYNELTKVKYVTEGMRKPAFLSGEQKKAIVDLLFKTNRKVTVKQLKEDYFKKIECFDSVEISGVEDRFNASLGTYHDLLKIIKDKDFLDNEENEDILEDIVLTLTLFEDREMIEERLKTYAHLFDDKVMKQLKRRRYTGWGRLSRKLINGIRDKQSGKTILDFLKSDGFANRNFMQLIHDDSLTFKEDIQKAQVSGQGDSLHEHIANLAGSPAIKKGILQTVKVVDELVKVMGRHKPENIVIEMARENQTTQKGQKNSRERMKRIEEGIKELGSQILKEHPVENTQLQNEKLYLYYLQNGRDMYVDQELDINRLSDYDVDHIVPQSFLKDDSIDNKVLTRSDKARGKSDNVPSEEVVKKMKNYWRQLLNAKLITQRKFDNLTKAERGGLSELDKAGFIKRQLVETRQITKHVAQILDSRMNTKYDENDKLIREVKVITLKSKLVSDFRKDFQFYKVREINNYHHAHDAYLNAVVGTALIKKYPKLESEFVYGDYKVYDVRKMIAKSEQEIGKATAKYFFYSNIMNFFKTEITLANGEIRKRPLIETNGETGEIVWDKGRDFATVRKVLSMPQVNIVKKTEVQTGGFSKESILPKRNSDKLIARKKDWDPKKYGGFDSPTVAYSVLVVAKVEKGKSKKLKSVKELLGITIMERSSFEKNPIDFLEAKGYKEVKKDLIIKLPKYSLFELENGRKRMLASAGELQKGNELALPSKYVNFLYLASHYEKLKGSPEDNEQKQLFVEQHKHYLDEIIEQISEFSKRVILADANLDKVLSAYNKHRDKPIREQAENIIHLFTLTNLGAPAAFKYFDTTIDRKRYTSTKEVLDATLIHQSITGLYETRIDLSQLGGDGGGGSGSSGGGGGTVSLQDEHRLFDIPVTTSLPDVWLQDFPQAWAETGGLGRAKCQAPIIIDLKPTAVPVSIKQYPMSLEAHMGIRQHIIKFLELGVLRPCRSPWNTPLLPVKKPGTQDYRPVQDLREINKRTVDIHPTVPNPYNLLSTLKPDYSWYTVLDLKDAFFCLPLAPQSQELFAFEWKDPERGISGQLTWTRLPQGFKNSPTLFNEALHRDLTDFRTQHPEVTLLQYVDDLLLAAPTKKACTQGTRHLLQELGEKGYRASAKKAQICQTKVTYLGYILSEGKRWLTPGRIETVARIPPPRNPREVREFLGTAGFCRLWIPGFAELAAPLYALTKPSTPFTWQTEHQLAFEALKKALLSAPALGLPDTSKPFTLFLDERQGIAKGVLTQKLGPWKRPVAYLSKKLDPVAAGWPPCLRIMAATAMLVKDSAKLTLGQPLTVITPHTLEAIVRQPPDRWITNARLTHYQALLLDTDRVQFGPPVTLNPATLLPVPENQPSPHDCRQVLAETHGTREDLKDQELPDADHTWYTDGSSYLDSGTRRAGAAVVDGHNTIWAQSLPPGTSAQKAELIALTKALELSKGKKANIYTDSRYAFATAHTHGSIYERRGWLTSEGKEIKNKAEIIALLKALFLPQEVAIIHCPGHQKGQDPVAVGNRQADRVARQAAMAEVLTLATEPDNTSHITAGKRTADGSEFEKRTADGSEFESPKKKAKVE

SEQ ID NO: 1551 - protein, 2100 aa, synthetic construct
MPAAKRVKLDGGDKKYSIGLDIGTNSVGWAVITDEYKVPSKKFKVLGNTDRHSIKKNLIGALLFDSGETAEATRLKRTARRRYTRRKNRICYLQEIFSNEMAKVDDSFFHRLEESFLVEEDKKHERHPIFGNIVDEVAYHEKYPTIYHLRKKLVDSTDKADLRLIYLALAHMIKFRGHFLIEGDLNPDNSDVDKLFIQLVQTYNQLFEENPINASGVDAKAILSARLSKSRRLENLIAQLPGEKKNGLFGNLIALSLGLTPNFKSNFDLAEDAKLQLSKDTYDDDLDNLLAQIGDQYADLFLAAKNLSDAILLSDILRVNTEITKAPLSASMIKRYDEHHQDLTLLKALVRQQLPEKYKEIFFDQSKNGYAGYIDGGASQEEFYKFIKPILEKMDGTEELLVKLNREDLLRKQRTFDNGSIPHQIHLGELHAILRRQEDFYPFLKDNREKIEKILTFRIPYYVGPLARGNSRFAWMTRKSEETITPWNFEEVVDKGASAQSFIERMTNFDKNLPNEKVLPKHSLLYEYFTVYNELTKVKYVTEGMRKPAFLSGEQKKAIVDLLFKTNRKVTVKQLKEDYFKKIECFDSVEISGVEDRFNASLGTYHDLLKIIKDKDFLDNEENEDILEDIVLTLTLFEDREMIEERLKTYAHLFDDKVMKQLKRRRYTGWGRLSRKLINGIRDKQSGKTILDFLKSDGFANRNFMQLIHDDSLTFKEDIQKAQVSGQGDSLHEHIANLAGSPAIKKGILQTVKVVDELVKVMGRHKPENIVIEMARENQTTQKGQKNSRERMKRIEEGIKELGSQILKEHPVENTQLQNEKLYLYYLQNGRDMYVDQELDINRLSDYDVDHIVPQSFLKDDSIDNKVLTRSDKARGKSDNVPSEEVVKKMKNYWRQLLNAKLITQRKFDNLTKAERGGLSELDKAGFIKRQLVETRQITKHVAQILDSRMNTKYDENDKLIREVKVITLKSKLVSDFRKDFQFYKVREINNYHHAHDAYLNAVVGTALIKKYPKLESEFVYGDYKVYDVRKMIAKSEQEIGKATAKYFFYSNIMNFFKTEITLANGEIRKRPLIETNGETGEIVWDKGRDFATVRKVLSMPQVNIVKKTEVQTGGFSKESILPKRNSDKLIARKKDWDPKKYGGFDSPTVAYSVLVVAKVEKGKSKKLKSVKELLGITIMERSSFEKNPIDFLEAKGYKEVKKDLIIKLPKYSLFELENGRKRMLASAGELQKGNELALPSKYVNFLYLASHYEKLKGSPEDNEQKQLFVEQHKHYLDEIIEQISEFSKRVILADANLDKVLSAYNKHRDKPIREQAENIIHLFTLTNLGAPAAFKYFDTTIDRKRYTSTKEVLDATLIHQSITGLYETRIDLSQLGGDGGGGSGSSPAPGGTVSLQDEHRLFDIPVTTSLPDVWLQDFPQAWAETGGLGRAKCQAPIIIDLKPTAVPVSIKQYPMSLEAHMGIRQHIIKFLELGVLRPCRSPWNTPLLPVKKPGTQDYRPVQDLREINKRTVDIHPTVPNPYNLLSTLKPDYSWYTVLDLKDAFFCLPLAPQSQELFAFEWKDPERGISGQLTWTRLPQGFKNSPTLFNEALHRDLTDFRTQHPEVTLLQYVDDLLLAAPTKKACTQGTRHLLQELGEKGYRASAKKAQICQTKVTYLGYILSEGKRWLTPGRIETVARIPPPRNPREVREFLGTAGFCRLWIPGFAELAAPLYALTKPSTPFTWQTEHQLAFEALKKALLSAPALGLPDTSKPFTLFLDERQGIAKGVLTQKLGPWKRPVAYLSKKLDPVAAGWPPCLRIMAATAMLVKDSAKLTLGQPLTVITPHTLEAIVRQPPDRWITNARLTHYQALLLDTDRVQFGPPVTLNPATLLPVPENQPSPHDCRQVLAETHGTREDLKDQELPDADHTWYTDGSSYLDSGTRRAGAAVVDGHNTIWAQSLPPGTSAQKAELIALTKALELSKGKKANIYTDSRYAFATAHTHGSIYERRGWLTSEGKEIKNKAEIIALLKALFLPQEVAIIHCPGHQKGQDPVAVGNRQADRVARQAAMAEVLTLATEPDNTSHITAGKRTADGSEFEKRTADGSEFESPKKKAKVE

SEQ ID NO: 1552 - protein, 2111 aa, synthetic construct
MPAAKRVKLDGGDKKYSIGLDIGTNSVGWAVITDEYKVPSKKFKVLGNTDRHSIKKNLIGALLFDSGETAEATRLKRTARRRYTRRKNRICYLQEIFSNEMAKVDDSFFHRLEESFLVEEDKKHERHPIFGNIVDEVAYHEKYPTIYHLRKKLVDSTDKADLRLIYLALAHMIKFRGHFLIEGDLNPDNSDVDKLFIQLVQTYNQLFEENPINASGVDAKAILSARLSKSRRLENLIAQLPGEKKNGLFGNLIALSLGLTPNFKSNFDLAEDAKLQLSKDTYDDDLDNLLAQIGDQYADLFLAAKNLSDAILLSDILRVNTEITKAPLSASMIKRYDEHHQDLTLLKALVRQQLPEKYKEIFFDQSKNGYAGYIDGGASQEEFYKFIKPILEKMDGTEELLVKLNREDLLRKQRTFDNGSIPHQIHLGELHAILRRQEDFYPFLKDNREKIEKILTFRIPYYVGPLARGNSRFAWMTRKSEETITPWNFEEVVDKGASAQSFIERMTNFDKNLPNEKVLPKHSLLYEYFTVYNELTKVKYVTEGMRKPAFLSGEQKKAIVDLLFKTNRKVTVKQLKEDYFKKIECFDSVEISGVEDRFNASLGTYHDLLKIIKDKDFLDNEENEDILEDIVLTLTLFEDREMIEERLKTYAHLFDDKVMKQLKRRRYTGWGRLSRKLINGIRDKQSGKTILDFLKSDGFANRNFMQLIHDDSLTFKEDIQKAQVSGQGDSLHEHIANLAGSPAIKKGILQTVKVVDELVKVMGRHKPENIVIEMARENQTTQKGQKNSRERMKRIEEGIKELGSQILKEHPVENTQLQNEKLYLYYLQNGRDMYVDQELDINRLSDYDVDHIVPQSFLKDDSIDNKVLTRSDKARGKSDNVPSEEVVKKMKNYWRQLLNAKLITQRKFDNLTKAERGGLSELDKAGFIKRQLVETRQITKHVAQILDSRMNTKYDENDKLIREVKVITLKSKLVSDFRKDFQFYKVREINNYHHAHDAYLNAVVGTALIKKYPKLESEFVYGDYKVYDVRKMIAKSEQEIGKATAKYFFYSNIMNFFKTEITLANGEIRKRPLIETNGETGEIVWDKGRDFATVRKVLSMPQVNIVKKTEVQTGGFSKESILPKRNSDKLIARKKDWDPKKYGGFDSPTVAYSVLVVAKVEKGKSKKLKSVKELLGITIMERSSFEKNPIDFLEAKGYKEVKKDLIIKLPKYSLFELENGRKRMLASAGELQKGNELALPSKYVNFLYLASHYEKLKGSPEDNEQKQLFVEQHKHYLDEIIEQISEFSKRVILADANLDKVLSAYNKHRDKPIREQAENIIHLFTLTNLGAPAAFKYFDTTIDRKRYTSTKEVLDATLIHQSITGLYETRIDLSQLGGDGGGGGGSGGGGSGGGGSGGGGSGGTVSLQDEHRLFDIPVTTSLPDVWLQDFPQAWAETGGLGRAKCQAPIIIDLKPTAVPVSIKQYPMSLEAHMGIRQHIIKFLELGVLRPCRSPWNTPLLPVKKPGTQDYRPVQDLREINKRTVDIHPTVPNPYNLLSTLKPDYSWYTVLDLKDAFFCLPLAPQSQELFAFEWKDPERGISGQLTWTRLPQGFKNSPTLFNEALHRDLTDFRTQHPEVTLLQYVDDLLLAAPTKKACTQGTRHLLQELGEKGYRASAKKAQICQTKVTYLGYILSEGKRWLTPGRIETVARIPPPRNPREVREFLGTAGFCRLWIPGFAELAAPLYALTKPSTPFTWQTEHQLAFEALKKALLSAPALGLPDTSKPFTLFLDERQGIAKGVLTQKLGPWKRPVAYLSKKLDPVAAGWPPCLRIMAATAMLVKDSAKLTLGQPLTVITPHTLEAIVRQPPDRWITNARLTHYQALLLDTDRVQFGPPVTLNPATLLPVPENQPSPHDCRQVLAETHGTREDLKDQELPDADHTWYTDGSSYLDSGTRRAGAAVVDGHNTIWAQSLPPGTSAQKAELIALTKALELSKGKKANIYTDSRYAFATAHTHGSIYERRGWLTSEGKEIKNKAEIIALLKALFLPQEVAIIHCPGHQKGQDPVAVGNRQADRVARQAAMAEVLTLATEPDNTSHITAGKRTADGSEFEKRTADGSEFESPKKKAKVE

SEQ ID NO: 1553 - protein, 2106 aa, synthetic construct
MPAAKRVKLDGGDKKYSIGLDIGTNSVGWAVITDEYKVPSKKFKVLGNTDRHSIKKNLIGALLFDSGETAEATRLKRTARRRYTRRKNRICYLQEIFSNEMAKVDDSFFHRLEESFLVEEDKKHERHPIFGNIVDEVAYHEKYPTIYHLRKKLVDSTDKADLRLIYLALAHMIKFRGHFLIEGDLNPDNSDVDKLFIQLVQTYNQLFEENPINASGVDAKAILSARLSKSRRLENLIAQLPGEKKNGLFGNLIALSLGLTPNFKSNFDLAEDAKLQLSKDTYDDDLDNLLAQIGDQYADLFLAAKNLSDAILLSDILRVNTEITKAPLSASMIKRYDEHHQDLTLLKALVRQQLPEKYKEIFFDQSKNGYAGYIDGGASQEEFYKFIKPILEKMDGTEELLVKLNREDLLRKQRTFDNGSIPHQIHLGELHAILRRQEDFYPFLKDNREKIEKILTFRIPYYVGPLARGNSRFAWMTRKSEETITPWNFEEVVDKGASAQSFIERMTNFDKNLPNEKVLPKHSLLYEYFTVYNELTKVKYVTEGMRKPAFLSGEQKKAIVDLLFKTNRKVTVKQLKEDYFKKIECFDSVEISGVEDRFNASLGTYHDLLKIIKDKDFLDNEENEDILEDIVLTLTLFEDREMIEERLKTYAHLFDDKVMKQLKRRRYTGWGRLSRKLINGIRDKQSGKTILDFLKSDGFANRNFMQLIHDDSLTFKEDIQKAQVSGQGDSLHEHIANLAGSPAIKKGILQTVKVVDELVKVMGRHKPENIVIEMARENQTTQKGQKNSRERMKRIEEGIKELGSQILKEHPVENTQLQNEKLYLYYLQNGRDMYVDQELDINRLSDYDVDHIVPQSFLKDDSIDNKVLTRSDKARGKSDNVPSEEVVKKMKNYWRQLLNAKLITQRKFDNLTKAERGGLSELDKAGFIKRQLVETRQITKHVAQILDSRMNTKYDENDKLIREVKVITLKSKLVSDFRKDFQFYKVREINNYHHAHDAYLNAVVGTALIKKYPKLESEFVYGDYKVYDVRKMIAKSEQEIGKATAKYFFYSNIMNFFKTEITLANGEIRKRPLIETNGETGEIVWDKGRDFATVRKVLSMPQVNIVKKTEVQTGGFSKESILPKRNSDKLIARKKDWDPKKYGGFDSPTVAYSVLVVAKVEKGKSKKLKSVKELLGITIMERSSFEKNPIDFLEAKGYKEVKKDLIIKLPKYSLFELENGRKRMLASAGELQKGNELALPSKYVNFLYLASHYEKLKGSPEDNEQKQLFVEQHKHYLDEIIEQISEFSKRVILADANLDKVLSAYNKHRDKPIREQAENIIHLFTLTNLGAPAAFKYFDTTIDRKRYTSTKEVLDATLIHQSITGLYETRIDLSQLGGDGGGSSGSSGSSGSSGSSGGTVSLQDEHRLFDIPVTTSLPDVWLQDFPQAWAETGGLGRAKCQAPIIIDLKPTAVPVSIKQYPMSLEAHMGIRQHIIKFLELGVLRPCRSPWNTPLLPVKKPGTQDYRPVQDLREINKRTVDIHPTVPNPYNLLSTLKPDYSWYTVLDLKDAFFCLPLAPQSQELFAFEWKDPERGISGQLTWTRLPQGFKNSPTLFNEALHRDLTDFRTQHPEVTLLQYVDDLLLAAPTKKACTQGTRHLLQELGEKGYRASAKKAQICQTKVTYLGYILSEGKRWLTPGRIETVARIPPPRNPREVREFLGTAGFCRLWIPGFAELAAPLYALTKPSTPFTWQTEHQLAFEALKKALLSAPALGLPDTSKPFTLFLDERQGIAKGVLTQKLGPWKRPVAYLSKKLDPVAAGWPPCLRIMAATAMLVKDSAKLTLGQPLTVITPHTLEAIVRQPPDRWITNARLTHYQALLLDTDRVQFGPPVTLNPATLLPVPENQPSPHDCRQVLAETHGTREDLKDQELPDADHTWYTDGSSYLDSGTRRAGAAVVDGHNTIWAQSLPPGTSAQKAELIALTKALELSKGKKANIYTDSRYAFATAHTHGSIYERRGWLTSEGKEIKNKAEIIALLKALFLPQEVAIIHCPGHQKGQDPVAVGNRQADRVARQAAMAEVLTLATEPDNTSHITAGKRTADGSEFEKRTADGSEFESPKKKAKVE

SEQ ID NO: 1554 - protein, 2097 aa, synthetic construct
MPAAKRVKLDGGDKKYSIGLDIGTNSVGWAVITDEYKVPSKKFKVLGNTDRHSIKKNLIGALLFDSGETAEATRLKRTARRRYTRRKNRICYLQEIFSNEMAKVDDSFFHRLEESFLVEEDKKHERHPIFGNIVDEVAYHEKYPTIYHLRKKLVDSTDKADLRLIYLALAHMIKFRGHFLIEGDLNPDNSDVDKLFIQLVQTYNQLFEENPINASGVDAKAILSARLSKSRRLENLIAQLPGEKKNGLFGNLIALSLGLTPNFKSNFDLAEDAKLQLSKDTYDDDLDNLLAQIGDQYADLFLAAKNLSDAILLSDILRVNTEITKAPLSASMIKRYDEHHQDLTLLKALVRQQLPEKYKEIFFDQSKNGYAGYIDGGASQEEFYKFIKPILEKMDGTEELLVKLNREDLLRKQRTFDNGSIPHQIHLGELHAILRRQEDFYPFLKDNREKIEKILTFRIPYYVGPLARGNSRFAWMTRKSEETITPWNFEEVVDKGASAQSFIERMTNFDKNLPNEKVLPKHSLLYEYFTVYNELTKVKYVTEGMRKPAFLSGEQKKAIVDLLFKTNRKVTVKQLKEDYFKKIECFDSVEISGVEDRFNASLGTYHDLLKIIKDKDFLDNEENEDILEDIVLTLTLFEDREMIEERLKTYAHLFDDKVMKQLKRRRYTGWGRLSRKLINGIRDKQSGKTILDFLKSDGFANRNFMQLIHDDSLTFKEDIQKAQVSGQGDSLHEHIANLAGSPAIKKGILQTVKVVDELVKVMGRHKPENIVIEMARENQTTQKGQKNSRERMKRIEEGIKELGSQILKEHPVENTQLQNEKLYLYYLQNGRDMYVDQELDINRLSDYDVDHIVPQSFLKDDSIDNKVLTRSDKARGKSDNVPSEEVVKKMKNYWRQLLNAKLITQRKFDNLTKAERGGLSELDKAGFIKRQLVETRQITKHVAQILDSRMNTKYDENDKLIREVKVITLKSKLVSDFRKDFQFYKVREINNYHHAHDAYLNAVVGTALIKKYPKLESEFVYGDYKVYDVRKMIAKSEQEIGKATAKYFFYSNIMNFFKTEITLANGEIRKRPLIETNGETGEIVWDKGRDFATVRKVLSMPQVNIVKKTEVQTGGFSKESILPKRNSDKLIARKKDWDPKKYGGFDSPTVAYSVLVVAKVEKGKSKKLKSVKELLGITIMERSSFEKNPIDFLEAKGYKEVKKDLIIKLPKYSLFELENGRKRMLASAGELQKGNELALPSKYVNFLYLASHYEKLKGSPEDNEQKQLFVEQHKHYLDEIIEQISEFSKRVILADANLDKVLSAYNKHRDKPIREQAENIIHLFTLTNLGAPAAFKYFDTTIDRKRYTSTKEVLDATLIHQSITGLYETRIDLSQLGGDGGPAPGGSGGTVSLQDEHRLFDIPVTTSLPDVWLQDFPQAWAETGGLGRAKCQAPIIIDLKPTAVPVSIKQYPMSLEAHMGIRQHIIKFLELGVLRPCRSPWNTPLLPVKKPGTQDYRPVQDLREINKRTVDIHPTVPNPYNLLSTLKPDYSWYTVLDLKDAFFCLPLAPQSQELFAFEWKDPERGISGQLTWTRLPQGFKNSPTLFNEALHRDLTDFRTQHPEVTLLQYVDDLLLAAPTKKACTQGTRHLLQELGEKGYRASAKKAQICQTKVTYLGYILSEGKRWLTPGRIETVARIPPPRNPREVREFLGTAGFCRLWIPGFAELAAPLYALTKPSTPFTWQTEHQLAFEALKKALLSAPALGLPDTSKPFTLFLDERQGIAKGVLTQKLGPWKRPVAYLSKKLDPVAAGWPPCLRIMAATAMLVKDSAKLTLGQPLTVITPHTLEAIVRQPPDRWITNARLTHYQALLLDTDRVQFGPPVTLNPATLLPVPENQPSPHDCRQVLAETHGTREDLKDQELPDADHTWYTDGSSYLDSGTRRAGAAVVDGHNTIWAQSLPPGTSAQKAELIALTKALELSKGKKANIYTDSRYAFATAHTHGSIYERRGWLTSEGKEIKNKAEIIALLKALFLPQEVAIIHCPGHQKGQDPVAVGNRQADRVARQAAMAEVLTLATEPDNTSHITAGKRTADGSEFEKRTADGSEFESPKKKAKVE

SEQ ID NO: 1555 - protein, 2102 aa, synthetic construct
MPAAKRVKLDGGDKKYSIGLDIGTNSVGWAVITDEYKVPSKKFKVLGNTDRHSIKKNLIGALLFDSGETAEATRLKRTARRRYTRRKNRICYLQEIFSNEMAKVDDSFFHRLEESFLVEEDKKHERHPIFGNIVDEVAYHEKYPTIYHLRKKLVDSTDKADLRLIYLALAHMIKFRGHFLIEGDLNPDNSDVDKLFIQLVQTYNQLFEENPINASGVDAKAILSARLSKSRRLENLIAQLPGEKKNGLFGNLIALSLGLTPNFKSNFDLAEDAKLQLSKDTYDDDLDNLLAQIGDQYADLFLAAKNLSDAILLSDILRVNTEITKAPLSASMIKRYDEHHQDLTLLKALVRQQLPEKYKEIFFDQSKNGYAGYIDGGASQEEFYKFIKPILEKMDGTEELLVKLNREDLLRKQRTFDNGSIPHQIHLGELHAILRRQEDFYPFLKDNREKIEKILTFRIPYYVGPLARGNSRFAWMTRKSEETITPWNFEEVVDKGASAQSFIERMTNFDKNLPNEKVLPKHSLLYEYFTVYNELTKVKYVTEGMRKPAFLSGEQKKAIVDLLFKTNRKVTVKQLKEDYFKKIECFDSVEISGVEDRFNASLGTYHDLLKIIKDKDFLDNEENEDILEDIVLTLTLFEDREMIEERLKTYAHLFDDKVMKQLKRRRYTGWGRLSRKLINGIRDKQSGKTILDFLKSDGFANRNFMQLIHDDSLTFKEDIQKAQVSGQGDSLHEHIANLAGSPAIKKGILQTVKVVDELVKVMGRHKPENIVIEMARENQTTQKGQKNSRERMKRIEEGIKELGSQILKEHPVENTQLQNEKLYLYYLQNGRDMYVDQELDINRLSDYDVDHIVPQSFLKDDSIDNKVLTRSDKARGKSDNVPSEEVVKKMKNYWRQLLNAKLITQRKFDNLTKAERGGLSELDKAGFIKRQLVETRQITKHVAQILDSRMNTKYDENDKLIREVKVITLKSKLVSDFRKDFQFYKVREINNYHHAHDAYLNAVVGTALIKKYPKLESEFVYGDYKVYDVRKMIAKSEQEIGKATAKYFFYSNIMNFFKTEITLANGEIRKRPLIETNGETGEIVWDKGRDFATVRKVLSMPQVNIVKKTEVQTGGFSKESILPKRNSDKLIARKKDWDPKKYGGFDSPTVAYSVLVVAKVEKGKSKKLKSVKELLGITIMERSSFEKNPIDFLEAKGYKEVKKDLIIKLPKYSLFELENGRKRMLASAGELQKGNELALPSKYVNFLYLASHYEKLKGSPEDNEQKQLFVEQHKHYLDEIIEQISEFSKRVILADANLDKVLSAYNKHRDKPIREQAENIIHLFTLTNLGAPAAFKYFDTTIDRKRYTSTKEVLDATLIHQSITGLYETRIDLSQLGGDGGPAPGGSEAAAKGGTVSLQDEHRLFDIPVTTSLPDVWLQDFPQAWAETGGLGRAKCQAPIIIDLKPTAVPVSIKQYPMSLEAHMGIRQHIIKFLELGVLRPCRSPWNTPLLPVKKPGTQDYRPVQDLREINKRTVDIHPTVPNPYNLLSTLKPDYSWYTVLDLKDAFFCLPLAPQSQELFAFEWKDPERGISGQLTWTRLPQGFKNSPTLFNEALHRDLTDFRTQHPEVTLLQYVDDLLLAAPTKKACTQGTRHLLQELGEKGYRASAKKAQICQTKVTYLGYILSEGKRWLTPGRIETVARIPPPRNPREVREFLGTAGFCRLWIPGFAELAAPLYALTKPSTPFTWQTEHQLAFEALKKALLSAPALGLPDTSKPFTLFLDERQGIAKGVLTQKLGPWKRPVAYLSKKLDPVAAGWPPCLRIMAATAMLVKDSAKLTLGQPLTVITPHTLEAIVRQPPDRWITNARLTHYQALLLDTDRVQFGPPVTLNPATLLPVPENQPSPHDCRQVLAETHGTREDLKDQELPDADHTWYTDGSSYLDSGTRRAGAAVVDGHNTIWAQSLPPGTSAQKAELIALTKALELSKGKKANIYTDSRYAFATAHTHGSIYERRGWLTSEGKEIKNKAEIIALLKALFLPQEVAIIHCPGHQKGQDPVAVGNRQADRVARQAAMAEVLTLATEPDNTSHITAGKRTADGSEFEKRTADGSEFESPKKKAKVE

SEQ ID NO: 1556 - protein, 2097 aa, synthetic construct
MPAAKRVKLDGGDKKYSIGLDIGTNSVGWAVITDEYKVPSKKFKVLGNTDRHSIKKNLIGALLFDSGETAEATRLKRTARRRYTRRKNRICYLQEIFSNEMAKVDDSFFHRLEESFLVEEDKKHERHPIFGNIVDEVAYHEKYPTIYHLRKKLVDSTDKADLRLIYLALAHMIKFRGHFLIEGDLNPDNSDVDKLFIQLVQTYNQLFEENPINASGVDAKAILSARLSKSRRLENLIAQLPGEKKNGLFGNLIALSLGLTPNFKSNFDLAEDAKLQLSKDTYDDDLDNLLAQIGDQYADLFLAAKNLSDAILLSDILRVNTEITKAPLSASMIKRYDEHHQDLTLLKALVRQQLPEKYKEIFFDQSKNGYAGYIDGGASQEEFYKFIKPILEKMDGTEELLVKLNREDLLRKQRTFDNGSIPHQIHLGELHAILRRQEDFYPFLKDNREKIEKILTFRIPYYVGPLARGNSRFAWMTRKSEETITPWNFEEVVDKGASAQSFIERMTNFDKNLPNEKVLPKHSLLYEYFTVYNELTKVKYVTEGMRKPAFLSGEQKKAIVDLLFKTNRKVTVKQLKEDYFKKIECFDSVEISGVEDRFNASLGTYHDLLKIIKDKDFLDNEENEDILEDIVLTLTLFEDREMIEERLKTYAHLFDDKVMKQLKRRRYTGWGRLSRKLINGIRDKQSGKTILDFLKSDGFANRNFMQLIHDDSLTFKEDIQKAQVSGQGDSLHEHIANLAGSPAIKKGILQTVKVVDELVKVMGRHKPENIVIEMARENQTTQKGQKNSRERMKRIEEGIKELGSQILKEHPVENTQLQNEKLYLYYLQNGRDMYVDQELDINRLSDYDVDHIVPQSFLKDDSIDNKVLTRSDKARGKSDNVPSEEVVKKMKNYWRQLLNAKLITQRKFDNLTKAERGGLSELDKAGFIKRQLVETRQITKHVAQILDSRMNTKYDENDKLIREVKVITLKSKLVSDFRKDFQFYKVREINNYHHAHDAYLNAVVGTALIKKYPKLESEFVYGDYKVYDVRKMIAKSEQEIGKATAKYFFYSNIMNFFKTEITLANGEIRKRPLIETNGETGEIVWDKGRDFATVRKVLSMPQVNIVKKTEVQTGGFSKESILPKRNSDKLIARKKDWDPKKYGGFDSPTVAYSVLVVAKVEKGKSKKLKSVKELLGITIMERSSFEKNPIDFLEAKGYKEVKKDLIIKLPKYSLFELENGRKRMLASAGELQKGNELALPSKYVNFLYLASHYEKLKGSPEDNEQKQLFVEQHKHYLDEIIEQISEFSKRVILADANLDKVLSAYNKHRDKPIREQAENIIHLFTLTNLGAPAAFKYFDTTIDRKRYTSTKEVLDATLIHQSITGLYETRIDLSQLGGDGGGGSGGSGGTVSLQDEHRLFDIPVTTSLPDVWLQDFPQAWAETGGLGRAKCQAPIIIDLKPTAVPVSIKQYPMSLEAHMGIRQHIIKFLELGVLRPCRSPWNTPLLPVKKPGTQDYRPVQDLREINKRTVDIHPTVPNPYNLLSTLKPDYSWYTVLDLKDAFFCLPLAPQSQELFAFEWKDPERGISGQLTWTRLPQGFKNSPTLFNEALHRDLTDFRTQHPEVTLLQYVDDLLLAAPTKKACTQGTRHLLQELGEKGYRASAKKAQICQTKVTYLGYILSEGKRWLTPGRIETVARIPPPRNPREVREFLGTAGFCRLWIPGFAELAAPLYALTKPSTPFTWQTEHQLAFEALKKALLSAPALGLPDTSKPFTLFLDERQGIAKGVLTQKLGPWKRPVAYLSKKLDPVAAGWPPCLRIMAATAMLVKDSAKLTLGQPLTVITPHTLEAIVRQPPDRWITNARLTHYQALLLDTDRVQFGPPVTLNPATLLPVPENQPSPHDCRQVLAETHGTREDLKDQELPDADHTWYTDGSSYLDSGTRRAGAAVVDGHNTIWAQSLPPGTSAQKAELIALTKALELSKGKKANIYTDSRYAFATAHTHGSIYERRGWLTSEGKEIKNKAEIIALLKALFLPQEVAIIHCPGHQKGQDPVAVGNRQADRVARQAAMAEVLTLATEPDNTSHITAGKRTADGSEFEKRTADGSEFESPKKKAKVE

SEQ ID NO: 1557 - protein, 2099 aa, synthetic construct
MPAAKRVKLDGGDKKYSIGLDIGTNSVGWAVITDEYKVPSKKFKVLGNTDRHSIKKNLIGALLFDSGETAEATRLKRTARRRYTRRKNRICYLQEIFSNEMAKVDDSFFHRLEESFLVEEDKKHERHPIFGNIVDEVAYHEKYPTIYHLRKKLVDSTDKADLRLIYLALAHMIKFRGHFLIEGDLNPDNSDVDKLFIQLVQTYNQLFEENPINASGVDAKAILSARLSKSRRLENLIAQLPGEKKNGLFGNLIALSLGLTPNFKSNFDLAEDAKLQLSKDTYDDDLDNLLAQIGDQYADLFLAAKNLSDAILLSDILRVNTEITKAPLSASMIKRYDEHHQDLTLLKALVRQQLPEKYKEIFFDQSKNGYAGYIDGGASQEEFYKFIKPILEKMDGTEELLVKLNREDLLRKQRTFDNGSIPHQIHLGELHAILRRQEDFYPFLKDNREKIEKILTFRIPYYVGPLARGNSRFAWMTRKSEETITPWNFEEVVDKGASAQSFIERMTNFDKNLPNEKVLPKHSLLYEYFTVYNELTKVKYVTEGMRKPAFLSGEQKKAIVDLLFKTNRKVTVKQLKEDYFKKIECFDSVEISGVEDRFNASLGTYHDLLKIIKDKDFLDNEENEDILEDIVLTLTLFEDREMIEERLKTYAHLFDDKVMKQLKRRRYTGWGRLSRKLINGIRDKQSGKTILDFLKSDGFANRNFMQLIHDDSLTFKEDIQKAQVSGQGDSLHEHIANLAGSPAIKKGILQTVKVVDELVKVMGRHKPENIVIEMARENQTTQKGQKNSRERMKRIEEGIKELGSQILKEHPVENTQLQNEKLYLYYLQNGRDMYVDQELDINRLSDYDVDHIVPQSFLKDDSIDNKVLTRSDKARGKSDNVPSEEVVKKMKNYWRQLLNAKLITQRKFDNLTKAERGGLSELDKAGFIKRQLVETRQITKHVAQILDSRMNTKYDENDKLIREVKVITLKSKLVSDFRKDFQFYKVREINNYHHAHDAYLNAVVGTALIKKYPKLESEFVYGDYKVYDVRKMIAKSEQEIGKATAKYFFYSNIMNFFKTEITLANGEIRKRPLIETNGETGEIVWDKGRDFATVRKVLSMPQVNIVKKTEVQTGGFSKESILPKRNSDKLIARKKDWDPKKYGGFDSPTVAYSVLVVAKVEKGKSKKLKSVKELLGITIMERSSFEKNPIDFLEAKGYKEVKKDLIIKLPKYSLFELENGRKRMLASAGELQKGNELALPSKYVNFLYLASHYEKLKGSPEDNEQKQLFVEQHKHYLDEIIEQISEFSKRVILADANLDKVLSAYNKHRDKPIREQAENIIHLFTLTNLGAPAAFKYFDTTIDRKRYTSTKEVLDATLIHQSITGLYETRIDLSQLGGDGGEAAAKGGSGGTVSLQDEHRLFDIPVTTSLPDVWLQDFPQAWAETGGLGRAKCQAPIIIDLKPTAVPVSIKQYPMSLEAHMGIRQHIIKFLELGVLRPCRSPWNTPLLPVKKPGTQDYRPVQDLREINKRTVDIHPTVPNPYNLLSTLKPDYSWYTVLDLKDAFFCLPLAPQSQELFAFEWKDPERGISGQLTWTRLPQGFKNSPTLFNEALHRDLTDFRTQHPEVTLLQYVDDLLLAAPTKKACTQGTRHLLQELGEKGYRASAKKAQICQTKVTYLGYILSEGKRWLTPGRIETVARIPPPRNPREVREFLGTAGFCRLWIPGFAELAAPLYALTKPSTPFTWQTEHQLAFEALKKALLSAPALGLPDTSKPFTLFLDERQGIAKGVLTQKLGPWKRPVAYLSKKLDPVAAGWPPCLRIMAATAMLVKDSAKLTLGQPLTVITPHTLEAIVRQPPDRWITNARLTHYQALLLDTDRVQFGPPVTLNPATLLPVPENQPSPHDCRQVLAETHGTREDLKDQELPDADHTWYTDGSSYLDSGTRRAGAAVVDGHNTIWAQSLPPGTSAQKAELIALTKALELSKGKKANIYTDSRYAFATAHTHGSIYERRGWLTSEGKEIKNKAEIIALLKALFLPQEVAIIHCPGHQKGQDPVAVGNRQADRVARQAAMAEVLTLATEPDNTSHITAGKRTADGSEFEKRTADGSEFESPKKKAKVE

SEQ ID NO: 1558 - protein, 2097 aa, synthetic construct
MPAAKRVKLDGGDKKYSIGLDIGTNSVGWAVITDEYKVPSKKFKVLGNTDRHSIKKNLIGALLFDSGETAEATRLKRTARRRYTRRKNRICYLQEIFSNEMAKVDDSFFHRLEESFLVEEDKKHERHPIFGNIVDEVAYHEKYPTIYHLRKKLVDSTDKADLRLIYLALAHMIKFRGHFLIEGDLNPDNSDVDKLFIQLVQTYNQLFEENPINASGVDAKAILSARLSKSRRLENLIAQLPGEKKNGLFGNLIALSLGLTPNFKSNFDLAEDAKLQLSKDTYDDDLDNLLAQIGDQYADLFLAAKNLSDAILLSDILRVNTEITKAPLSASMIKRYDEHHQDLTLLKALVRQQLPEKYKEIFFDQSKNGYAGYIDGGASQEEFYKFIKPILEKMDGTEELLVKLNREDLLRKQRTFDNGSIPHQIHLGELHAILRRQEDFYPFLKDNREKIEKILTFRIPYYVGPLARGNSRFAWMTRKSEETITPWNFEEVVDKGASAQSFIERMTNFDKNLPNEKVLPKHSLLYEYFTVYNELTKVKYVTEGMRKPAFLSGEQKKAIVDLLFKTNRKVTVKQLKEDYFKKIECFDSVEISGVEDRFNASLGTYHDLLKIIKDKDFLDNEENEDILEDIVLTLTLFEDREMIEERLKTYAHLFDDKVMKQLKRRRYTGWGRLSRKLINGIRDKQSGKTILDFLKSDGFANRNFMQLIHDDSLTFKEDIQKAQVSGQGDSLHEHIANLAGSPAIKKGILQTVKVVDELVKVMGRHKPENIVIEMARENQTTQKGQKNSRERMKRIEEGIKELGSQILKEHPVENTQLQNEKLYLYYLQNGRDMYVDQELDINRLSDYDVDHIVPQSFLKDDSIDNKVLTRSDKARGKSDNVPSEEVVKKMKNYWRQLLNAKLITQRKFDNLTKAERGGLSELDKAGFIKRQLVETRQITKHVAQILDSRMNTKYDENDKLIREVKVITLKSKLVSDFRKDFQFYKVREINNYHHAHDAYLNAVVGTALIKKYPKLESEFVYGDYKVYDVRKMIAKSEQEIGKATAKYFFYSNIMNFFKTEITLANGEIRKRPLIETNGETGEIVWDKGRDFATVRKVLSMPQVNIVKKTEVQTGGFSKESILPKRNSDKLIARKKDWDPKKYGGFDSPTVAYSVLVVAKVEKGKSKKLKSVKELLGITIMERSSFEKNPIDFLEAKGYKEVKKDLIIKLPKYSLFELENGRKRMLASAGELQKGNELALPSKYVNFLYLASHYEKLKGSPEDNEQKQLFVEQHKHYLDEIIEQISEFSKRVILADANLDKVLSAYNKHRDKPIREQAENIIHLFTLTNLGAPAAFKYFDTTIDRKRYTSTKEVLDATLIHQSITGLYETRIDLSQLGGDGGPAPGSSGGTVSLQDEHRLFDIPVTTSLPDVWLQDFPQAWAETGGLGRAKCQAPIIIDLKPTAVPVSIKQYPMSLEAHMGIRQHIIKFLELGVLRPCRSPWNTPLLPVKKPGTQDYRPVQDLREINKRTVDIHPTVPNPYNLLSTLKPDYSWYTVLDLKDAFFCLPLAPQSQELFAFEWKDPERGISGQLTWTRLPQGFKNSPTLFNEALHRDLTDFRTQHPEVTLLQYVDDLLLAAPTKKACTQGTRHLLQELGEKGYRASAKKAQICQTKVTYLGYILSEGKRWLTPGRIETVARIPPPRNPREVREFLGTAGFCRLWIPGFAELAAPLYALTKPSTPFTWQTEHQLAFEALKKALLSAPALGLPDTSKPFTLFLDERQGIAKGVLTQKLGPWKRPVAYLSKKLDPVAAGWPPCLRIMAATAMLVKDSAKLTLGQPLTVITPHTLEAIVRQPPDRWITNARLTHYQALLLDTDRVQFGPPVTLNPATLLPVPENQPSPHDCRQVLAETHGTREDLKDQELPDADHTWYTDGSSYLDSGTRRAGAAVVDGHNTIWAQSLPPGTSAQKAELIALTKALELSKGKKANIYTDSRYAFATAHTHGSIYERRGWLTSEGKEIKNKAEIIALLKALFLPQEVAIIHCPGHQKGQDPVAVGNRQADRVARQAAMAEVLTLATEPDNTSHITAGKRTADGSEFEKRTADGSEFESPKKKAKVE

SEQ ID NO: 1559 - protein, 2096 aa, synthetic construct
MPAAKRVKLDGGDKKYSIGLDIGTNSVGWAVITDEYKVPSKKFKVLGNTDRHSIKKNLIGALLFDSGETAEATRLKRTARRRYTRRKNRICYLQEIFSNEMAKVDDSFFHRLEESFLVEEDKKHERHPIFGNIVDEVAYHEKYPTIYHLRKKLVDSTDKADLRLIYLALAHMIKFRGHFLIEGDLNPDNSDVDKLFIQLVQTYNQLFEENPINASGVDAKAILSARLSKSRRLENLIAQLPGEKKNGLFGNLIALSLGLTPNFKSNFDLAEDAKLQLSKDTYDDDLDNLLAQIGDQYADLFLAAKNLSDAILLSDILRVNTEITKAPLSASMIKRYDEHHQDLTLLKALVRQQLPEKYKEIFFDQSKNGYAGYIDGGASQEEFYKFIKPILEKMDGTEELLVKLNREDLLRKQRTFDNGSIPHQIHLGELHAILRRQEDFYPFLKDNREKIEKILTFRIPYYVGPLARGNSRFAWMTRKSEETITPWNFEEVVDKGASAQSFIERMTNFDKNLPNEKVLPKHSLLYEYFTVYNELTKVKYVTEGMRKPAFLSGEQKKAIVDLLFKTNRKVTVKQLKEDYFKKIECFDSVEISGVEDRFNASLGTYHDLLKIIKDKDFLDNEENEDILEDIVLTLTLFEDREMIEERLKTYAHLFDDKVMKQLKRRRYTGWGRLSRKLINGIRDKQSGKTILDFLKSDGFANRNFMQLIHDDSLTFKEDIQKAQVSGQGDSLHEHIANLAGSPAIKKGILQTVKVVDELVKVMGRHKPENIVIEMARENQTTQKGQKNSRERMKRIEEGIKELGSQILKEHPVENTQLQNEKLYLYYLQNGRDMYVDQELDINRLSDYDVDHIVPQSFLKDDSIDNKVLTRSDKARGKSDNVPSEEVVKKMKNYWRQLLNAKLITQRKFDNLTKAERGGLSELDKAGFIKRQLVETRQITKHVAQILDSRMNTKYDENDKLIREVKVITLKSKLVSDFRKDFQFYKVREINNYHHAHDAYLNAVVGTALIKKYPKLESEFVYGDYKVYDVRKMIAKSEQEIGKATAKYFFYSNIMNFFKTEITLANGEIRKRPLIETNGETGEIVWDKGRDFATVRKVLSMPQVNIVKKTEVQTGGFSKESILPKRNSDKLIARKKDWDPKKYGGFDSPTVAYSVLVVAKVEKGKSKKLKSVKELLGITIMERSSFEKNPIDFLEAKGYKEVKKDLIIKLPKYSLFELENGRKRMLASAGELQKGNELALPSKYVNFLYLASHYEKLKGSPEDNEQKQLFVEQHKHYLDEIIEQISEFSKRVILADANLDKVLSAYNKHRDKPIREQAENIIHLFTLTNLGAPAAFKYFDTTIDRKRYTSTKEVLDATLIHQSITGLYETRIDLSQLGGDGGGGGGSGGTVSLQDEHRLFDIPVTTSLPDVWLQDFPQAWAETGGLGRAKCQAPIIIDLKPTAVPVSIKQYPMSLEAHMGIRQHIIKFLELGVLRPCRSPWNTPLLPVKKPGTQDYRPVQDLREINKRTVDIHPTVPNPYNLLSTLKPDYSWYTVLDLKDAFFCLPLAPQSQELFAFEWKDPERGISGQLTWTRLPQGFKNSPTLFNEALHRDLTDFRTQHPEVTLLQYVDDLLLAAPTKKACTQGTRHLLQELGEKGYRASAKKAQICQTKVTYLGYILSEGKRWLTPGRIETVARIPPPRNPREVREFLGTAGFCRLWIPGFAELAAPLYALTKPSTPFTWQTEHQLAFEALKKALLSAPALGLPDTSKPFTLFLDERQGIAKGVLTQKLGPWKRPVAYLSKKLDPVAAGWPPCLRIMAATAMLVKDSAKLTLGQPLTVITPHTLEAIVRQPPDRWITNARLTHYQALLLDTDRVQFGPPVTLNPATLLPVPENQPSPHDCRQVLAETHGTREDLKDQELPDADHTWYTDGSSYLDSGTRRAGAAVVDGHNTIWAQSLPPGTSAQKAELIALTKALELSKGKKANIYTDSRYAFATAHTHGSIYERRGWLTSEGKEIKNKAEIIALLKALFLPQEVAIIHCPGHQKGQDPVAVGNRQADRVARQAAMAEVLTLATEPDNTSHITAGKRTADGSEFEKRTADGSEFESPKKKAKVE

SEQ ID NO: 1560 - protein, 2098 aa, synthetic construct
MPAAKRVKLDGGDKKYSIGLDIGTNSVGWAVITDEYKVPSKKFKVLGNTDRHSIKKNLIGALLFDSGETAEATRLKRTARRRYTRRKNRICYLQEIFSNEMAKVDDSFFHRLEESFLVEEDKKHERHPIFGNIVDEVAYHEKYPTIYHLRKKLVDSTDKADLRLIYLALAHMIKFRGHFLIEGDLNPDNSDVDKLFIQLVQTYNQLFEENPINASGVDAKAILSARLSKSRRLENLIAQLPGEKKNGLFGNLIALSLGLTPNFKSNFDLAEDAKLQLSKDTYDDDLDNLLAQIGDQYADLFLAAKNLSDAILLSDILRVNTEITKAPLSASMIKRYDEHHQDLTLLKALVRQQLPEKYKEIFFDQSKNGYAGYIDGGASQEEFYKFIKPILEKMDGTEELLVKLNREDLLRKQRTFDNGSIPHQIHLGELHAILRRQEDFYPFLKDNREKIEKILTFRIPYYVGPLARGNSRFAWMTRKSEETITPWNFEEVVDKGASAQSFIERMTNFDKNLPNEKVLPKHSLLYEYFTVYNELTKVKYVTEGMRKPAFLSGEQKKAIVDLLFKTNRKVTVKQLKEDYFKKIECFDSVEISGVEDRFNASLGTYHDLLKIIKDKDFLDNEENEDILEDIVLTLTLFEDREMIEERLKTYAHLFDDKVMKQLKRRRYTGWGRLSRKLINGIRDKQSGKTILDFLKSDGFANRNFMQLIHDDSLTFKEDIQKAQVSGQGDSLHEHIANLAGSPAIKKGILQTVKVVDELVKVMGRHKPENIVIEMARENQTTQKGQKNSRERMKRIEEGIKELGSQILKEHPVENTQLQNEKLYLYYLQNGRDMYVDQELDINRLSDYDVDHIVPQSFLKDDSIDNKVLTRSDKARGKSDNVPSEEVVKKMKNYWRQLLNAKLITQRKFDNLTKAERGGLSELDKAGFIKRQLVETRQITKHVAQILDSRMNTKYDENDKLIREVKVITLKSKLVSDFRKDFQFYKVREINNYHHAHDAYLNAVVGTALIKKYPKLESEFVYGDYKVYDVRKMIAKSEQEIGKATAKYFFYSNIMNFFKTEITLANGEIRKRPLIETNGETGEIVWDKGRDFATVRKVLSMPQVNIVKKTEVQTGGFSKESILPKRNSDKLIARKKDWDPKKYGGFDSPTVAYSVLVVAKVEKGKSKKLKSVKELLGITIMERSSFEKNPIDFLEAKGYKEVKKDLIIKLPKYSLFELENGRKRMLASAGELQKGNELALPSKYVNFLYLASHYEKLKGSPEDNEQKQLFVEQHKHYLDEIIEQISEFSKRVILADANLDKVLSAYNKHRDKPIREQAENIIHLFTLTNLGAPAAFKYFDTTIDRKRYTSTKEVLDATLIHQSITGLYETRIDLSQLGGDGGGGGGGGGGGTVSLQDEHRLFDIPVTTSLPDVWLQDFPQAWAETGGLGRAKCQAPIIIDLKPTAVPVSIKQYPMSLEAHMGIRQHIIKFLELGVLRPCRSPWNTPLLPVKKPGTQDYRPVQDLREINKRTVDIHPTVPNPYNLLSTLKPDYSWYTVLDLKDAFFCLPLAPQSQELFAFEWKDPERGISGQLTWTRLPQGFKNSPTLFNEALHRDLTDFRTQHPEVTLLQYVDDLLLAAPTKKACTQGTRHLLQELGEKGYRASAKKAQICQTKVTYLGYILSEGKRWLTPGRIETVARIPPPRNPREVREFLGTAGFCRLWIPGFAELAAPLYALTKPSTPFTWQTEHQLAFEALKKALLSAPALGLPDTSKPFTLFLDERQGIAKGVLTQKLGPWKRPVAYLSKKLDPVAAGWPPCLRIMAATAMLVKDSAKLTLGQPLTVITPHTLEAIVRQPPDRWITNARLTHYQALLLDTDRVQFGPPVTLNPATLLPVPENQPSPHDCRQVLAETHGTREDLKDQELPDADHTWYTDGSSYLDSGTRRAGAAVVDGHNTIWAQSLPPGTSAQKAELIALTKALELSKGKKANIYTDSRYAFATAHTHGSIYERRGWLTSEGKEIKNKAEIIALLKALFLPQEVAIIHCPGHQKGQDPVAVGNRQADRVARQAAMAEVLTLATEPDNTSHITAGKRTADGSEFEKRTADGSEFESPKKKAKVE

SEQ ID NO: 1561 - protein, 2106 aa, synthetic construct
MPAAKRVKLDGGDKKYSIGLDIGTNSVGWAVITDEYKVPSKKFKVLGNTDRHSIKKNLIGALLFDSGETAEATRLKRTARRRYTRRKNRICYLQEIFSNEMAKVDDSFFHRLEESFLVEEDKKHERHPIFGNIVDEVAYHEKYPTIYHLRKKLVDSTDKADLRLIYLALAHMIKFRGHFLIEGDLNPDNSDVDKLFIQLVQTYNQLFEENPINASGVDAKAILSARLSKSRRLENLIAQLPGEKKNGLFGNLIALSLGLTPNFKSNFDLAEDAKLQLSKDTYDDDLDNLLAQIGDQYADLFLAAKNLSDAILLSDILRVNTEITKAPLSASMIKRYDEHHQDLTLLKALVRQQLPEKYKEIFFDQSKNGYAGYIDGGASQEEFYKFIKPILEKMDGTEELLVKLNREDLLRKQRTFDNGSIPHQIHLGELHAILRRQEDFYPFLKDNREKIEKILTFRIPYYVGPLARGNSRFAWMTRKSEETITPWNFEEVVDKGASAQSFIERMTNFDKNLPNEKVLPKHSLLYEYFTVYNELTKVKYVTEGMRKPAFLSGEQKKAIVDLLFKTNRKVTVKQLKEDYFKKIECFDSVEISGVEDRFNASLGTYHDLLKIIKDKDFLDNEENEDILEDIVLTLTLFEDREMIEERLKTYAHLFDDKVMKQLKRRRYTGWGRLSRKLINGIRDKQSGKTILDFLKSDGFANRNFMQLIHDDSLTFKEDIQKAQVSGQGDSLHEHIANLAGSPAIKKGILQTVKVVDELVKVMGRHKPENIVIEMARENQTTQKGQKNSRERMKRIEEGIKELGSQILKEHPVENTQLQNEKLYLYYLQNGRDMYVDQELDINRLSDYDVDHIVPQSFLKDDSIDNKVLTRSDKARGKSDNVPSEEVVKKMKNYWRQLLNAKLITQRKFDNLTKAERGGLSELDKAGFIKRQLVETRQITKHVAQILDSRMNTKYDENDKLIREVKVITLKSKLVSDFRKDFQFYKVREINNYHHAHDAYLNAVVGTALIKKYPKLESEFVYGDYKVYDVRKMIAKSEQEIGKATAKYFFYSNIMNFFKTEITLANGEIRKRPLIETNGETGEIVWDKGRDFATVRKVLSMPQVNIVKKTEVQTGGFSKESILPKRNSDKLIARKKDWDPKKYGGFDSPTVAYSVLVVAKVEKGKSKKLKSVKELLGITIMERSSFEKNPIDFLEAKGYKEVKKDLIIKLPKYSLFELENGRKRMLASAGELQKGNELALPSKYVNFLYLASHYEKLKGSPEDNEQKQLFVEQHKHYLDEIIEQISEFSKRVILADANLDKVLSAYNKHRDKPIREQAENIIHLFTLTNLGAPAAFKYFDTTIDRKRYTSTKEVLDATLIHQSITGLYETRIDLSQLGGDGGGGGGSEAAAKGGGGSGGTVSLQDEHRLFDIPVTTSLPDVWLQDFPQAWAETGGLGRAKCQAPIIIDLKPTAVPVSIKQYPMSLEAHMGIRQHIIKFLELGVLRPCRSPWNTPLLPVKKPGTQDYRPVQDLREINKRTVDIHPTVPNPYNLLSTLKPDYSWYTVLDLKDAFFCLPLAPQSQELFAFEWKDPERGISGQLTWTRLPQGFKNSPTLFNEALHRDLTDFRTQHPEVTLLQYVDDLLLAAPTKKACTQGTRHLLQELGEKGYRASAKKAQICQTKVTYLGYILSEGKRWLTPGRIETVARIPPPRNPREVREFLGTAGFCRLWIPGFAELAAPLYALTKPSTPFTWQTEHQLAFEALKKALLSAPALGLPDTSKPFTLFLDERQGIAKGVLTQKLGPWKRPVAYLSKKLDPVAAGWPPCLRIMAATAMLVKDSAKLTLGQPLTVITPHTLEAIVRQPPDRWITNARLTHYQALLLDTDRVQFGPPVTLNPATLLPVPENQPSPHDCRQVLAETHGTREDLKDQELPDADHTWYTDGSSYLDSGTRRAGAAVVDGHNTIWAQSLPPGTSAQKAELIALTKALELSKGKKANIYTDSRYAFATAHTHGSIYERRGWLTSEGKEIKNKAEIIALLKALFLPQEVAIIHCPGHQKGQDPVAVGNRQADRVARQAAMAEVLTLATEPDNTSHITAGKRTADGSEFEKRTADGSEFESPKKKAKVE

SEQ ID NO: 1562 - protein, 2111 aa, synthetic construct
MPAAKRVKLDGGDKKYSIGLDIGTNSVGWAVITDEYKVPSKKFKVLGNTDRHSIKKNLIGALLFDSGETAEATRLKRTARRRYTRRKNRICYLQEIFSNEMAKVDDSFFHRLEESFLVEEDKKHERHPIFGNIVDEVAYHEKYPTIYHLRKKLVDSTDKADLRLIYLALAHMIKFRGHFLIEGDLNPDNSDVDKLFIQLVQTYNQLFEENPINASGVDAKAILSARLSKSRRLENLIAQLPGEKKNGLFGNLIALSLGLTPNFKSNFDLAEDAKLQLSKDTYDDDLDNLLAQIGDQYADLFLAAKNLSDAILLSDILRVNTEITKAPLSASMIKRYDEHHQDLTLLKALVRQQLPEKYKEIFFDQSKNGYAGYIDGGASQEEFYKFIKPILEKMDGTEELLVKLNREDLLRKQRTFDNGSIPHQIHLGELHAILRRQEDFYPFLKDNREKIEKILTFRIPYYVGPLARGNSRFAWMTRKSEETITPWNFEEVVDKGASAQSFIERMTNFDKNLPNEKVLPKHSLLYEYFTVYNELTKVKYVTEGMRKPAFLSGEQKKAIVDLLFKTNRKVTVKQLKEDYFKKIECFDSVEISGVEDRFNASLGTYHDLLKIIKDKDFLDNEENEDILEDIVLTLTLFEDREMIEERLKTYAHLFDDKVMKQLKRRRYTGWGRLSRKLINGIRDKQSGKTILDFLKSDGFANRNFMQLIHDDSLTFKEDIQKAQVSGQGDSLHEHIANLAGSPAIKKGILQTVKVVDELVKVMGRHKPENIVIEMARENQTTQKGQKNSRERMKRIEEGIKELGSQILKEHPVENTQLQNEKLYLYYLQNGRDMYVDQELDINRLSDYDVDHIVPQSFLKDDSIDNKVLTRSDKARGKSDNVPSEEVVKKMKNYWRQLLNAKLITQRKFDNLTKAERGGLSELDKAGFIKRQLVETRQITKHVAQILDSRMNTKYDENDKLIREVKVITLKSKLVSDFRKDFQFYKVREINNYHHAHDAYLNAVVGTALIKKYPKLESEFVYGDYKVYDVRKMIAKSEQEIGKATAKYFFYSNIMNFFKTEITLANGEIRKRPLIETNGETGEIVWDKGRDFATVRKVLSMPQVNIVKKTEVQTGGFSKESILPKRNSDKLIARKKDWDPKKYGGFDSPTVAYSVLVVAKVEKGKSKKLKSVKELLGITIMERSSFEKNPIDFLEAKGYKEVKKDLIIKLPKYSLFELENGRKRMLASAGELQKGNELALPSKYVNFLYLASHYEKLKGSPEDNEQKQLFVEQHKHYLDEIIEQISEFSKRVILADANLDKVLSAYNKHRDKPIREQAENIIHLFTLTNLGAPAAFKYFDTTIDRKRYTSTKEVLDATLIHQSITGLYETRIDLSQLGGDGGEAAAKEAAAKEAAAKEAAAKGGTVSLQDEHRLFDIPVTTSLPDVWLQDFPQAWAETGGLGRAKCQAPIIIDLKPTAVPVSIKQYPMSLEAHMGIRQHIIKFLELGVLRPCRSPWNTPLLPVKKPGTQDYRPVQDLREINKRTVDIHPTVPNPYNLLSTLKPDYSWYTVLDLKDAFFCLPLAPQSQELFAFEWKDPERGISGQLTWTRLPQGFKNSPTLFNEALHRDLTDFRTQHPEVTLLQYVDDLLLAAPTKKACTQGTRHLLQELGEKGYRASAKKAQICQTKVTYLGYILSEGKRWLTPGRIETVARIPPPRNPREVREFLGTAGFCRLWIPGFAELAAPLYALTKPSTPFTWQTEHQLAFEALKKALLSAPALGLPDTSKPFTLFLDERQGIAKGVLTQKLGPWKRPVAYLSKKLDPVAAGWPPCLRIMAATAMLVKDSAKLTLGQPLTVITPHTLEAIVRQPPDRWITNARLTHYQALLLDTDRVQFGPPVTLNPATLLPVPENQPSPHDCRQVLAETHGTREDLKDQELPDADHTWYTDGSSYLDSGTRRAGAAVVDGHNTIWAQSLPPGTSAQKAELIALTKALELSKGKKANIYTDSRYAFATAHTHGSIYERRGWLTSEGKEIKNKAEIIALLKALFLPQEVAIIHCPGHQKGQDPVAVGNRQADRVARQAAMAEVLTLATEPDNTSHITAGKRTADGSEFEKRTADGSEFESPKKKAKVE

SEQ ID NO: 1563 - protein, 2102 aa, synthetic construct
MPAAKRVKLDGGDKKYSIGLDIGTNSVGWAVITDEYKVPSKKFKVLGNTDRHSIKKNLIGALLFDSGETAEATRLKRTARRRYTRRKNRICYLQEIFSNEMAKVDDSFFHRLEESFLVEEDKKHERHPIFGNIVDEVAYHEKYPTIYHLRKKLVDSTDKADLRLIYLALAHMIKFRGHFLIEGDLNPDNSDVDKLFIQLVQTYNQLFEENPINASGVDAKAILSARLSKSRRLENLIAQLPGEKKNGLFGNLIALSLGLTPNFKSNFDLAEDAKLQLSKDTYDDDLDNLLAQIGDQYADLFLAAKNLSDAILLSDILRVNTEITKAPLSASMIKRYDEHHQDLTLLKALVRQQLPEKYKEIFFDQSKNGYAGYIDGGASQEEFYKFIKPILEKMDGTEELLVKLNREDLLRKQRTFDNGSIPHQIHLGELHAILRRQEDFYPFLKDNREKIEKILTFRIPYYVGPLARGNSRFAWMTRKSEETITPWNFEEVVDKGASAQSFIERMTNFDKNLPNEKVLPKHSLLYEYFTVYNELTKVKYVTEGMRKPAFLSGEQKKAIVDLLFKTNRKVTVKQLKEDYFKKIECFDSVEISGVEDRFNASLGTYHDLLKIIKDKDFLDNEENEDILEDIVLTLTLFEDREMIEERLKTYAHLFDDKVMKQLKRRRYTGWGRLSRKLINGIRDKQSGKTILDFLKSDGFANRNFMQLIHDDSLTFKEDIQKAQVSGQGDSLHEHIANLAGSPAIKKGILQTVKVVDELVKVMGRHKPENIVIEMARENQTTQKGQKNSRERMKRIEEGIKELGSQILKEHPVENTQLQNEKLYLYYLQNGRDMYVDQELDINRLSDYDVDHIVPQSFLKDDSIDNKVLTRSDKARGKSDNVPSEEVVKKMKNYWRQLLNAKLITQRKFDNLTKAERGGLSELDKAGFIKRQLVETRQITKHVAQILDSRMNTKYDENDKLIREVKVITLKSKLVSDFRKDFQFYKVREINNYHHAHDAYLNAVVGTALIKKYPKLESEFVYGDYKVYDVRKMIAKSEQEIGKATAKYFFYSNIMNFFKTEITLANGEIRKRPLIETNGETGEIVWDKGRDFATVRKVLSMPQVNIVKKTEVQTGGFSKESILPKRNSDKLIARKKDWDPKKYGGFDSPTVAYSVLVVAKVEKGKSKKLKSVKELLGITIMERSSFEKNPIDFLEAKGYKEVKKDLIIKLPKYSLFELENGRKRMLASAGELQKGNELALPSKYVNFLYLASHYEKLKGSPEDNEQKQLFVEQHKHYLDEIIEQISEFSKRVILADANLDKVLSAYNKHRDKPIREQAENIIHLFTLTNLGAPAAFKYFDTTIDRKRYTSTKEVLDATLIHQSITGLYETRIDLSQLGGDGGGGSEAAAKPAPGGTVSLQDEHRLFDIPVTTSLPDVWLQDFPQAWAETGGLGRAKCQAPIIIDLKPTAVPVSIKQYPMSLEAHMGIRQHIIKFLELGVLRPCRSPWNTPLLPVKKPGTQDYRPVQDLREINKRTVDIHPTVPNPYNLLSTLKPDYSWYTVLDLKDAFFCLPLAPQSQELFAFEWKDPERGISGQLTWTRLPQGFKNSPTLFNEALHRDLTDFRTQHPEVTLLQYVDDLLLAAPTKKACTQGTRHLLQELGEKGYRASAKKAQICQTKVTYLGYILSEGKRWLTPGRIETVARIPPPRNPREVREFLGTAGFCRLWIPGFAELAAPLYALTKPSTPFTWQTEHQLAFEALKKALLSAPALGLPDTSKPFTLFLDERQGIAKGVLTQKLGPWKRPVAYLSKKLDPVAAGWPPCLRIMAATAMLVKDSAKLTLGQPLTVITPHTLEAIVRQPPDRWITNARLTHYQALLLDTDRVQFGPPVTLNPATLLPVPENQPSPHDCRQVLAETHGTREDLKDQELPDADHTWYTDGSSYLDSGTRRAGAAVVDGHNTIWAQSLPPGTSAQKAELIALTKALELSKGKKANIYTDSRYAFATAHTHGSIYERRGWLTSEGKEIKNKAEIIALLKALFLPQEVAIIHCPGHQKGQDPVAVGNRQADRVARQAAMAEVLTLATEPDNTSHITAGKRTADGSEFEKRTADGSEFESPKKKAKVE

SEQ ID NO: 1564 - protein, 2096 aa, synthetic construct
MPAAKRVKLDGGDKKYSIGLDIGTNSVGWAVITDEYKVPSKKFKVLGNTDRHSIKKNLIGALLFDSGETAEATRLKRTARRRYTRRKNRICYLQEIFSNEMAKVDDSFFHRLEESFLVEEDKKHERHPIFGNIVDEVAYHEKYPTIYHLRKKLVDSTDKADLRLIYLALAHMIKFRGHFLIEGDLNPDNSDVDKLFIQLVQTYNQLFEENPINASGVDAKAILSARLSKSRRLENLIAQLPGEKKNGLFGNLIALSLGLTPNFKSNFDLAEDAKLQLSKDTYDDDLDNLLAQIGDQYADLFLAAKNLSDAILLSDILRVNTEITKAPLSASMIKRYDEHHQDLTLLKALVRQQLPEKYKEIFFDQSKNGYAGYIDGGASQEEFYKFIKPILEKMDGTEELLVKLNREDLLRKQRTFDNGSIPHQIHLGELHAILRRQEDFYPFLKDNREKIEKILTFRIPYYVGPLARGNSRFAWMTRKSEETITPWNFEEVVDKGASAQSFIERMTNFDKNLPNEKVLPKHSLLYEYFTVYNELTKVKYVTEGMRKPAFLSGEQKKAIVDLLFKTNRKVTVKQLKEDYFKKIECFDSVEISGVEDRFNASLGTYHDLLKIIKDKDFLDNEENEDILEDIVLTLTLFEDREMIEERLKTYAHLFDDKVMKQLKRRRYTGWGRLSRKLINGIRDKQSGKTILDFLKSDGFANRNFMQLIHDDSLTFKEDIQKAQVSGQGDSLHEHIANLAGSPAIKKGILQTVKVVDELVKVMGRHKPENIVIEMARENQTTQKGQKNSRERMKRIEEGIKELGSQILKEHPVENTQLQNEKLYLYYLQNGRDMYVDQELDINRLSDYDVDHIVPQSFLKDDSIDNKVLTRSDKARGKSDNVPSEEVVKKMKNYWRQLLNAKLITQRKFDNLTKAERGGLSELDKAGFIKRQLVETRQITKHVAQILDSRMNTKYDENDKLIREVKVITLKSKLVSDFRKDFQFYKVREINNYHHAHDAYLNAVVGTALIKKYPKLESEFVYGDYKVYDVRKMIAKSEQEIGKATAKYFFYSNIMNFFKTEITLANGEIRKRPLIETNGETGEIVWDKGRDFATVRKVLSMPQVNIVKKTEVQTGGFSKESILPKRNSDKLIARKKDWDPKKYGGFDSPTVAYSVLVVAKVEKGKSKKLKSVKELLGITIMERSSFEKNPIDFLEAKGYKEVKKDLIIKLPKYSLFELENGRKRMLASAGELQKGNELALPSKYVNFLYLASHYEKLKGSPEDNEQKQLFVEQHKHYLDEIIEQISEFSKRVILADANLDKVLSAYNKHRDKPIREQAENIIHLFTLTNLGAPAAFKYFDTTIDRKRYTSTKEVLDATLIHQSITGLYETRIDLSQLGGDGGPAPAPGGTVSLQDEHRLFDIPVTTSLPDVWLQDFPQAWAETGGLGRAKCQAPIIIDLKPTAVPVSIKQYPMSLEAHMGIRQHIIKFLELGVLRPCRSPWNTPLLPVKKPGTQDYRPVQDLREINKRTVDIHPTVPNPYNLLSTLKPDYSWYTVLDLKDAFFCLPLAPQSQELFAFEWKDPERGISGQLTWTRLPQGFKNSPTLFNEALHRDLTDFRTQHPEVTLLQYVDDLLLAAPTKKACTQGTRHLLQELGEKGYRASAKKAQICQTKVTYLGYILSEGKRWLTPGRIETVARIPPPRNPREVREFLGTAGFCRLWIPGFAELAAPLYALTKPSTPFTWQTEHQLAFEALKKALLSAPALGLPDTSKPFTLFLDERQGIAKGVLTQKLGPWKRPVAYLSKKLDPVAAGWPPCLRIMAATAMLVKDSAKLTLGQPLTVITPHTLEAIVRQPPDRWITNARLTHYQALLLDTDRVQFGPPVTLNPATLLPVPENQPSPHDCRQVLAETHGTREDLKDQELPDADHTWYTDGSSYLDSGTRRAGAAVVDGHNTIWAQSLPPGTSAQKAELIALTKALELSKGKKANIYTDSRYAFATAHTHGSIYERRGWLTSEGKEIKNKAEIIALLKALFLPQEVAIIHCPGHQKGQDPVAVGNRQADRVARQAAMAEVLTLATEPDNTSHITAGKRTADGSEFEKRTADGSEFESPKKKAKVE

SEQ ID NO: 1565 - protein, 2097 aa, synthetic construct
MPAAKRVKLDGGDKKYSIGLDIGTNSVGWAVITDEYKVPSKKFKVLGNTDRHSIKKNLIGALLFDSGETAEATRLKRTARRRYTRRKNRICYLQEIFSNEMAKVDDSFFHRLEESFLVEEDKKHERHPIFGNIVDEVAYHEKYPTIYHLRKKLVDSTDKADLRLIYLALAHMIKFRGHFLIEGDLNPDNSDVDKLFIQLVQTYNQLFEENPINASGVDAKAILSARLSKSRRLENLIAQLPGEKKNGLFGNLIALSLGLTPNFKSNFDLAEDAKLQLSKDTYDDDLDNLLAQIGDQYADLFLAAKNLSDAILLSDILRVNTEITKAPLSASMIKRYDEHHQDLTLLKALVRQQLPEKYKEIFFDQSKNGYAGYIDGGASQEEFYKFIKPILEKMDGTEELLVKLNREDLLRKQRTFDNGSIPHQIHLGELHAILRRQEDFYPFLKDNREKIEKILTFRIPYYVGPLARGNSRFAWMTRKSEETITPWNFEEVVDKGASAQSFIERMTNFDKNLPNEKVLPKHSLLYEYFTVYNELTKVKYVTEGMRKPAFLSGEQKKAIVDLLFKTNRKVTVKQLKEDYFKKIECFDSVEISGVEDRFNASLGTYHDLLKIIKDKDFLDNEENEDILEDIVLTLTLFEDREMIEERLKTYAHLFDDKVMKQLKRRRYTGWGRLSRKLINGIRDKQSGKTILDFLKSDGFANRNFMQLIHDDSLTFKEDIQKAQVSGQGDSLHEHIANLAGSPAIKKGILQTVKVVDELVKVMGRHKPENIVIEMARENQTTQKGQKNSRERMKRIEEGIKELGSQILKEHPVENTQLQNEKLYLYYLQNGRDMYVDQELDINRLSDYDVDHIVPQSFLKDDSIDNKVLTRSDKARGKSDNVPSEEVVKKMKNYWRQLLNAKLITQRKFDNLTKAERGGLSELDKAGFIKRQLVETRQITKHVAQILDSRMNTKYDENDKLIREVKVITLKSKLVSDFRKDFQFYKVREINNYHHAHDAYLNAVVGTALIKKYPKLESEFVYGDYKVYDVRKMIAKSEQEIGKATAKYFFYSNIMNFFKTEITLANGEIRKRPLIETNGETGEIVWDKGRDFATVRKVLSMPQVNIVKKTEVQTGGFSKESILPKRNSDKLIARKKDWDPKKYGGFDSPTVAYSVLVVAKVEKGKSKKLKSVKELLGITIMERSSFEKNPIDFLEAKGYKEVKKDLIIKLPKYSLFELENGRKRMLASAGELQKGNELALPSKYVNFLYLASHYEKLKGSPEDNEQKQLFVEQHKHYLDEIIEQISEFSKRVILADANLDKVLSAYNKHRDKPIREQAENIIHLFTLTNLGAPAAFKYFDTTIDRKRYTSTKEVLDATLIHQSITGLYETRIDLSQLGGDGGGGGGSSGGTVSLQDEHRLFDIPVTTSLPDVWLQDFPQAWAETGGLGRAKCQAPIIIDLKPTAVPVSIKQYPMSLEAHMGIRQHIIKFLELGVLRPCRSPWNTPLLPVKKPGTQDYRPVQDLREINKRTVDIHPTVPNPYNLLSTLKPDYSWYTVLDLKDAFFCLPLAPQSQELFAFEWKDPERGISGQLTWTRLPQGFKNSPTLFNEALHRDLTDFRTQHPEVTLLQYVDDLLLAAPTKKACTQGTRHLLQELGEKGYRASAKKAQICQTKVTYLGYILSEGKRWLTPGRIETVARIPPPRNPREVREFLGTAGFCRLWIPGFAELAAPLYALTKPSTPFTWQTEHQLAFEALKKALLSAPALGLPDTSKPFTLFLDERQGIAKGVLTQKLGPWKRPVAYLSKKLDPVAAGWPPCLRIMAATAMLVKDSAKLTLGQPLTVITPHTLEAIVRQPPDRWITNARLTHYQALLLDTDRVQFGPPVTLNPATLLPVPENQPSPHDCRQVLAETHGTREDLKDQELPDADHTWYTDGSSYLDSGTRRAGAAVVDGHNTIWAQSLPPGTSAQKAELIALTKALELSKGKKANIYTDSRYAFATAHTHGSIYERRGWLTSEGKEIKNKAEIIALLKALFLPQEVAIIHCPGHQKGQDPVAVGNRQADRVARQAAMAEVLTLATEPDNTSHITAGKRTADGSEFEKRTADGSEFESPKKKAKVE

SEQ ID NO: 1566 - protein, 2099 aa, synthetic construct
MPAAKRVKLDGGDKKYSIGLDIGTNSVGWAVITDEYKVPSKKFKVLGNTDRHSIKKNLIGALLFDSGETAEATRLKRTARRRYTRRKNRICYLQEIFSNEMAKVDDSFFHRLEESFLVEEDKKHERHPIFGNIVDEVAYHEKYPTIYHLRKKLVDSTDKADLRLIYLALAHMIKFRGHFLIEGDLNPDNSDVDKLFIQLVQTYNQLFEENPINASGVDAKAILSARLSKSRRLENLIAQLPGEKKNGLFGNLIALSLGLTPNFKSNFDLAEDAKLQLSKDTYDDDLDNLLAQIGDQYADLFLAAKNLSDAILLSDILRVNTEITKAPLSASMIKRYDEHHQDLTLLKALVRQQLPEKYKEIFFDQSKNGYAGYIDGGASQEEFYKFIKPILEKMDGTEELLVKLNREDLLRKQRTFDNGSIPHQIHLGELHAILRRQEDFYPFLKDNREKIEKILTFRIPYYVGPLARGNSRFAWMTRKSEETITPWNFEEVVDKGASAQSFIERMTNFDKNLPNEKVLPKHSLLYEYFTVYNELTKVKYVTEGMRKPAFLSGEQKKAIVDLLFKTNRKVTVKQLKEDYFKKIECFDSVEISGVEDRFNASLGTYHDLLKIIKDKDFLDNEENEDILEDIVLTLTLFEDREMIEERLKTYAHLFDDKVMKQLKRRRYTGWGRLSRKLINGIRDKQSGKTILDFLKSDGFANRNFMQLIHDDSLTFKEDIQKAQVSGQGDSLHEHIANLAGSPAIKKGILQTVKVVDELVKVMGRHKPENIVIEMARENQTTQKGQKNSRERMKRIEEGIKELGSQILKEHPVENTQLQNEKLYLYYLQNGRDMYVDQELDINRLSDYDVDHIVPQSFLKDDSIDNKVLTRSDKARGKSDNVPSEEVVKKMKNYWRQLLNAKLITQRKFDNLTKAERGGLSELDKAGFIKRQLVETRQITKHVAQILDSRMNTKYDENDKLIREVKVITLKSKLVSDFRKDFQFYKVREINNYHHAHDAYLNAVVGTALIKKYPKLESEFVYGDYKVYDVRKMIAKSEQEIGKATAKYFFYSNIMNFFKTEITLANGEIRKRPLIETNGETGEIVWDKGRDFATVRKVLSMPQVNIVKKTEVQTGGFSKESILPKRNSDKLIARKKDWDPKKYGGFDSPTVAYSVLVVAKVEKGKSKKLKSVKELLGITIMERSSFEKNPIDFLEAKGYKEVKKDLIIKLPKYSLFELENGRKRMLASAGELQKGNELALPSKYVNFLYLASHYEKLKGSPEDNEQKQLFVEQHKHYLDEIIEQISEFSKRVILADANLDKVLSAYNKHRDKPIREQAENIIHLFTLTNLGAPAAFKYFDTTIDRKRYTSTKEVLDATLIHQSITGLYETRIDLSQLGGDGGGGGEAAAKGGTVSLQDEHRLFDIPVTTSLPDVWLQDFPQAWAETGGLGRAKCQAPIIIDLKPTAVPVSIKQYPMSLEAHMGIRQHIIKFLELGVLRPCRSPWNTPLLPVKKPGTQDYRPVQDLREINKRTVDIHPTVPNPYNLLSTLKPDYSWYTVLDLKDAFFCLPLAPQSQELFAFEWKDPERGISGQLTWTRLPQGFKNSPTLFNEALHRDLTDFRTQHPEVTLLQYVDDLLLAAPTKKACTQGTRHLLQELGEKGYRASAKKAQICQTKVTYLGYILSEGKRWLTPGRIETVARIPPPRNPREVREFLGTAGFCRLWIPGFAELAAPLYALTKPSTPFTWQTEHQLAFEALKKALLSAPALGLPDTSKPFTLFLDERQGIAKGVLTQKLGPWKRPVAYLSKKLDPVAAGWPPCLRIMAATAMLVKDSAKLTLGQPLTVITPHTLEAIVRQPPDRWITNARLTHYQALLLDTDRVQFGPPVTLNPATLLPVPENQPSPHDCRQVLAETHGTREDLKDQELPDADHTWYTDGSSYLDSGTRRAGAAVVDGHNTIWAQSLPPGTSAQKAELIALTKALELSKGKKANIYTDSRYAFATAHTHGSIYERRGWLTSEGKEIKNKAEIIALLKALFLPQEVAIIHCPGHQKGQDPVAVGNRQADRVARQAAMAEVLTLATEPDNTSHITAGKRTADGSEFEKRTADGSEFESPKKKAKVE

SEQ ID NO: 1567 - protein, 2102 aa, synthetic construct
MPAAKRVKLDGGDKKYSIGLDIGTNSVGWAVITDEYKVPSKKFKVLGNTDRHSIKKNLIGALLFDSGETAEATRLKRTARRRYTRRKNRICYLQEIFSNEMAKVDDSFFHRLEESFLVEEDKKHERHPIFGNIVDEVAYHEKYPTIYHLRKKLVDSTDKADLRLIYLALAHMIKFRGHFLIEGDLNPDNSDVDKLFIQLVQTYNQLFEENPINASGVDAKAILSARLSKSRRLENLIAQLPGEKKNGLFGNLIALSLGLTPNFKSNFDLAEDAKLQLSKDTYDDDLDNLLAQIGDQYADLFLAAKNLSDAILLSDILRVNTEITKAPLSASMIKRYDEHHQDLTLLKALVRQQLPEKYKEIFFDQSKNGYAGYIDGGASQEEFYKFIKPILEKMDGTEELLVKLNREDLLRKQRTFDNGSIPHQIHLGELHAILRRQEDFYPFLKDNREKIEKILTFRIPYYVGPLARGNSRFAWMTRKSEETITPWNFEEVVDKGASAQSFIERMTNFDKNLPNEKVLPKHSLLYEYFTVYNELTKVKYVTEGMRKPAFLSGEQKKAIVDLLFKTNRKVTVKQLKEDYFKKIECFDSVEISGVEDRFNASLGTYHDLLKIIKDKDFLDNEENEDILEDIVLTLTLFEDREMIEERLKTYAHLFDDKVMKQLKRRRYTGWGRLSRKLINGIRDKQSGKTILDFLKSDGFANRNFMQLIHDDSLTFKEDIQKAQVSGQGDSLHEHIANLAGSPAIKKGILQTVKVVDELVKVMGRHKPENIVIEMARENQTTQKGQKNSRERMKRIEEGIKELGSQILKEHPVENTQLQNEKLYLYYLQNGRDMYVDQELDINRLSDYDVDHIVPQSFLKDDSIDNKVLTRSDKARGKSDNVPSEEVVKKMKNYWRQLLNAKLITQRKFDNLTKAERGGLSELDKAGFIKRQLVETRQITKHVAQILDSRMNTKYDENDKLIREVKVITLKSKLVSDFRKDFQFYKVREINNYHHAHDAYLNAVVGTALIKKYPKLESEFVYGDYKVYDVRKMIAKSEQEIGKATAKYFFYSNIMNFFKTEITLANGEIRKRPLIETNGETGEIVWDKGRDFATVRKVLSMPQVNIVKKTEVQTGGFSKESILPKRNSDKLIARKKDWDPKKYGGFDSPTVAYSVLVVAKVEKGKSKKLKSVKELLGITIMERSSFEKNPIDFLEAKGYKEVKKDLIIKLPKYSLFELENGRKRMLASAGELQKGNELALPSKYVNFLYLASHYEKLKGSPEDNEQKQLFVEQHKHYLDEIIEQISEFSKRVILADANLDKVLSAYNKHRDKPIREQAENIIHLFTLTNLGAPAAFKYFDTTIDRKRYTSTKEVLDATLIHQSITGLYETRIDLSQLGGDGGGSSGGSEAAAKGGTVSLQDEHRLFDIPVTTSLPDVWLQDFPQAWAETGGLGRAKCQAPIIIDLKPTAVPVSIKQYPMSLEAHMGIRQHIIKFLELGVLRPCRSPWNTPLLPVKKPGTQDYRPVQDLREINKRTVDIHPTVPNPYNLLSTLKPDYSWYTVLDLKDAFFCLPLAPQSQELFAFEWKDPERGISGQLTWTRLPQGFKNSPTLFNEALHRDLTDFRTQHPEVTLLQYVDDLLLAAPTKKACTQGTRHLLQELGEKGYRASAKKAQICQTKVTYLGYILSEGKRWLTPGRIETVARIPPPRNPREVREFLGTAGFCRLWIPGFAELAAPLYALTKPSTPFTWQTEHQLAFEALKKALLSAPALGLPDTSKPFTLFLDERQGIAKGVLTQKLGPWKRPVAYLSKKLDPVAAGWPPCLRIMAATAMLVKDSAKLTLGQPLTVITPHTLEAIVRQPPDRWITNARLTHYQALLLDTDRVQFGPPVTLNPATLLPVPENQPSPHDCRQVLAETHGTREDLKDQELPDADHTWYTDGSSYLDSGTRRAGAAVVDGHNTIWAQSLPPGTSAQKAELIALTKALELSKGKKANIYTDSRYAFATAHTHGSIYERRGWLTSEGKEIKNKAEIIALLKALFLPQEVAIIHCPGHQKGQDPVAVGNRQADRVARQAAMAEVLTLATEPDNTSHITAGKRTADGSEFEKRTADGSEFESPKKKAKVE

SEQ ID NO: 1568 - protein, 2100 aa, synthetic construct
MPAAKRVKLDGGDKKYSIGLDIGTNSVGWAVITDEYKVPSKKFKVLGNTDRHSIKKNLIGALLFDSGETAEATRLKRTARRRYTRRKNRICYLQEIFSNEMAKVDDSFFHRLEESFLVEEDKKHERHPIFGNIVDEVAYHEKYPTIYHLRKKLVDSTDKADLRLIYLALAHMIKFRGHFLIEGDLNPDNSDVDKLFIQLVQTYNQLFEENPINASGVDAKAILSARLSKSRRLENLIAQLPGEKKNGLFGNLIALSLGLTPNFKSNFDLAEDAKLQLSKDTYDDDLDNLLAQIGDQYADLFLAAKNLSDAILLSDILRVNTEITKAPLSASMIKRYDEHHQDLTLLKALVRQQLPEKYKEIFFDQSKNGYAGYIDGGASQEEFYKFIKPILEKMDGTEELLVKLNREDLLRKQRTFDNGSIPHQIHLGELHAILRRQEDFYPFLKDNREKIEKILTFRIPYYVGPLARGNSRFAWMTRKSEETITPWNFEEVVDKGASAQSFIERMTNFDKNLPNEKVLPKHSLLYEYFTVYNELTKVKYVTEGMRKPAFLSGEQKKAIVDLLFKTNRKVTVKQLKEDYFKKIECFDSVEISGVEDRFNASLGTYHDLLKIIKDKDFLDNEENEDILEDIVLTLTLFEDREMIEERLKTYAHLFDDKVMKQLKRRRYTGWGRLSRKLINGIRDKQSGKTILDFLKSDGFANRNFMQLIHDDSLTFKEDIQKAQVSGQGDSLHEHIANLAGSPAIKKGILQTVKVVDELVKVMGRHKPENIVIEMARENQTTQKGQKNSRERMKRIEEGIKELGSQILKEHPVENTQLQNEKLYLYYLQNGRDMYVDQELDINRLSDYDVDHIVPQSFLKDDSIDNKVLTRSDKARGKSDNVPSEEVVKKMKNYWRQLLNAKLITQRKFDNLTKAERGGLSELDKAGFIKRQLVETRQITKHVAQILDSRMNTKYDENDKLIREVKVITLKSKLVSDFRKDFQFYKVREINNYHHAHDAYLNAVVGTALIKKYPKLESEFVYGDYKVYDVRKMIAKSEQEIGKATAKYFFYSNIMNFFKTEITLANGEIRKRPLIETNGETGEIVWDKGRDFATVRKVLSMPQVNIVKKTEVQTGGFSKESILPKRNSDKLIARKKDWDPKKYGGFDSPTVAYSVLVVAKVEKGKSKKLKSVKELLGITIMERSSFEKNPIDFLEAKGYKEVKKDLIIKLPKYSLFELENGRKRMLASAGELQKGNELALPSKYVNFLYLASHYEKLKGSPEDNEQKQLFVEQHKHYLDEIIEQISEFSKRVILADANLDKVLSAYNKHRDKPIREQAENIIHLFTLTNLGAPAAFKYFDTTIDRKRYTSTKEVLDATLIHQSITGLYETRIDLSQLGGDGGPAPGSSGGGGGTVSLQDEHRLFDIPVTTSLPDVWLQDFPQAWAETGGLGRAKCQAPIIIDLKPTAVPVSIKQYPMSLEAHMGIRQHIIKFLELGVLRPCRSPWNTPLLPVKKPGTQDYRPVQDLREINKRTVDIHPTVPNPYNLLSTLKPDYSWYTVLDLKDAFFCLPLAPQSQELFAFEWKDPERGISGQLTWTRLPQGFKNSPTLFNEALHRDLTDFRTQHPEVTLLQYVDDLLLAAPTKKACTQGTRHLLQELGEKGYRASAKKAQICQTKVTYLGYILSEGKRWLTPGRIETVARIPPPRNPREVREFLGTAGFCRLWIPGFAELAAPLYALTKPSTPFTWQTEHQLAFEALKKALLSAPALGLPDTSKPFTLFLDERQGIAKGVLTQKLGPWKRPVAYLSKKLDPVAAGWPPCLRIMAATAMLVKDSAKLTLGQPLTVITPHTLEAIVRQPPDRWITNARLTHYQALLLDTDRVQFGPPVTLNPATLLPVPENQPSPHDCRQVLAETHGTREDLKDQELPDADHTWYTDGSSYLDSGTRRAGAAVVDGHNTIWAQSLPPGTSAQKAELIALTKALELSKGKKANIYTDSRYAFATAHTHGSIYERRGWLTSEGKEIKNKAEIIALLKALFLPQEVAIIHCPGHQKGQDPVAVGNRQADRVARQAAMAEVLTLATEPDNTSHITAGKRTADGSEFEKRTADGSEFESPKKKAKVE

SEQ ID NO: 1569 - protein, 2099 aa, synthetic construct
MPAAKRVKLDGGDKKYSIGLDIGTNSVGWAVITDEYKVPSKKFKVLGNTDRHSIKKNLIGALLFDSGETAEATRLKRTARRRYTRRKNRICYLQEIFSNEMAKVDDSFFHRLEESFLVEEDKKHERHPIFGNIVDEVAYHEKYPTIYHLRKKLVDSTDKADLRLIYLALAHMIKFRGHFLIEGDLNPDNSDVDKLFIQLVQTYNQLFEENPINASGVDAKAILSARLSKSRRLENLIAQLPGEKKNGLFGNLIALSLGLTPNFKSNFDLAEDAKLQLSKDTYDDDLDNLLAQIGDQYADLFLAAKNLSDAILLSDILRVNTEITKAPLSASMIKRYDEHHQDLTLLKALVRQQLPEKYKEIFFDQSKNGYAGYIDGGASQEEFYKFIKPILEKMDGTEELLVKLNREDLLRKQRTFDNGSIPHQIHLGELHAILRRQEDFYPFLKDNREKIEKILTFRIPYYVGPLARGNSRFAWMTRKSEETITPWNFEEVVDKGASAQSFIERMTNFDKNLPNEKVLPKHSLLYEYFTVYNELTKVKYVTEGMRKPAFLSGEQKKAIVDLLFKTNRKVTVKQLKEDYFKKIECFDSVEISGVEDRFNASLGTYHDLLKIIKDKDFLDNEENEDILEDIVLTLTLFEDREMIEERLKTYAHLFDDKVMKQLKRRRYTGWGRLSRKLINGIRDKQSGKTILDFLKSDGFANRNFMQLIHDDSLTFKEDIQKAQVSGQGDSLHEHIANLAGSPAIKKGILQTVKVVDELVKVMGRHKPENIVIEMARENQTTQKGQKNSRERMKRIEEGIKELGSQILKEHPVENTQLQNEKLYLYYLQNGRDMYVDQELDINRLSDYDVDHIVPQSFLKDDSIDNKVLTRSDKARGKSDNVPSEEVVKKMKNYWRQLLNAKLITQRKFDNLTKAERGGLSELDKAGFIKRQLVETRQITKHVAQILDSRMNTKYDENDKLIREVKVITLKSKLVSDFRKDFQFYKVREINNYHHAHDAYLNAVVGTALIKKYPKLESEFVYGDYKVYDVRKMIAKSEQEIGKATAKYFFYSNIMNFFKTEITLANGEIRKRPLIETNGETGEIVWDKGRDFATVRKVLSMPQVNIVKKTEVQTGGFSKESILPKRNSDKLIARKKDWDPKKYGGFDSPTVAYSVLVVAKVEKGKSKKLKSVKELLGITIMERSSFEKNPIDFLEAKGYKEVKKDLIIKLPKYSLFELENGRKRMLASAGELQKGNELALPSKYVNFLYLASHYEKLKGSPEDNEQKQLFVEQHKHYLDEIIEQISEFSKRVILADANLDKVLSAYNKHRDKPIREQAENIIHLFTLTNLGAPAAFKYFDTTIDRKRYTSTKEVLDATLIHQSITGLYETRIDLSQLGGDGGPAPEAAAKGGTVSLQDEHRLFDIPVTTSLPDVWLQDFPQAWAETGGLGRAKCQAPIIIDLKPTAVPVSIKQYPMSLEAHMGIRQHIIKFLELGVLRPCRSPWNTPLLPVKKPGTQDYRPVQDLREINKRTVDIHPTVPNPYNLLSTLKPDYSWYTVLDLKDAFFCLPLAPQSQELFAFEWKDPERGISGQLTWTRLPQGFKNSPTLFNEALHRDLTDFRTQHPEVTLLQYVDDLLLAAPTKKACTQGTRHLLQELGEKGYRASAKKAQICQTKVTYLGYILSEGKRWLTPGRIETVARIPPPRNPREVREFLGTAGFCRLWIPGFAELAAPLYALTKPSTPFTWQTEHQLAFEALKKALLSAPALGLPDTSKPFTLFLDERQGIAKGVLTQKLGPWKRPVAYLSKKLDPVAAGWPPCLRIMAATAMLVKDSAKLTLGQPLTVITPHTLEAIVRQPPDRWITNARLTHYQALLLDTDRVQFGPPVTLNPATLLPVPENQPSPHDCRQVLAETHGTREDLKDQELPDADHTWYTDGSSYLDSGTRRAGAAVVDGHNTIWAQSLPPGTSAQKAELIALTKALELSKGKKANIYTDSRYAFATAHTHGSIYERRGWLTSEGKEIKNKAEIIALLKALFLPQEVAIIHCPGHQKGQDPVAVGNRQADRVARQAAMAEVLTLATEPDNTSHITAGKRTADGSEFEKRTADGSEFESPKKKAKVE

SEQ ID NO: 1570 - protein, 2107 aa, synthetic construct
MPAAKRVKLDGGDKKYSIGLDIGTNSVGWAVITDEYKVPSKKFKVLGNTDRHSIKKNLIGALLFDSGETAEATRLKRTARRRYTRRKNRICYLQEIFSNEMAKVDDSFFHRLEESFLVEEDKKHERHPIFGNIVDEVAYHEKYPTIYHLRKKLVDSTDKADLRLIYLALAHMIKFRGHFLIEGDLNPDNSDVDKLFIQLVQTYNQLFEENPINASGVDAKAILSARLSKSRRLENLIAQLPGEKKNGLFGNLIALSLGLTPNFKSNFDLAEDAKLQLSKDTYDDDLDNLLAQIGDQYADLFLAAKNLSDAILLSDILRVNTEITKAPLSASMIKRYDEHHQDLTLLKALVRQQLPEKYKEIFFDQSKNGYAGYIDGGASQEEFYKFIKPILEKMDGTEELLVKLNREDLLRKQRTFDNGSIPHQIHLGELHAILRRQEDFYPFLKDNREKIEKILTFRIPYYVGPLARGNSRFAWMTRKSEETITPWNFEEVVDKGASAQSFIERMTNFDKNLPNEKVLPKHSLLYEYFTVYNELTKVKYVTEGMRKPAFLSGEQKKAIVDLLFKTNRKVTVKQLKEDYFKKIECFDSVEISGVEDRFNASLGTYHDLLKIIKDKDFLDNEENEDILEDIVLTLTLFEDREMIEERLKTYAHLFDDKVMKQLKRRRYTGWGRLSRKLINGIRDKQSGKTILDFLKSDGFANRNFMQLIHDDSLTFKEDIQKAQVSGQGDSLHEHIANLAGSPAIKKGILQTVKVVDELVKVMGRHKPENIVIEMARENQTTQKGQKNSRERMKRIEEGIKELGSQILKEHPVENTQLQNEKLYLYYLQNGRDMYVDQELDINRLSDYDVDHIVPQSFLKDDSIDNKVLTRSDKARGKSDNVPSEEVVKKMKNYWRQLLNAKLITQRKFDNLTKAERGGLSELDKAGFIKRQLVETRQITKHVAQILDSRMNTKYDENDKLIREVKVITLKSKLVSDFRKDFQFYKVREINNYHHAHDAYLNAVVGTALIKKYPKLESEFVYGDYKVYDVRKMIAKSEQEIGKATAKYFFYSNIMNFFKTEITLANGEIRKRPLIETNGETGEIVWDKGRDFATVRKVLSMPQVNIVKKTEVQTGGFSKESILPKRNSDKLIARKKDWDPKKYGGFDSPTVAYSVLVVAKVEKGKSKKLKSVKELLGITIMERSSFEKNPIDFLEAKGYKEVKKDLIIKLPKYSLFELENGRKRMLASAGELQKGNELALPSKYVNFLYLASHYEKLKGSPEDNEQKQLFVEQHKHYLDEIIEQISEFSKRVILADANLDKVLSAYNKHRDKPIREQAENIIHLFTLTNLGAPAAFKYFDTTIDRKRYTSTKEVLDATLIHQSITGLYETRIDLSQLGGDGGSGSETPGTSESATPESGGTVSLQDEHRLFDIPVTTSLPDVWLQDFPQAWAETGGLGRAKCQAPIIIDLKPTAVPVSIKQYPMSLEAHMGIRQHIIKFLELGVLRPCRSPWNTPLLPVKKPGTQDYRPVQDLREINKRTVDIHPTVPNPYNLLSTLKPDYSWYTVLDLKDAFFCLPLAPQSQELFAFEWKDPERGISGQLTWTRLPQGFKNSPTLFNEALHRDLTDFRTQHPEVTLLQYVDDLLLAAPTKKACTQGTRHLLQELGEKGYRASAKKAQICQTKVTYLGYILSEGKRWLTPGRIETVARIPPPRNPREVREFLGTAGFCRLWIPGFAELAAPLYALTKPSTPFTWQTEHQLAFEALKKALLSAPALGLPDTSKPFTLFLDERQGIAKGVLTQKLGPWKRPVAYLSKKLDPVAAGWPPCLRIMAATAMLVKDSAKLTLGQPLTVITPHTLEAIVRQPPDRWITNARLTHYQALLLDTDRVQFGPPVTLNPATLLPVPENQPSPHDCRQVLAETHGTREDLKDQELPDADHTWYTDGSSYLDSGTRRAGAAVVDGHNTIWAQSLPPGTSAQKAELIALTKALELSKGKKANIYTDSRYAFATAHTHGSIYERRGWLTSEGKEIKNKAEIIALLKALFLPQEVAIIHCPGHQKGQDPVAVGNRQADRVARQAAMAEVLTLATEPDNTSHITAGKRTADGSEFEKRTADGSEFESPKKKAKVE

SEQ ID NO: 1571 - protein, 2102 aa, synthetic construct
MPAAKRVKLDGGDKKYSIGLDIGTNSVGWAVITDEYKVPSKKFKVLGNTDRHSIKKNLIGALLFDSGETAEATRLKRTARRRYTRRKNRICYLQEIFSNEMAKVDDSFFHRLEESFLVEEDKKHERHPIFGNIVDEVAYHEKYPTIYHLRKKLVDSTDKADLRLIYLALAHMIKFRGHFLIEGDLNPDNSDVDKLFIQLVQTYNQLFEENPINASGVDAKAILSARLSKSRRLENLIAQLPGEKKNGLFGNLIALSLGLTPNFKSNFDLAEDAKLQLSKDTYDDDLDNLLAQIGDQYADLFLAAKNLSDAILLSDILRVNTEITKAPLSASMIKRYDEHHQDLTLLKALVRQQLPEKYKEIFFDQSKNGYAGYIDGGASQEEFYKFIKPILEKMDGTEELLVKLNREDLLRKQRTFDNGSIPHQIHLGELHAILRRQEDFYPFLKDNREKIEKILTFRIPYYVGPLARGNSRFAWMTRKSEETITPWNFEEVVDKGASAQSFIERMTNFDKNLPNEKVLPKHSLLYEYFTVYNELTKVKYVTEGMRKPAFLSGEQKKAIVDLLFKTNRKVTVKQLKEDYFKKIECFDSVEISGVEDRFNASLGTYHDLLKIIKDKDFLDNEENEDILEDIVLTLTLFEDREMIEERLKTYAHLFDDKVMKQLKRRRYTGWGRLSRKLINGIRDKQSGKTILDFLKSDGFANRNFMQLIHDDSLTFKEDIQKAQVSGQGDSLHEHIANLAGSPAIKKGILQTVKVVDELVKVMGRHKPENIVIEMARENQTTQKGQKNSRERMKRIEEGIKELGSQILKEHPVENTQLQNEKLYLYYLQNGRDMYVDQELDINRLSDYDVDHIVPQSFLKDDSIDNKVLTRSDKARGKSDNVPSEEVVKKMKNYWRQLLNAKLITQRKFDNLTKAERGGLSELDKAGFIKRQLVETRQITKHVAQILDSRMNTKYDENDKLIREVKVITLKSKLVSDFRKDFQFYKVREINNYHHAHDAYLNAVVGTALIKKYPKLESEFVYGDYKVYDVRKMIAKSEQEIGKATAKYFFYSNIMNFFKTEITLANGEIRKRPLIETNGETGEIVWDKGRDFATVRKVLSMPQVNIVKKTEVQTGGFSKESILPKRNSDKLIARKKDWDPKKYGGFDSPTVAYSVLVVAKVEKGKSKKLKSVKELLGITIMERSSFEKNPIDFLEAKGYKEVKKDLIIKLPKYSLFELENGRKRMLASAGELQKGNELALPSKYVNFLYLASHYEKLKGSPEDNEQKQLFVEQHKHYLDEIIEQISEFSKRVILADANLDKVLSAYNKHRDKPIREQAENIIHLFTLTNLGAPAAFKYFDTTIDRKRYTSTKEVLDATLIHQSITGLYETRIDLSQLGGDGGEAAAKGSSPAPGGTVSLQDEHRLFDIPVTTSLPDVWLQDFPQAWAETGGLGRAKCQAPIIIDLKPTAVPVSIKQYPMSLEAHMGIRQHIIKFLELGVLRPCRSPWNTPLLPVKKPGTQDYRPVQDLREINKRTVDIHPTVPNPYNLLSTLKPDYSWYTVLDLKDAFFCLPLAPQSQELFAFEWKDPERGISGQLTWTRLPQGFKNSPTLFNEALHRDLTDFRTQHPEVTLLQYVDDLLLAAPTKKACTQGTRHLLQELGEKGYRASAKKAQICQTKVTYLGYILSEGKRWLTPGRIETVARIPPPRNPREVREFLGTAGFCRLWIPGFAELAAPLYALTKPSTPFTWQTEHQLAFEALKKALLSAPALGLPDTSKPFTLFLDERQGIAKGVLTQKLGPWKRPVAYLSKKLDPVAAGWPPCLRIMAATAMLVKDSAKLTLGQPLTVITPHTLEAIVRQPPDRWITNARLTHYQALLLDTDRVQFGPPVTLNPATLLPVPENQPSPHDCRQVLAETHGTREDLKDQELPDADHTWYTDGSSYLDSGTRRAGAAVVDGHNTIWAQSLPPGTSAQKAELIALTKALELSKGKKANIYTDSRYAFATAHTHGSIYERRGWLTSEGKEIKNKAEIIALLKALFLPQEVAIIHCPGHQKGQDPVAVGNRQADRVARQAAMAEVLTLATEPDNTSHITAGKRTADGSEFEKRTADGSEFESPKKKAKVE

SEQ ID NO: 1572 - protein, 2097 aa, synthetic construct
MPAAKRVKLDGGDKKYSIGLDIGTNSVGWAVITDEYKVPSKKFKVLGNTDRHSIKKNLIGALLFDSGETAEATRLKRTARRRYTRRKNRICYLQEIFSNEMAKVDDSFFHRLEESFLVEEDKKHERHPIFGNIVDEVAYHEKYPTIYHLRKKLVDSTDKADLRLIYLALAHMIKFRGHFLIEGDLNPDNSDVDKLFIQLVQTYNQLFEENPINASGVDAKAILSARLSKSRRLENLIAQLPGEKKNGLFGNLIALSLGLTPNFKSNFDLAEDAKLQLSKDTYDDDLDNLLAQIGDQYADLFLAAKNLSDAILLSDILRVNTEITKAPLSASMIKRYDEHHQDLTLLKALVRQQLPEKYKEIFFDQSKNGYAGYIDGGASQEEFYKFIKPILEKMDGTEELLVKLNREDLLRKQRTFDNGSIPHQIHLGELHAILRRQEDFYPFLKDNREKIEKILTFRIPYYVGPLARGNSRFAWMTRKSEETITPWNFEEVVDKGASAQSFIERMTNFDKNLPNEKVLPKHSLLYEYFTVYNELTKVKYVTEGMRKPAFLSGEQKKAIVDLLFKTNRKVTVKQLKEDYFKKIECFDSVEISGVEDRFNASLGTYHDLLKIIKDKDFLDNEENEDILEDIVLTLTLFEDREMIEERLKTYAHLFDDKVMKQLKRRRYTGWGRLSRKLINGIRDKQSGKTILDFLKSDGFANRNFMQLIHDDSLTFKEDIQKAQVSGQGDSLHEHIANLAGSPAIKKGILQTVKVVDELVKVMGRHKPENIVIEMARENQTTQKGQKNSRERMKRIEEGIKELGSQILKEHPVENTQLQNEKLYLYYLQNGRDMYVDQELDINRLSDYDVDHIVPQSFLKDDSIDNKVLTRSDKARGKSDNVPSEEVVKKMKNYWRQLLNAKLITQRKFDNLTKAERGGLSELDKAGFIKRQLVETRQITKHVAQILDSRMNTKYDENDKLIREVKVITLKSKLVSDFRKDFQFYKVREINNYHHAHDAYLNAVVGTALIKKYPKLESEFVYGDYKVYDVRKMIAKSEQEIGKATAKYFFYSNIMNFFKTEITLANGEIRKRPLIETNGETGEIVWDKGRDFATVRKVLSMPQVNIVKKTEVQTGGFSKESILPKRNSDKLIARKKDWDPKKYGGFDSPTVAYSVLVVAKVEKGKSKKLKSVKELLGITIMERSSFEKNPIDFLEAKGYKEVKKDLIIKLPKYSLFELENGRKRMLASAGELQKGNELALPSKYVNFLYLASHYEKLKGSPEDNEQKQLFVEQHKHYLDEIIEQISEFSKRVILADANLDKVLSAYNKHRDKPIREQAENIIHLFTLTNLGAPAAFKYFDTTIDRKRYTSTKEVLDATLIHQSITGLYETRIDLSQLGGDGGGGGGGGGGTVSLQDEHRLFDIPVTTSLPDVWLQDFPQAWAETGGLGRAKCQAPIIIDLKPTAVPVSIKQYPMSLEAHMGIRQHIIKFLELGVLRPCRSPWNTPLLPVKKPGTQDYRPVQDLREINKRTVDIHPTVPNPYNLLSTLKPDYSWYTVLDLKDAFFCLPLAPQSQELFAFEWKDPERGISGQLTWTRLPQGFKNSPTLFNEALHRDLTDFRTQHPEVTLLQYVDDLLLAAPTKKACTQGTRHLLQELGEKGYRASAKKAQICQTKVTYLGYILSEGKRWLTPGRIETVARIPPPRNPREVREFLGTAGFCRLWIPGFAELAAPLYALTKPSTPFTWQTEHQLAFEALKKALLSAPALGLPDTSKPFTLFLDERQGIAKGVLTQKLGPWKRPVAYLSKKLDPVAAGWPPCLRIMAATAMLVKDSAKLTLGQPLTVITPHTLEAIVRQPPDRWITNARLTHYQALLLDTDRVQFGPPVTLNPATLLPVPENQPSPHDCRQVLAETHGTREDLKDQELPDADHTWYTDGSSYLDSGTRRAGAAVVDGHNTIWAQSLPPGTSAQKAELIALTKALELSKGKKANIYTDSRYAFATAHTHGSIYERRGWLTSEGKEIKNKAEIIALLKALFLPQEVAIIHCPGHQKGQDPVAVGNRQADRVARQAAMAEVLTLATEPDNTSHITAGKRTADGSEFEKRTADGSEFESPKKKAKVE

SEQ ID NO: 1573 - protein, 2100 aa, synthetic construct
MPAAKRVKLDGGDKKYSIGLDIGTNSVGWAVITDEYKVPSKKFKVLGNTDRHSIKKNLIGALLFDSGETAEATRLKRTARRRYTRRKNRICYLQEIFSNEMAKVDDSFFHRLEESFLVEEDKKHERHPIFGNIVDEVAYHEKYPTIYHLRKKLVDSTDKADLRLIYLALAHMIKFRGHFLIEGDLNPDNSDVDKLFIQLVQTYNQLFEENPINASGVDAKAILSARLSKSRRLENLIAQLPGEKKNGLFGNLIALSLGLTPNFKSNFDLAEDAKLQLSKDTYDDDLDNLLAQIGDQYADLFLAAKNLSDAILLSDILRVNTEITKAPLSASMIKRYDEHHQDLTLLKALVRQQLPEKYKEIFFDQSKNGYAGYIDGGASQEEFYKFIKPILEKMDGTEELLVKLNREDLLRKQRTFDNGSIPHQIHLGELHAILRRQEDFYPFLKDNREKIEKILTFRIPYYVGPLARGNSRFAWMTRKSEETITPWNFEEVVDKGASAQSFIERMTNFDKNLPNEKVLPKHSLLYEYFTVYNELTKVKYVTEGMRKPAFLSGEQKKAIVDLLFKTNRKVTVKQLKEDYFKKIECFDSVEISGVEDRFNASLGTYHDLLKIIKDKDFLDNEENEDILEDIVLTLTLFEDREMIEERLKTYAHLFDDKVMKQLKRRRYTGWGRLSRKLINGIRDKQSGKTILDFLKSDGFANRNFMQLIHDDSLTFKEDIQKAQVSGQGDSLHEHIANLAGSPAIKKGILQTVKVVDELVKVMGRHKPENIVIEMARENQTTQKGQKNSRERMKRIEEGIKELGSQILKEHPVENTQLQNEKLYLYYLQNGRDMYVDQELDINRLSDYDVDHIVPQSFLKDDSIDNKVLTRSDKARGKSDNVPSEEVVKKMKNYWRQLLNAKLITQRKFDNLTKAERGGLSELDKAGFIKRQLVETRQITKHVAQILDSRMNTKYDENDKLIREVKVITLKSKLVSDFRKDFQFYKVREINNYHHAHDAYLNAVVGTALIKKYPKLESEFVYGDYKVYDVRKMIAKSEQEIGKATAKYFFYSNIMNFFKTEITLANGEIRKRPLIETNGETGEIVWDKGRDFATVRKVLSMPQVNIVKKTEVQTGGFSKESILPKRNSDKLIARKKDWDPKKYGGFDSPTVAYSVLVVAKVEKGKSKKLKSVKELLGITIMERSSFEKNPIDFLEAKGYKEVKKDLIIKLPKYSLFELENGRKRMLASAGELQKGNELALPSKYVNFLYLASHYEKLKGSPEDNEQKQLFVEQHKHYLDEIIEQISEFSKRVILADANLDKVLSAYNKHRDKPIREQAENIIHLFTLTNLGAPAAFKYFDTTIDRKRYTSTKEVLDATLIHQSITGLYETRIDLSQLGGDGGGGSGGSGGSGGTVSLQDEHRLFDIPVTTSLPDVWLQDFPQAWAETGGLGRAKCQAPIIIDLKPTAVPVSIKQYPMSLEAHMGIRQHIIKFLELGVLRPCRSPWNTPLLPVKKPGTQDYRPVQDLREINKRTVDIHPTVPNPYNLLSTLKPDYSWYTVLDLKDAFFCLPLAPQSQELFAFEWKDPERGISGQLTWTRLPQGFKNSPTLFNEALHRDLTDFRTQHPEVTLLQYVDDLLLAAPTKKACTQGTRHLLQELGEKGYRASAKKAQICQTKVTYLGYILSEGKRWLTPGRIETVARIPPPRNPREVREFLGTAGFCRLWIPGFAELAAPLYALTKPSTPFTWQTEHQLAFEALKKALLSAPALGLPDTSKPFTLFLDERQGIAKGVLTQKLGPWKRPVAYLSKKLDPVAAGWPPCLRIMAATAMLVKDSAKLTLGQPLTVITPHTLEAIVRQPPDRWITNARLTHYQALLLDTDRVQFGPPVTLNPATLLPVPENQPSPHDCRQVLAETHGTREDLKDQELPDADHTWYTDGSSYLDSGTRRAGAAVVDGHNTIWAQSLPPGTSAQKAELIALTKALELSKGKKANIYTDSRYAFATAHTHGSIYERRGWLTSEGKEIKNKAEIIALLKALFLPQEVAIIHCPGHQKGQDPVAVGNRQADRVARQAAMAEVLTLATEPDNTSHITAGKRTADGSEFEKRTADGSEFESPKKKAKVE

SEQ ID NO: 1574 - protein, 2102 aa, synthetic construct
MPAAKRVKLDGGDKKYSIGLDIGTNSVGWAVITDEYKVPSKKFKVLGNTDRHSIKKNLIGALLFDSGETAEATRLKRTARRRYTRRKNRICYLQEIFSNEMAKVDDSFFHRLEESFLVEEDKKHERHPIFGNIVDEVAYHEKYPTIYHLRKKLVDSTDKADLRLIYLALAHMIKFRGHFLIEGDLNPDNSDVDKLFIQLVQTYNQLFEENPINASGVDAKAILSARLSKSRRLENLIAQLPGEKKNGLFGNLIALSLGLTPNFKSNFDLAEDAKLQLSKDTYDDDLDNLLAQIGDQYADLFLAAKNLSDAILLSDILRVNTEITKAPLSASMIKRYDEHHQDLTLLKALVRQQLPEKYKEIFFDQSKNGYAGYIDGGASQEEFYKFIKPILEKMDGTEELLVKLNREDLLRKQRTFDNGSIPHQIHLGELHAILRRQEDFYPFLKDNREKIEKILTFRIPYYVGPLARGNSRFAWMTRKSEETITPWNFEEVVDKGASAQSFIERMTNFDKNLPNEKVLPKHSLLYEYFTVYNELTKVKYVTEGMRKPAFLSGEQKKAIVDLLFKTNRKVTVKQLKEDYFKKIECFDSVEISGVEDRFNASLGTYHDLLKIIKDKDFLDNEENEDILEDIVLTLTLFEDREMIEERLKTYAHLFDDKVMKQLKRRRYTGWGRLSRKLINGIRDKQSGKTILDFLKSDGFANRNFMQLIHDDSLTFKEDIQKAQVSGQGDSLHEHIANLAGSPAIKKGILQTVKVVDELVKVMGRHKPENIVIEMARENQTTQKGQKNSRERMKRIEEGIKELGSQILKEHPVENTQLQNEKLYLYYLQNGRDMYVDQELDINRLSDYDVDHIVPQSFLKDDSIDNKVLTRSDKARGKSDNVPSEEVVKKMKNYWRQLLNAKLITQRKFDNLTKAERGGLSELDKAGFIKRQLVETRQITKHVAQILDSRMNTKYDENDKLIREVKVITLKSKLVSDFRKDFQFYKVREINNYHHAHDAYLNAVVGTALIKKYPKLESEFVYGDYKVYDVRKMIAKSEQEIGKATAKYFFYSNIMNFFKTEITLANGEIRKRPLIETNGETGEIVWDKGRDFATVRKVLSMPQVNIVKKTEVQTGGFSKESILPKRNSDKLIARKKDWDPKKYGGFDSPTVAYSVLVVAKVEKGKSKKLKSVKELLGITIMERSSFEKNPIDFLEAKGYKEVKKDLIIKLPKYSLFELENGRKRMLASAGELQKGNELALPSKYVNFLYLASHYEKLKGSPEDNEQKQLFVEQHKHYLDEIIEQISEFSKRVILADANLDKVLSAYNKHRDKPIREQAENIIHLFTLTNLGAPAAFKYFDTTIDRKRYTSTKEVLDATLIHQSITGLYETRIDLSQLGGDGGGGGEAAAKGSSGGTVSLQDEHRLFDIPVTTSLPDVWLQDFPQAWAETGGLGRAKCQAPIIIDLKPTAVPVSIKQYPMSLEAHMGIRQHIIKFLELGVLRPCRSPWNTPLLPVKKPGTQDYRPVQDLREINKRTVDIHPTVPNPYNLLSTLKPDYSWYTVLDLKDAFFCLPLAPQSQELFAFEWKDPERGISGQLTWTRLPQGFKNSPTLFNEALHRDLTDFRTQHPEVTLLQYVDDLLLAAPTKKACTQGTRHLLQELGEKGYRASAKKAQICQTKVTYLGYILSEGKRWLTPGRIETVARIPPPRNPREVREFLGTAGFCRLWIPGFAELAAPLYALTKPSTPFTWQTEHQLAFEALKKALLSAPALGLPDTSKPFTLFLDERQGIAKGVLTQKLGPWKRPVAYLSKKLDPVAAGWPPCLRIMAATAMLVKDSAKLTLGQPLTVITPHTLEAIVRQPPDRWITNARLTHYQALLLDTDRVQFGPPVTLNPATLLPVPENQPSPHDCRQVLAETHGTREDLKDQELPDADHTWYTDGSSYLDSGTRRAGAAVVDGHNTIWAQSLPPGTSAQKAELIALTKALELSKGKKANIYTDSRYAFATAHTHGSIYERRGWLTSEGKEIKNKAEIIALLKALFLPQEVAIIHCPGHQKGQDPVAVGNRQADRVARQAAMAEVLTLATEPDNTSHITAGKRTADGSEFEKRTADGSEFESPKKKAKVE

SEQ ID NO: 1575 - protein, 2102 aa, synthetic construct
MPAAKRVKLDGGDKKYSIGLDIGTNSVGWAVITDEYKVPSKKFKVLGNTDRHSIKKNLIGALLFDSGETAEATRLKRTARRRYTRRKNRICYLQEIFSNEMAKVDDSFFHRLEESFLVEEDKKHERHPIFGNIVDEVAYHEKYPTIYHLRKKLVDSTDKADLRLIYLALAHMIKFRGHFLIEGDLNPDNSDVDKLFIQLVQTYNQLFEENPINASGVDAKAILSARLSKSRRLENLIAQLPGEKKNGLFGNLIALSLGLTPNFKSNFDLAEDAKLQLSKDTYDDDLDNLLAQIGDQYADLFLAAKNLSDAILLSDILRVNTEITKAPLSASMIKRYDEHHQDLTLLKALVRQQLPEKYKEIFFDQSKNGYAGYIDGGASQEEFYKFIKPILEKMDGTEELLVKLNREDLLRKQRTFDNGSIPHQIHLGELHAILRRQEDFYPFLKDNREKIEKILTFRIPYYVGPLARGNSRFAWMTRKSEETITPWNFEEVVDKGASAQSFIERMTNFDKNLPNEKVLPKHSLLYEYFTVYNELTKVKYVTEGMRKPAFLSGEQKKAIVDLLFKTNRKVTVKQLKEDYFKKIECFDSVEISGVEDRFNASLGTYHDLLKIIKDKDFLDNEENEDILEDIVLTLTLFEDREMIEERLKTYAHLFDDKVMKQLKRRRYTGWGRLSRKLINGIRDKQSGKTILDFLKSDGFANRNFMQLIHDDSLTFKEDIQKAQVSGQGDSLHEHIANLAGSPAIKKGILQTVKVVDELVKVMGRHKPENIVIEMARENQTTQKGQKNSRERMKRIEEGIKELGSQILKEHPVENTQLQNEKLYLYYLQNGRDMYVDQELDINRLSDYDVDHIVPQSFLKDDSIDNKVLTRSDKARGKSDNVPSEEVVKKMKNYWRQLLNAKLITQRKFDNLTKAERGGLSELDKAGFIKRQLVETRQITKHVAQILDSRMNTKYDENDKLIREVKVITLKSKLVSDFRKDFQFYKVREINNYHHAHDAYLNAVVGTALIKKYPKLESEFVYGDYKVYDVRKMIAKSEQEIGKATAKYFFYSNIMNFFKTEITLANGEIRKRPLIETNGETGEIVWDKGRDFATVRKVLSMPQVNIVKKTEVQTGGFSKESILPKRNSDKLIARKKDWDPKKYGGFDSPTVAYSVLVVAKVEKGKSKKLKSVKELLGITIMERSSFEKNPIDFLEAKGYKEVKKDLIIKLPKYSLFELENGRKRMLASAGELQKGNELALPSKYVNFLYLASHYEKLKGSPEDNEQKQLFVEQHKHYLDEIIEQISEFSKRVILADANLDKVLSAYNKHRDKPIREQAENIIHLFTLTNLGAPAAFKYFDTTIDRKRYTSTKEVLDATLIHQSITGLYETRIDLSQLGGDGGPAPEAAAKGSSGGTVSLQDEHRLFDIPVTTSLPDVWLQDFPQAWAETGGLGRAKCQAPIIIDLKPTAVPVSIKQYPMSLEAHMGIRQHIIKFLELGVLRPCRSPWNTPLLPVKKPGTQDYRPVQDLREINKRTVDIHPTVPNPYNLLSTLKPDYSWYTVLDLKDAFFCLPLAPQSQELFAFEWKDPERGISGQLTWTRLPQGFKNSPTLFNEALHRDLTDFRTQHPEVTLLQYVDDLLLAAPTKKACTQGTRHLLQELGEKGYRASAKKAQICQTKVTYLGYILSEGKRWLTPGRIETVARIPPPRNPREVREFLGTAGFCRLWIPGFAELAAPLYALTKPSTPFTWQTEHQLAFEALKKALLSAPALGLPDTSKPFTLFLDERQGIAKGVLTQKLGPWKRPVAYLSKKLDPVAAGWPPCLRIMAATAMLVKDSAKLTLGQPLTVITPHTLEAIVRQPPDRWITNARLTHYQALLLDTDRVQFGPPVTLNPATLLPVPENQPSPHDCRQVLAETHGTREDLKDQELPDADHTWYTDGSSYLDSGTRRAGAAVVDGHNTIWAQSLPPGTSAQKAELIALTKALELSKGKKANIYTDSRYAFATAHTHGSIYERRGWLTSEGKEIKNKAEIIALLKALFLPQEVAIIHCPGHQKGQDPVAVGNRQADRVARQAAMAEVLTLATEPDNTSHITAGKRTADGSEFEKRTADGSEFESPKKKAKVE

SEQ ID NO: 1576 - protein, 2102 aa, synthetic construct
MPAAKRVKLDGGDKKYSIGLDIGTNSVGWAVITDEYKVPSKKFKVLGNTDRHSIKKNLIGALLFDSGETAEATRLKRTARRRYTRRKNRICYLQEIFSNEMAKVDDSFFHRLEESFLVEEDKKHERHPIFGNIVDEVAYHEKYPTIYHLRKKLVDSTDKADLRLIYLALAHMIKFRGHFLIEGDLNPDNSDVDKLFIQLVQTYNQLFEENPINASGVDAKAILSARLSKSRRLENLIAQLPGEKKNGLFGNLIALSLGLTPNFKSNFDLAEDAKLQLSKDTYDDDLDNLLAQIGDQYADLFLAAKNLSDAILLSDILRVNTEITKAPLSASMIKRYDEHHQDLTLLKALVRQQLPEKYKEIFFDQSKNGYAGYIDGGASQEEFYKFIKPILEKMDGTEELLVKLNREDLLRKQRTFDNGSIPHQIHLGELHAILRRQEDFYPFLKDNREKIEKILTFRIPYYVGPLARGNSRFAWMTRKSEETITPWNFEEVVDKGASAQSFIERMTNFDKNLPNEKVLPKHSLLYEYFTVYNELTKVKYVTEGMRKPAFLSGEQKKAIVDLLFKTNRKVTVKQLKEDYFKKIECFDSVEISGVEDRFNASLGTYHDLLKIIKDKDFLDNEENEDILEDIVLTLTLFEDREMIEERLKTYAHLFDDKVMKQLKRRRYTGWGRLSRKLINGIRDKQSGKTILDFLKSDGFANRNFMQLIHDDSLTFKEDIQKAQVSGQGDSLHEHIANLAGSPAIKKGILQTVKVVDELVKVMGRHKPENIVIEMARENQTTQKGQKNSRERMKRIEEGIKELGSQILKEHPVENTQLQNEKLYLYYLQNGRDMYVDQELDINRLSDYDVDHIVPQSFLKDDSIDNKVLTRSDKARGKSDNVPSEEVVKKMKNYWRQLLNAKLITQRKFDNLTKAERGGLSELDKAGFIKRQLVETRQITKHVAQILDSRMNTKYDENDKLIREVKVITLKSKLVSDFRKDFQFYKVREINNYHHAHDAYLNAVVGTALIKKYPKLESEFVYGDYKVYDVRKMIAKSEQEIGKATAKYFFYSNIMNFFKTEITLANGEIRKRPLIETNGETGEIVWDKGRDFATVRKVLSMPQVNIVKKTEVQTGGFSKESILPKRNSDKLIARKKDWDPKKYGGFDSPTVAYSVLVVAKVEKGKSKKLKSVKELLGITIMERSSFEKNPIDFLEAKGYKEVKKDLIIKLPKYSLFELENGRKRMLASAGELQKGNELALPSKYVNFLYLASHYEKLKGSPEDNEQKQLFVEQHKHYLDEIIEQISEFSKRVILADANLDKVLSAYNKHRDKPIREQAENIIHLFTLTNLGAPAAFKYFDTTIDRKRYTSTKEVLDATLIHQSITGLYETRIDLSQLGGDGGEAAAKGSSGGGGGTVSLQDEHRLFDIPVTTSLPDVWLQDFPQAWAETGGLGRAKCQAPIIIDLKPTAVPVSIKQYPMSLEAHMGIRQHIIKFLELGVLRPCRSPWNTPLLPVKKPGTQDYRPVQDLREINKRTVDIHPTVPNPYNLLSTLKPDYSWYTVLDLKDAFFCLPLAPQSQELFAFEWKDPERGISGQLTWTRLPQGFKNSPTLFNEALHRDLTDFRTQHPEVTLLQYVDDLLLAAPTKKACTQGTRHLLQELGEKGYRASAKKAQICQTKVTYLGYILSEGKRWLTPGRIETVARIPPPRNPREVREFLGTAGFCRLWIPGFAELAAPLYALTKPSTPFTWQTEHQLAFEALKKALLSAPALGLPDTSKPFTLFLDERQGIAKGVLTQKLGPWKRPVAYLSKKLDPVAAGWPPCLRIMAATAMLVKDSAKLTLGQPLTVITPHTLEAIVRQPPDRWITNARLTHYQALLLDTDRVQFGPPVTLNPATLLPVPENQPSPHDCRQVLAETHGTREDLKDQELPDADHTWYTDGSSYLDSGTRRAGAAVVDGHNTIWAQSLPPGTSAQKAELIALTKALELSKGKKANIYTDSRYAFATAHTHGSIYERRGWLTSEGKEIKNKAEIIALLKALFLPQEVAIIHCPGHQKGQDPVAVGNRQADRVARQAAMAEVLTLATEPDNTSHITAGKRTADGSEFEKRTADGSEFESPKKKAKVE

SEQ ID NO: 1577 - protein, 2102 aa, synthetic construct
MPAAKRVKLDGGDKKYSIGLDIGTNSVGWAVITDEYKVPSKKFKVLGNTDRHSIKKNLIGALLFDSGETAEATRLKRTARRRYTRRKNRICYLQEIFSNEMAKVDDSFFHRLEESFLVEEDKKHERHPIFGNIVDEVAYHEKYPTIYHLRKKLVDSTDKADLRLIYLALAHMIKFRGHFLIEGDLNPDNSDVDKLFIQLVQTYNQLFEENPINASGVDAKAILSARLSKSRRLENLIAQLPGEKKNGLFGNLIALSLGLTPNFKSNFDLAEDAKLQLSKDTYDDDLDNLLAQIGDQYADLFLAAKNLSDAILLSDILRVNTEITKAPLSASMIKRYDEHHQDLTLLKALVRQQLPEKYKEIFFDQSKNGYAGYIDGGASQEEFYKFIKPILEKMDGTEELLVKLNREDLLRKQRTFDNGSIPHQIHLGELHAILRRQEDFYPFLKDNREKIEKILTFRIPYYVGPLARGNSRFAWMTRKSEETITPWNFEEVVDKGASAQSFIERMTNFDKNLPNEKVLPKHSLLYEYFTVYNELTKVKYVTEGMRKPAFLSGEQKKAIVDLLFKTNRKVTVKQLKEDYFKKIECFDSVEISGVEDRFNASLGTYHDLLKIIKDKDFLDNEENEDILEDIVLTLTLFEDREMIEERLKTYAHLFDDKVMKQLKRRRYTGWGRLSRKLINGIRDKQSGKTILDFLKSDGFANRNFMQLIHDDSLTFKEDIQKAQVSGQGDSLHEHIANLAGSPAIKKGILQTVKVVDELVKVMGRHKPENIVIEMARENQTTQKGQKNSRERMKRIEEGIKELGSQILKEHPVENTQLQNEKLYLYYLQNGRDMYVDQELDINRLSDYDVDHIVPQSFLKDDSIDNKVLTRSDKARGKSDNVPSEEVVKKMKNYWRQLLNAKLITQRKFDNLTKAERGGLSELDKAGFIKRQLVETRQITKHVAQILDSRMNTKYDENDKLIREVKVITLKSKLVSDFRKDFQFYKVREINNYHHAHDAYLNAVVGTALIKKYPKLESEFVYGDYKVYDVRKMIAKSEQEIGKATAKYFFYSNIMNFFKTEITLANGEIRKRPLIETNGETGEIVWDKGRDFATVRKVLSMPQVNIVKKTEVQTGGFSKESILPKRNSDKLIARKKDWDPKKYGGFDSPTVAYSVLVVAKVEKGKSKKLKSVKELLGITIMERSSFEKNPIDFLEAKGYKEVKKDLIIKLPKYSLFELENGRKRMLASAGELQKGNELALPSKYVNFLYLASHYEKLKGSPEDNEQKQLFVEQHKHYLDEIIEQISEFSKRVILADANLDKVLSAYNKHRDKPIREQAENIIHLFTLTNLGAPAAFKYFDTTIDRKRYTSTKEVLDATLIHQSITGLYETRIDLSQLGGDGGEAAAKGGGGGSGGTVSLQDEHRLFDIPVTTSLPDVWLQDFPQAWAETGGLGRAKCQAPIIIDLKPTAVPVSIKQYPMSLEAHMGIRQHIIKFLELGVLRPCRSPWNTPLLPVKKPGTQDYRPVQDLREINKRTVDIHPTVPNPYNLLSTLKPDYSWYTVLDLKDAFFCLPLAPQSQELFAFEWKDPERGISGQLTWTRLPQGFKNSPTLFNEALHRDLTDFRTQHPEVTLLQYVDDLLLAAPTKKACTQGTRHLLQELGEKGYRASAKKAQICQTKVTYLGYILSEGKRWLTPGRIETVARIPPPRNPREVREFLGTAGFCRLWIPGFAELAAPLYALTKPSTPFTWQTEHQLAFEALKKALLSAPALGLPDTSKPFTLFLDERQGIAKGVLTQKLGPWKRPVAYLSKKLDPVAAGWPPCLRIMAATAMLVKDSAKLTLGQPLTVITPHTLEAIVRQPPDRWITNARLTHYQALLLDTDRVQFGPPVTLNPATLLPVPENQPSPHDCRQVLAETHGTREDLKDQELPDADHTWYTDGSSYLDSGTRRAGAAVVDGHNTIWAQSLPPGTSAQKAELIALTKALELSKGKKANIYTDSRYAFATAHTHGSIYERRGWLTSEGKEIKNKAEIIALLKALFLPQEVAIIHCPGHQKGQDPVAVGNRQADRVARQAAMAEVLTLATEPDNTSHITAGKRTADGSEFEKRTADGSEFESPKKKAKVE

SEQ ID NO: 1578 - protein, 2100 aa, synthetic construct
MPAAKRVKLDGGDKKYSIGLDIGTNSVGWAVITDEYKVPSKKFKVLGNTDRHSIKKNLIGALLFDSGETAEATRLKRTARRRYTRRKNRICYLQEIFSNEMAKVDDSFFHRLEESFLVEEDKKHERHPIFGNIVDEVAYHEKYPTIYHLRKKLVDSTDKADLRLIYLALAHMIKFRGHFLIEGDLNPDNSDVDKLFIQLVQTYNQLFEENPINASGVDAKAILSARLSKSRRLENLIAQLPGEKKNGLFGNLIALSLGLTPNFKSNFDLAEDAKLQLSKDTYDDDLDNLLAQIGDQYADLFLAAKNLSDAILLSDILRVNTEITKAPLSASMIKRYDEHHQDLTLLKALVRQQLPEKYKEIFFDQSKNGYAGYIDGGASQEEFYKFIKPILEKMDGTEELLVKLNREDLLRKQRTFDNGSIPHQIHLGELHAILRRQEDFYPFLKDNREKIEKILTFRIPYYVGPLARGNSRFAWMTRKSEETITPWNFEEVVDKGASAQSFIERMTNFDKNLPNEKVLPKHSLLYEYFTVYNELTKVKYVTEGMRKPAFLSGEQKKAIVDLLFKTNRKVTVKQLKEDYFKKIECFDSVEISGVEDRFNASLGTYHDLLKIIKDKDFLDNEENEDILEDIVLTLTLFEDREMIEERLKTYAHLFDDKVMKQLKRRRYTGWGRLSRKLINGIRDKQSGKTILDFLKSDGFANRNFMQLIHDDSLTFKEDIQKAQVSGQGDSLHEHIANLAGSPAIKKGILQTVKVVDELVKVMGRHKPENIVIEMARENQTTQKGQKNSRERMKRIEEGIKELGSQILKEHPVENTQLQNEKLYLYYLQNGRDMYVDQELDINRLSDYDVDHIVPQSFLKDDSIDNKVLTRSDKARGKSDNVPSEEVVKKMKNYWRQLLNAKLITQRKFDNLTKAERGGLSELDKAGFIKRQLVETRQITKHVAQILDSRMNTKYDENDKLIREVKVITLKSKLVSDFRKDFQFYKVREINNYHHAHDAYLNAVVGTALIKKYPKLESEFVYGDYKVYDVRKMIAKSEQEIGKATAKYFFYSNIMNFFKTEITLANGEIRKRPLIETNGETGEIVWDKGRDFATVRKVLSMPQVNIVKKTEVQTGGFSKESILPKRNSDKLIARKKDWDPKKYGGFDSPTVAYSVLVVAKVEKGKSKKLKSVKELLGITIMERSSFEKNPIDFLEAKGYKEVKKDLIIKLPKYSLFELENGRKRMLASAGELQKGNELALPSKYVNFLYLASHYEKLKGSPEDNEQKQLFVEQHKHYLDEIIEQISEFSKRVILADANLDKVLSAYNKHRDKPIREQAENIIHLFTLTNLGAPAAFKYFDTTIDRKRYTSTKEVLDATLIHQSITGLYETRIDLSQLGGDGGGGGGSSPAPGGTVSLQDEHRLFDIPVTTSLPDVWLQDFPQAWAETGGLGRAKCQAPIIIDLKPTAVPVSIKQYPMSLEAHMGIRQHIIKFLELGVLRPCRSPWNTPLLPVKKPGTQDYRPVQDLREINKRTVDIHPTVPNPYNLLSTLKPDYSWYTVLDLKDAFFCLPLAPQSQELFAFEWKDPERGISGQLTWTRLPQGFKNSPTLFNEALHRDLTDFRTQHPEVTLLQYVDDLLLAAPTKKACTQGTRHLLQELGEKGYRASAKKAQICQTKVTYLGYILSEGKRWLTPGRIETVARIPPPRNPREVREFLGTAGFCRLWIPGFAELAAPLYALTKPSTPFTWQTEHQLAFEALKKALLSAPALGLPDTSKPFTLFLDERQGIAKGVLTQKLGPWKRPVAYLSKKLDPVAAGWPPCLRIMAATAMLVKDSAKLTLGQPLTVITPHTLEAIVRQPPDRWITNARLTHYQALLLDTDRVQFGPPVTLNPATLLPVPENQPSPHDCRQVLAETHGTREDLKDQELPDADHTWYTDGSSYLDSGTRRAGAAVVDGHNTIWAQSLPPGTSAQKAELIALTKALELSKGKKANIYTDSRYAFATAHTHGSIYERRGWLTSEGKEIKNKAEIIALLKALFLPQEVAIIHCPGHQKGQDPVAVGNRQADRVARQAAMAEVLTLATEPDNTSHITAGKRTADGSEFEKRTADGSEFESPKKKAKVE

SEQ ID NO: 1579 - protein, 2102 aa, synthetic construct
MPAAKRVKLDGGDKKYSIGLDIGTNSVGWAVITDEYKVPSKKFKVLGNTDRHSIKKNLIGALLFDSGETAEATRLKRTARRRYTRRKNRICYLQEIFSNEMAKVDDSFFHRLEESFLVEEDKKHERHPIFGNIVDEVAYHEKYPTIYHLRKKLVDSTDKADLRLIYLALAHMIKFRGHFLIEGDLNPDNSDVDKLFIQLVQTYNQLFEENPINASGVDAKAILSARLSKSRRLENLIAQLPGEKKNGLFGNLIALSLGLTPNFKSNFDLAEDAKLQLSKDTYDDDLDNLLAQIGDQYADLFLAAKNLSDAILLSDILRVNTEITKAPLSASMIKRYDEHHQDLTLLKALVRQQLPEKYKEIFFDQSKNGYAGYIDGGASQEEFYKFIKPILEKMDGTEELLVKLNREDLLRKQRTFDNGSIPHQIHLGELHAILRRQEDFYPFLKDNREKIEKILTFRIPYYVGPLARGNSRFAWMTRKSEETITPWNFEEVVDKGASAQSFIERMTNFDKNLPNEKVLPKHSLLYEYFTVYNELTKVKYVTEGMRKPAFLSGEQKKAIVDLLFKTNRKVTVKQLKEDYFKKIECFDSVEISGVEDRFNASLGTYHDLLKIIKDKDFLDNEENEDILEDIVLTLTLFEDREMIEERLKTYAHLFDDKVMKQLKRRRYTGWGRLSRKLINGIRDKQSGKTILDFLKSDGFANRNFMQLIHDDSLTFKEDIQKAQVSGQGDSLHEHIANLAGSPAIKKGILQTVKVVDELVKVMGRHKPENIVIEMARENQTTQKGQKNSRERMKRIEEGIKELGSQILKEHPVENTQLQNEKLYLYYLQNGRDMYVDQELDINRLSDYDVDHIVPQSFLKDDSIDNKVLTRSDKARGKSDNVPSEEVVKKMKNYWRQLLNAKLITQRKFDNLTKAERGGLSELDKAGFIKRQLVETRQITKHVAQILDSRMNTKYDENDKLIREVKVITLKSKLVSDFRKDFQFYKVREINNYHHAHDAYLNAVVGTALIKKYPKLESEFVYGDYKVYDVRKMIAKSEQEIGKATAKYFFYSNIMNFFKTEITLANGEIRKRPLIETNGETGEIVWDKGRDFATVRKVLSMPQVNIVKKTEVQTGGFSKESILPKRNSDKLIARKKDWDPKKYGGFDSPTVAYSVLVVAKVEKGKSKKLKSVKELLGITIMERSSFEKNPIDFLEAKGYKEVKKDLIIKLPKYSLFELENGRKRMLASAGELQKGNELALPSKYVNFLYLASHYEKLKGSPEDNEQKQLFVEQHKHYLDEIIEQISEFSKRVILADANLDKVLSAYNKHRDKPIREQAENIIHLFTLTNLGAPAAFKYFDTTIDRKRYTSTKEVLDATLIHQSITGLYETRIDLSQLGGDGGEAAAKPAPGGSGGTVSLQDEHRLFDIPVTTSLPDVWLQDFPQAWAETGGLGRAKCQAPIIIDLKPTAVPVSIKQYPMSLEAHMGIRQHIIKFLELGVLRPCRSPWNTPLLPVKKPGTQDYRPVQDLREINKRTVDIHPTVPNPYNLLSTLKPDYSWYTVLDLKDAFFCLPLAPQSQELFAFEWKDPERGISGQLTWTRLPQGFKNSPTLFNEALHRDLTDFRTQHPEVTLLQYVDDLLLAAPTKKACTQGTRHLLQELGEKGYRASAKKAQICQTKVTYLGYILSEGKRWLTPGRIETVARIPPPRNPREVREFLGTAGFCRLWIPGFAELAAPLYALTKPSTPFTWQTEHQLAFEALKKALLSAPALGLPDTSKPFTLFLDERQGIAKGVLTQKLGPWKRPVAYLSKKLDPVAAGWPPCLRIMAATAMLVKDSAKLTLGQPLTVITPHTLEAIVRQPPDRWITNARLTHYQALLLDTDRVQFGPPVTLNPATLLPVPENQPSPHDCRQVLAETHGTREDLKDQELPDADHTWYTDGSSYLDSGTRRAGAAVVDGHNTIWAQSLPPGTSAQKAELIALTKALELSKGKKANIYTDSRYAFATAHTHGSIYERRGWLTSEGKEIKNKAEIIALLKALFLPQEVAIIHCPGHQKGQDPVAVGNRQADRVARQAAMAEVLTLATEPDNTSHITAGKRTADGSEFEKRTADGSEFESPKKKAKVE

SEQ ID NO: 1580 - protein, 2102 aa, synthetic construct
MPAAKRVKLDGGDKKYSIGLDIGTNSVGWAVITDEYKVPSKKFKVLGNTDRHSIKKNLIGALLFDSGETAEATRLKRTARRRYTRRKNRICYLQEIFSNEMAKVDDSFFHRLEESFLVEEDKKHERHPIFGNIVDEVAYHEKYPTIYHLRKKLVDSTDKADLRLIYLALAHMIKFRGHFLIEGDLNPDNSDVDKLFIQLVQTYNQLFEENPINASGVDAKAILSARLSKSRRLENLIAQLPGEKKNGLFGNLIALSLGLTPNFKSNFDLAEDAKLQLSKDTYDDDLDNLLAQIGDQYADLFLAAKNLSDAILLSDILRVNTEITKAPLSASMIKRYDEHHQDLTLLKALVRQQLPEKYKEIFFDQSKNGYAGYIDGGASQEEFYKFIKPILEKMDGTEELLVKLNREDLLRKQRTFDNGSIPHQIHLGELHAILRRQEDFYPFLKDNREKIEKILTFRIPYYVGPLARGNSRFAWMTRKSEETITPWNFEEVVDKGASAQSFIERMTNFDKNLPNEKVLPKHSLLYEYFTVYNELTKVKYVTEGMRKPAFLSGEQKKAIVDLLFKTNRKVTVKQLKEDYFKKIECFDSVEISGVEDRFNASLGTYHDLLKIIKDKDFLDNEENEDILEDIVLTLTLFEDREMIEERLKTYAHLFDDKVMKQLKRRRYTGWGRLSRKLINGIRDKQSGKTILDFLKSDGFANRNFMQLIHDDSLTFKEDIQKAQVSGQGDSLHEHIANLAGSPAIKKGILQTVKVVDELVKVMGRHKPENIVIEMARENQTTQKGQKNSRERMKRIEEGIKELGSQILKEHPVENTQLQNEKLYLYYLQNGRDMYVDQELDINRLSDYDVDHIVPQSFLKDDSIDNKVLTRSDKARGKSDNVPSEEVVKKMKNYWRQLLNAKLITQRKFDNLTKAERGGLSELDKAGFIKRQLVETRQITKHVAQILDSRMNTKYDENDKLIREVKVITLKSKLVSDFRKDFQFYKVREINNYHHAHDAYLNAVVGTALIKKYPKLESEFVYGDYKVYDVRKMIAKSEQEIGKATAKYFFYSNIMNFFKTEITLANGEIRKRPLIETNGETGEIVWDKGRDFATVRKVLSMPQVNIVKKTEVQTGGFSKESILPKRNSDKLIARKKDWDPKKYGGFDSPTVAYSVLVVAKVEKGKSKKLKSVKELLGITIMERSSFEKNPIDFLEAKGYKEVKKDLIIKLPKYSLFELENGRKRMLASAGELQKGNELALPSKYVNFLYLASHYEKLKGSPEDNEQKQLFVEQHKHYLDEIIEQISEFSKRVILADANLDKVLSAYNKHRDKPIREQAENIIHLFTLTNLGAPAAFKYFDTTIDRKRYTSTKEVLDATLIHQSITGLYETRIDLSQLGGDGGPAPGGGEAAAKGGTVSLQDEHRLFDIPVTTSLPDVWLQDFPQAWAETGGLGRAKCQAPIIIDLKPTAVPVSIKQYPMSLEAHMGIRQHIIKFLELGVLRPCRSPWNTPLLPVKKPGTQDYRPVQDLREINKRTVDIHPTVPNPYNLLSTLKPDYSWYTVLDLKDAFFCLPLAPQSQELFAFEWKDPERGISGQLTWTRLPQGFKNSPTLFNEALHRDLTDFRTQHPEVTLLQYVDDLLLAAPTKKACTQGTRHLLQELGEKGYRASAKKAQICQTKVTYLGYILSEGKRWLTPGRIETVARIPPPRNPREVREFLGTAGFCRLWIPGFAELAAPLYALTKPSTPFTWQTEHQLAFEALKKALLSAPALGLPDTSKPFTLFLDERQGIAKGVLTQKLGPWKRPVAYLSKKLDPVAAGWPPCLRIMAATAMLVKDSAKLTLGQPLTVITPHTLEAIVRQPPDRWITNARLTHYQALLLDTDRVQFGPPVTLNPATLLPVPENQPSPHDCRQVLAETHGTREDLKDQELPDADHTWYTDGSSYLDSGTRRAGAAVVDGHNTIWAQSLPPGTSAQKAELIALTKALELSKGKKANIYTDSRYAFATAHTHGSIYERRGWLTSEGKEIKNKAEIIALLKALFLPQEVAIIHCPGHQKGQDPVAVGNRQADRVARQAAMAEVLTLATEPDNTSHITAGKRTADGSEFEKRTADGSEFESPKKKAKVE

SEQ ID NO: 1581 - protein, 2102 aa, synthetic construct
MPAAKRVKLDGGDKKYSIGLDIGTNSVGWAVITDEYKVPSKKFKVLGNTDRHSIKKNLIGALLFDSGETAEATRLKRTARRRYTRRKNRICYLQEIFSNEMAKVDDSFFHRLEESFLVEEDKKHERHPIFGNIVDEVAYHEKYPTIYHLRKKLVDSTDKADLRLIYLALAHMIKFRGHFLIEGDLNPDNSDVDKLFIQLVQTYNQLFEENPINASGVDAKAILSARLSKSRRLENLIAQLPGEKKNGLFGNLIALSLGLTPNFKSNFDLAEDAKLQLSKDTYDDDLDNLLAQIGDQYADLFLAAKNLSDAILLSDILRVNTEITKAPLSASMIKRYDEHHQDLTLLKALVRQQLPEKYKEIFFDQSKNGYAGYIDGGASQEEFYKFIKPILEKMDGTEELLVKLNREDLLRKQRTFDNGSIPHQIHLGELHAILRRQEDFYPFLKDNREKIEKILTFRIPYYVGPLARGNSRFAWMTRKSEETITPWNFEEVVDKGASAQSFIERMTNFDKNLPNEKVLPKHSLLYEYFTVYNELTKVKYVTEGMRKPAFLSGEQKKAIVDLLFKTNRKVTVKQLKEDYFKKIECFDSVEISGVEDRFNASLGTYHDLLKIIKDKDFLDNEENEDILEDIVLTLTLFEDREMIEERLKTYAHLFDDKVMKQLKRRRYTGWGRLSRKLINGIRDKQSGKTILDFLKSDGFANRNFMQLIHDDSLTFKEDIQKAQVSGQGDSLHEHIANLAGSPAIKKGILQTVKVVDELVKVMGRHKPENIVIEMARENQTTQKGQKNSRERMKRIEEGIKELGSQILKEHPVENTQLQNEKLYLYYLQNGRDMYVDQELDINRLSDYDVDHIVPQSFLKDDSIDNKVLTRSDKARGKSDNVPSEEVVKKMKNYWRQLLNAKLITQRKFDNLTKAERGGLSELDKAGFIKRQLVETRQITKHVAQILDSRMNTKYDENDKLIREVKVITLKSKLVSDFRKDFQFYKVREINNYHHAHDAYLNAVVGTALIKKYPKLESEFVYGDYKVYDVRKMIAKSEQEIGKATAKYFFYSNIMNFFKTEITLANGEIRKRPLIETNGETGEIVWDKGRDFATVRKVLSMPQVNIVKKTEVQTGGFSKESILPKRNSDKLIARKKDWDPKKYGGFDSPTVAYSVLVVAKVEKGKSKKLKSVKELLGITIMERSSFEKNPIDFLEAKGYKEVKKDLIIKLPKYSLFELENGRKRMLASAGELQKGNELALPSKYVNFLYLASHYEKLKGSPEDNEQKQLFVEQHKHYLDEIIEQISEFSKRVILADANLDKVLSAYNKHRDKPIREQAENIIHLFTLTNLGAPAAFKYFDTTIDRKRYTSTKEVLDATLIHQSITGLYETRIDLSQLGGDGGPAPEAAAKGGGGGTVSLQDEHRLFDIPVTTSLPDVWLQDFPQAWAETGGLGRAKCQAPIIIDLKPTAVPVSIKQYPMSLEAHMGIRQHIIKFLELGVLRPCRSPWNTPLLPVKKPGTQDYRPVQDLREINKRTVDIHPTVPNPYNLLSTLKPDYSWYTVLDLKDAFFCLPLAPQSQELFAFEWKDPERGISGQLTWTRLPQGFKNSPTLFNEALHRDLTDFRTQHPEVTLLQYVDDLLLAAPTKKACTQGTRHLLQELGEKGYRASAKKAQICQTKVTYLGYILSEGKRWLTPGRIETVARIPPPRNPREVREFLGTAGFCRLWIPGFAELAAPLYALTKPSTPFTWQTEHQLAFEALKKALLSAPALGLPDTSKPFTLFLDERQGIAKGVLTQKLGPWKRPVAYLSKKLDPVAAGWPPCLRIMAATAMLVKDSAKLTLGQPLTVITPHTLEAIVRQPPDRWITNARLTHYQALLLDTDRVQFGPPVTLNPATLLPVPENQPSPHDCRQVLAETHGTREDLKDQELPDADHTWYTDGSSYLDSGTRRAGAAVVDGHNTIWAQSLPPGTSAQKAELIALTKALELSKGKKANIYTDSRYAFATAHTHGSIYERRGWLTSEGKEIKNKAEIIALLKALFLPQEVAIIHCPGHQKGQDPVAVGNRQADRVARQAAMAEVLTLATEPDNTSHITAGKRTADGSEFEKRTADGSEFESPKKKAKVE

SEQ ID NO: 1582 - protein, 2100 aa, synthetic construct
MPAAKRVKLDGGDKKYSIGLDIGTNSVGWAVITDEYKVPSKKFKVLGNTDRHSIKKNLIGALLFDSGETAEATRLKRTARRRYTRRKNRICYLQEIFSNEMAKVDDSFFHRLEESFLVEEDKKHERHPIFGNIVDEVAYHEKYPTIYHLRKKLVDSTDKADLRLIYLALAHMIKFRGHFLIEGDLNPDNSDVDKLFIQLVQTYNQLFEENPINASGVDAKAILSARLSKSRRLENLIAQLPGEKKNGLFGNLIALSLGLTPNFKSNFDLAEDAKLQLSKDTYDDDLDNLLAQIGDQYADLFLAAKNLSDAILLSDILRVNTEITKAPLSASMIKRYDEHHQDLTLLKALVRQQLPEKYKEIFFDQSKNGYAGYIDGGASQEEFYKFIKPILEKMDGTEELLVKLNREDLLRKQRTFDNGSIPHQIHLGELHAILRRQEDFYPFLKDNREKIEKILTFRIPYYVGPLARGNSRFAWMTRKSEETITPWNFEEVVDKGASAQSFIERMTNFDKNLPNEKVLPKHSLLYEYFTVYNELTKVKYVTEGMRKPAFLSGEQKKAIVDLLFKTNRKVTVKQLKEDYFKKIECFDSVEISGVEDRFNASLGTYHDLLKIIKDKDFLDNEENEDILEDIVLTLTLFEDREMIEERLKTYAHLFDDKVMKQLKRRRYTGWGRLSRKLINGIRDKQSGKTILDFLKSDGFANRNFMQLIHDDSLTFKEDIQKAQVSGQGDSLHEHIANLAGSPAIKKGILQTVKVVDELVKVMGRHKPENIVIEMARENQTTQKGQKNSRERMKRIEEGIKELGSQILKEHPVENTQLQNEKLYLYYLQNGRDMYVDQELDINRLSDYDVDHIVPQSFLKDDSIDNKVLTRSDKARGKSDNVPSEEVVKKMKNYWRQLLNAKLITQRKFDNLTKAERGGLSELDKAGFIKRQLVETRQITKHVAQILDSRMNTKYDENDKLIREVKVITLKSKLVSDFRKDFQFYKVREINNYHHAHDAYLNAVVGTALIKKYPKLESEFVYGDYKVYDVRKMIAKSEQEIGKATAKYFFYSNIMNFFKTEITLANGEIRKRPLIETNGETGEIVWDKGRDFATVRKVLSMPQVNIVKKTEVQTGGFSKESILPKRNSDKLIARKKDWDPKKYGGFDSPTVAYSVLVVAKVEKGKSKKLKSVKELLGITIMERSSFEKNPIDFLEAKGYKEVKKDLIIKLPKYSLFELENGRKRMLASAGELQKGNELALPSKYVNFLYLASHYEKLKGSPEDNEQKQLFVEQHKHYLDEIIEQISEFSKRVILADANLDKVLSAYNKHRDKPIREQAENIIHLFTLTNLGAPAAFKYFDTTIDRKRYTSTKEVLDATLIHQSITGLYETRIDLSQLGGDGGGSSGSSGSSGGTVSLQDEHRLFDIPVTTSLPDVWLQDFPQAWAETGGLGRAKCQAPIIIDLKPTAVPVSIKQYPMSLEAHMGIRQHIIKFLELGVLRPCRSPWNTPLLPVKKPGTQDYRPVQDLREINKRTVDIHPTVPNPYNLLSTLKPDYSWYTVLDLKDAFFCLPLAPQSQELFAFEWKDPERGISGQLTWTRLPQGFKNSPTLFNEALHRDLTDFRTQHPEVTLLQYVDDLLLAAPTKKACTQGTRHLLQELGEKGYRASAKKAQICQTKVTYLGYILSEGKRWLTPGRIETVARIPPPRNPREVREFLGTAGFCRLWIPGFAELAAPLYALTKPSTPFTWQTEHQLAFEALKKALLSAPALGLPDTSKPFTLFLDERQGIAKGVLTQKLGPWKRPVAYLSKKLDPVAAGWPPCLRIMAATAMLVKDSAKLTLGQPLTVITPHTLEAIVRQPPDRWITNARLTHYQALLLDTDRVQFGPPVTLNPATLLPVPENQPSPHDCRQVLAETHGTREDLKDQELPDADHTWYTDGSSYLDSGTRRAGAAVVDGHNTIWAQSLPPGTSAQKAELIALTKALELSKGKKANIYTDSRYAFATAHTHGSIYERRGWLTSEGKEIKNKAEIIALLKALFLPQEVAIIHCPGHQKGQDPVAVGNRQADRVARQAAMAEVLTLATEPDNTSHITAGKRTADGSEFEKRTADGSEFESPKKKAKVE

SEQ ID NO: 1583 - protein, 2099 aa, synthetic construct
MPAAKRVKLDGGDKKYSIGLDIGTNSVGWAVITDEYKVPSKKFKVLGNTDRHSIKKNLIGALLFDSGETAEATRLKRTARRRYTRRKNRICYLQEIFSNEMAKVDDSFFHRLEESFLVEEDKKHERHPIFGNIVDEVAYHEKYPTIYHLRKKLVDSTDKADLRLIYLALAHMIKFRGHFLIEGDLNPDNSDVDKLFIQLVQTYNQLFEENPINASGVDAKAILSARLSKSRRLENLIAQLPGEKKNGLFGNLIALSLGLTPNFKSNFDLAEDAKLQLSKDTYDDDLDNLLAQIGDQYADLFLAAKNLSDAILLSDILRVNTEITKAPLSASMIKRYDEHHQDLTLLKALVRQQLPEKYKEIFFDQSKNGYAGYIDGGASQEEFYKFIKPILEKMDGTEELLVKLNREDLLRKQRTFDNGSIPHQIHLGELHAILRRQEDFYPFLKDNREKIEKILTFRIPYYVGPLARGNSRFAWMTRKSEETITPWNFEEVVDKGASAQSFIERMTNFDKNLPNEKVLPKHSLLYEYFTVYNELTKVKYVTEGMRKPAFLSGEQKKAIVDLLFKTNRKVTVKQLKEDYFKKIECFDSVEISGVEDRFNASLGTYHDLLKIIKDKDFLDNEENEDILEDIVLTLTLFEDREMIEERLKTYAHLFDDKVMKQLKRRRYTGWGRLSRKLINGIRDKQSGKTILDFLKSDGFANRNFMQLIHDDSLTFKEDIQKAQVSGQGDSLHEHIANLAGSPAIKKGILQTVKVVDELVKVMGRHKPENIVIEMARENQTTQKGQKNSRERMKRIEEGIKELGSQILKEHPVENTQLQNEKLYLYYLQNGRDMYVDQELDINRLSDYDVDHIVPQSFLKDDSIDNKVLTRSDKARGKSDNVPSEEVVKKMKNYWRQLLNAKLITQRKFDNLTKAERGGLSELDKAGFIKRQLVETRQITKHVAQILDSRMNTKYDENDKLIREVKVITLKSKLVSDFRKDFQFYKVREINNYHHAHDAYLNAVVGTALIKKYPKLESEFVYGDYKVYDVRKMIAKSEQEIGKATAKYFFYSNIMNFFKTEITLANGEIRKRPLIETNGETGEIVWDKGRDFATVRKVLSMPQVNIVKKTEVQTGGFSKESILPKRNSDKLIARKKDWDPKKYGGFDSPTVAYSVLVVAKVEKGKSKKLKSVKELLGITIMERSSFEKNPIDFLEAKGYKEVKKDLIIKLPKYSLFELENGRKRMLASAGELQKGNELALPSKYVNFLYLASHYEKLKGSPEDNEQKQLFVEQHKHYLDEIIEQISEFSKRVILADANLDKVLSAYNKHRDKPIREQAENIIHLFTLTNLGAPAAFKYFDTTIDRKRYTSTKEVLDATLIHQSITGLYETRIDLSQLGGDGGEAAAKGSSGGTVSLQDEHRLFDIPVTTSLPDVWLQDFPQAWAETGGLGRAKCQAPIIIDLKPTAVPVSIKQYPMSLEAHMGIRQHIIKFLELGVLRPCRSPWNTPLLPVKKPGTQDYRPVQDLREINKRTVDIHPTVPNPYNLLSTLKPDYSWYTVLDLKDAFFCLPLAPQSQELFAFEWKDPERGISGQLTWTRLPQGFKNSPTLFNEALHRDLTDFRTQHPEVTLLQYVDDLLLAAPTKKACTQGTRHLLQELGEKGYRASAKKAQICQTKVTYLGYILSEGKRWLTPGRIETVARIPPPRNPREVREFLGTAGFCRLWIPGFAELAAPLYALTKPSTPFTWQTEHQLAFEALKKALLSAPALGLPDTSKPFTLFLDERQGIAKGVLTQKLGPWKRPVAYLSKKLDPVAAGWPPCLRIMAATAMLVKDSAKLTLGQPLTVITPHTLEAIVRQPPDRWITNARLTHYQALLLDTDRVQFGPPVTLNPATLLPVPENQPSPHDCRQVLAETHGTREDLKDQELPDADHTWYTDGSSYLDSGTRRAGAAVVDGHNTIWAQSLPPGTSAQKAELIALTKALELSKGKKANIYTDSRYAFATAHTHGSIYERRGWLTSEGKEIKNKAEIIALLKALFLPQEVAIIHCPGHQKGQDPVAVGNRQADRVARQAAMAEVLTLATEPDNTSHITAGKRTADGSEFEKRTADGSEFESPKKKAKVE

SEQ ID NO: 1584 - protein, 2100 aa, synthetic construct
MPAAKRVKLDGGDKKYSIGLDIGTNSVGWAVITDEYKVPSKKFKVLGNTDRHSIKKNLIGALLFDSGETAEATRLKRTARRRYTRRKNRICYLQEIFSNEMAKVDDSFFHRLEESFLVEEDKKHERHPIFGNIVDEVAYHEKYPTIYHLRKKLVDSTDKADLRLIYLALAHMIKFRGHFLIEGDLNPDNSDVDKLFIQLVQTYNQLFEENPINASGVDAKAILSARLSKSRRLENLIAQLPGEKKNGLFGNLIALSLGLTPNFKSNFDLAEDAKLQLSKDTYDDDLDNLLAQIGDQYADLFLAAKNLSDAILLSDILRVNTEITKAPLSASMIKRYDEHHQDLTLLKALVRQQLPEKYKEIFFDQSKNGYAGYIDGGASQEEFYKFIKPILEKMDGTEELLVKLNREDLLRKQRTFDNGSIPHQIHLGELHAILRRQEDFYPFLKDNREKIEKILTFRIPYYVGPLARGNSRFAWMTRKSEETITPWNFEEVVDKGASAQSFIERMTNFDKNLPNEKVLPKHSLLYEYFTVYNELTKVKYVTEGMRKPAFLSGEQKKAIVDLLFKTNRKVTVKQLKEDYFKKIECFDSVEISGVEDRFNASLGTYHDLLKIIKDKDFLDNEENEDILEDIVLTLTLFEDREMIEERLKTYAHLFDDKVMKQLKRRRYTGWGRLSRKLINGIRDKQSGKTILDFLKSDGFANRNFMQLIHDDSLTFKEDIQKAQVSGQGDSLHEHIANLAGSPAIKKGILQTVKVVDELVKVMGRHKPENIVIEMARENQTTQKGQKNSRERMKRIEEGIKELGSQILKEHPVENTQLQNEKLYLYYLQNGRDMYVDQELDINRLSDYDVDHIVPQSFLKDDSIDNKVLTRSDKARGKSDNVPSEEVVKKMKNYWRQLLNAKLITQRKFDNLTKAERGGLSELDKAGFIKRQLVETRQITKHVAQILDSRMNTKYDENDKLIREVKVITLKSKLVSDFRKDFQFYKVREINNYHHAHDAYLNAVVGTALIKKYPKLESEFVYGDYKVYDVRKMIAKSEQEIGKATAKYFFYSNIMNFFKTEITLANGEIRKRPLIETNGETGEIVWDKGRDFATVRKVLSMPQVNIVKKTEVQTGGFSKESILPKRNSDKLIARKKDWDPKKYGGFDSPTVAYSVLVVAKVEKGKSKKLKSVKELLGITIMERSSFEKNPIDFLEAKGYKEVKKDLIIKLPKYSLFELENGRKRMLASAGELQKGNELALPSKYVNFLYLASHYEKLKGSPEDNEQKQLFVEQHKHYLDEIIEQISEFSKRVILADANLDKVLSAYNKHRDKPIREQAENIIHLFTLTNLGAPAAFKYFDTTIDRKRYTSTKEVLDATLIHQSITGLYETRIDLSQLGGDGGGSSGGSPAPGGTVSLQDEHRLFDIPVTTSLPDVWLQDFPQAWAETGGLGRAKCQAPIIIDLKPTAVPVSIKQYPMSLEAHMGIRQHIIKFLELGVLRPCRSPWNTPLLPVKKPGTQDYRPVQDLREINKRTVDIHPTVPNPYNLLSTLKPDYSWYTVLDLKDAFFCLPLAPQSQELFAFEWKDPERGISGQLTWTRLPQGFKNSPTLFNEALHRDLTDFRTQHPEVTLLQYVDDLLLAAPTKKACTQGTRHLLQELGEKGYRASAKKAQICQTKVTYLGYILSEGKRWLTPGRIETVARIPPPRNPREVREFLGTAGFCRLWIPGFAELAAPLYALTKPSTPFTWQTEHQLAFEALKKALLSAPALGLPDTSKPFTLFLDERQGIAKGVLTQKLGPWKRPVAYLSKKLDPVAAGWPPCLRIMAATAMLVKDSAKLTLGQPLTVITPHTLEAIVRQPPDRWITNARLTHYQALLLDTDRVQFGPPVTLNPATLLPVPENQPSPHDCRQVLAETHGTREDLKDQELPDADHTWYTDGSSYLDSGTRRAGAAVVDGHNTIWAQSLPPGTSAQKAELIALTKALELSKGKKANIYTDSRYAFATAHTHGSIYERRGWLTSEGKEIKNKAEIIALLKALFLPQEVAIIHCPGHQKGQDPVAVGNRQADRVARQAAMAEVLTLATEPDNTSHITAGKRTADGSEFEKRTADGSEFESPKKKAKVE

SEQ ID NO: 1585 - protein, 2102 aa, synthetic construct
MPAAKRVKLDGGDKKYSIGLDIGTNSVGWAVITDEYKVPSKKFKVLGNTDRHSIKKNLIGALLFDSGETAEATRLKRTARRRYTRRKNRICYLQEIFSNEMAKVDDSFFHRLEESFLVEEDKKHERHPIFGNIVDEVAYHEKYPTIYHLRKKLVDSTDKADLRLIYLALAHMIKFRGHFLIEGDLNPDNSDVDKLFIQLVQTYNQLFEENPINASGVDAKAILSARLSKSRRLENLIAQLPGEKKNGLFGNLIALSLGLTPNFKSNFDLAEDAKLQLSKDTYDDDLDNLLAQIGDQYADLFLAAKNLSDAILLSDILRVNTEITKAPLSASMIKRYDEHHQDLTLLKALVRQQLPEKYKEIFFDQSKNGYAGYIDGGASQEEFYKFIKPILEKMDGTEELLVKLNREDLLRKQRTFDNGSIPHQIHLGELHAILRRQEDFYPFLKDNREKIEKILTFRIPYYVGPLARGNSRFAWMTRKSEETITPWNFEEVVDKGASAQSFIERMTNFDKNLPNEKVLPKHSLLYEYFTVYNELTKVKYVTEGMRKPAFLSGEQKKAIVDLLFKTNRKVTVKQLKEDYFKKIECFDSVEISGVEDRFNASLGTYHDLLKIIKDKDFLDNEENEDILEDIVLTLTLFEDREMIEERLKTYAHLFDDKVMKQLKRRRYTGWGRLSRKLINGIRDKQSGKTILDFLKSDGFANRNFMQLIHDDSLTFKEDIQKAQVSGQGDSLHEHIANLAGSPAIKKGILQTVKVVDELVKVMGRHKPENIVIEMARENQTTQKGQKNSRERMKRIEEGIKELGSQILKEHPVENTQLQNEKLYLYYLQNGRDMYVDQELDINRLSDYDVDHIVPQSFLKDDSIDNKVLTRSDKARGKSDNVPSEEVVKKMKNYWRQLLNAKLITQRKFDNLTKAERGGLSELDKAGFIKRQLVETRQITKHVAQILDSRMNTKYDENDKLIREVKVITLKSKLVSDFRKDFQFYKVREINNYHHAHDAYLNAVVGTALIKKYPKLESEFVYGDYKVYDVRKMIAKSEQEIGKATAKYFFYSNIMNFFKTEITLANGEIRKRPLIETNGETGEIVWDKGRDFATVRKVLSMPQVNIVKKTEVQTGGFSKESILPKRNSDKLIARKKDWDPKKYGGFDSPTVAYSVLVVAKVEKGKSKKLKSVKELLGITIMERSSFEKNPIDFLEAKGYKEVKKDLIIKLPKYSLFELENGRKRMLASAGELQKGNELALPSKYVNFLYLASHYEKLKGSPEDNEQKQLFVEQHKHYLDEIIEQISEFSKRVILADANLDKVLSAYNKHRDKPIREQAENIIHLFTLTNLGAPAAFKYFDTTIDRKRYTSTKEVLDATLIHQSITGLYETRIDLSQLGGDGGGGGEAAAKGGSGGTVSLQDEHRLFDIPVTTSLPDVWLQDFPQAWAETGGLGRAKCQAPIIIDLKPTAVPVSIKQYPMSLEAHMGIRQHIIKFLELGVLRPCRSPWNTPLLPVKKPGTQDYRPVQDLREINKRTVDIHPTVPNPYNLLSTLKPDYSWYTVLDLKDAFFCLPLAPQSQELFAFEWKDPERGISGQLTWTRLPQGFKNSPTLFNEALHRDLTDFRTQHPEVTLLQYVDDLLLAAPTKKACTQGTRHLLQELGEKGYRASAKKAQICQTKVTYLGYILSEGKRWLTPGRIETVARIPPPRNPREVREFLGTAGFCRLWIPGFAELAAPLYALTKPSTPFTWQTEHQLAFEALKKALLSAPALGLPDTSKPFTLFLDERQGIAKGVLTQKLGPWKRPVAYLSKKLDPVAAGWPPCLRIMAATAMLVKDSAKLTLGQPLTVITPHTLEAIVRQPPDRWITNARLTHYQALLLDTDRVQFGPPVTLNPATLLPVPENQPSPHDCRQVLAETHGTREDLKDQELPDADHTWYTDGSSYLDSGTRRAGAAVVDGHNTIWAQSLPPGTSAQKAELIALTKALELSKGKKANIYTDSRYAFATAHTHGSIYERRGWLTSEGKEIKNKAEIIALLKALFLPQEVAIIHCPGHQKGQDPVAVGNRQADRVARQAAMAEVLTLATEPDNTSHITAGKRTADGSEFEKRTADGSEFESPKKKAKVE

SEQ ID NO: 1586 - protein, 2100 aa, synthetic construct
MPAAKRVKLDGGDKKYSIGLDIGTNSVGWAVITDEYKVPSKKFKVLGNTDRHSIKKNLIGALLFDSGETAEATRLKRTARRRYTRRKNRICYLQEIFSNEMAKVDDSFFHRLEESFLVEEDKKHERHPIFGNIVDEVAYHEKYPTIYHLRKKLVDSTDKADLRLIYLALAHMIKFRGHFLIEGDLNPDNSDVDKLFIQLVQTYNQLFEENPINASGVDAKAILSARLSKSRRLENLIAQLPGEKKNGLFGNLIALSLGLTPNFKSNFDLAEDAKLQLSKDTYDDDLDNLLAQIGDQYADLFLAAKNLSDAILLSDILRVNTEITKAPLSASMIKRYDEHHQDLTLLKALVRQQLPEKYKEIFFDQSKNGYAGYIDGGASQEEFYKFIKPILEKMDGTEELLVKLNREDLLRKQRTFDNGSIPHQIHLGELHAILRRQEDFYPFLKDNREKIEKILTFRIPYYVGPLARGNSRFAWMTRKSEETITPWNFEEVVDKGASAQSFIERMTNFDKNLPNEKVLPKHSLLYEYFTVYNELTKVKYVTEGMRKPAFLSGEQKKAIVDLLFKTNRKVTVKQLKEDYFKKIECFDSVEISGVEDRFNASLGTYHDLLKIIKDKDFLDNEENEDILEDIVLTLTLFEDREMIEERLKTYAHLFDDKVMKQLKRRRYTGWGRLSRKLINGIRDKQSGKTILDFLKSDGFANRNFMQLIHDDSLTFKEDIQKAQVSGQGDSLHEHIANLAGSPAIKKGILQTVKVVDELVKVMGRHKPENIVIEMARENQTTQKGQKNSRERMKRIEEGIKELGSQILKEHPVENTQLQNEKLYLYYLQNGRDMYVDQELDINRLSDYDVDHIVPQSFLKDDSIDNKVLTRSDKARGKSDNVPSEEVVKKMKNYWRQLLNAKLITQRKFDNLTKAERGGLSELDKAGFIKRQLVETRQITKHVAQILDSRMNTKYDENDKLIREVKVITLKSKLVSDFRKDFQFYKVREINNYHHAHDAYLNAVVGTALIKKYPKLESEFVYGDYKVYDVRKMIAKSEQEIGKATAKYFFYSNIMNFFKTEITLANGEIRKRPLIETNGETGEIVWDKGRDFATVRKVLSMPQVNIVKKTEVQTGGFSKESILPKRNSDKLIARKKDWDPKKYGGFDSPTVAYSVLVVAKVEKGKSKKLKSVKELLGITIMERSSFEKNPIDFLEAKGYKEVKKDLIIKLPKYSLFELENGRKRMLASAGELQKGNELALPSKYVNFLYLASHYEKLKGSPEDNEQKQLFVEQHKHYLDEIIEQISEFSKRVILADANLDKVLSAYNKHRDKPIREQAENIIHLFTLTNLGAPAAFKYFDTTIDRKRYTSTKEVLDATLIHQSITGLYETRIDLSQLGGDGGPAPGSSGGSGGTVSLQDEHRLFDIPVTTSLPDVWLQDFPQAWAETGGLGRAKCQAPIIIDLKPTAVPVSIKQYPMSLEAHMGIRQHIIKFLELGVLRPCRSPWNTPLLPVKKPGTQDYRPVQDLREINKRTVDIHPTVPNPYNLLSTLKPDYSWYTVLDLKDAFFCLPLAPQSQELFAFEWKDPERGISGQLTWTRLPQGFKNSPTLFNEALHRDLTDFRTQHPEVTLLQYVDDLLLAAPTKKACTQGTRHLLQELGEKGYRASAKKAQICQTKVTYLGYILSEGKRWLTPGRIETVARIPPPRNPREVREFLGTAGFCRLWIPGFAELAAPLYALTKPSTPFTWQTEHQLAFEALKKALLSAPALGLPDTSKPFTLFLDERQGIAKGVLTQKLGPWKRPVAYLSKKLDPVAAGWPPCLRIMAATAMLVKDSAKLTLGQPLTVITPHTLEAIVRQPPDRWITNARLTHYQALLLDTDRVQFGPPVTLNPATLLPVPENQPSPHDCRQVLAETHGTREDLKDQELPDADHTWYTDGSSYLDSGTRRAGAAVVDGHNTIWAQSLPPGTSAQKAELIALTKALELSKGKKANIYTDSRYAFATAHTHGSIYERRGWLTSEGKEIKNKAEIIALLKALFLPQEVAIIHCPGHQKGQDPVAVGNRQADRVARQAAMAEVLTLATEPDNTSHITAGKRTADGSEFEKRTADGSEFESPKKKAKVE

SEQ ID NO: 1587 - protein, 2101 aa, synthetic construct
MPAAKRVKLDGGDKKYSIGLDIGTNSVGWAVITDEYKVPSKKFKVLGNTDRHSIKKNLIGALLFDSGETAEATRLKRTARRRYTRRKNRICYLQEIFSNEMAKVDDSFFHRLEESFLVEEDKKHERHPIFGNIVDEVAYHEKYPTIYHLRKKLVDSTDKADLRLIYLALAHMIKFRGHFLIEGDLNPDNSDVDKLFIQLVQTYNQLFEENPINASGVDAKAILSARLSKSRRLENLIAQLPGEKKNGLFGNLIALSLGLTPNFKSNFDLAEDAKLQLSKDTYDDDLDNLLAQIGDQYADLFLAAKNLSDAILLSDILRVNTEITKAPLSASMIKRYDEHHQDLTLLKALVRQQLPEKYKEIFFDQSKNGYAGYIDGGASQEEFYKFIKPILEKMDGTEELLVKLNREDLLRKQRTFDNGSIPHQIHLGELHAILRRQEDFYPFLKDNREKIEKILTFRIPYYVGPLARGNSRFAWMTRKSEETITPWNFEEVVDKGASAQSFIERMTNFDKNLPNEKVLPKHSLLYEYFTVYNELTKVKYVTEGMRKPAFLSGEQKKAIVDLLFKTNRKVTVKQLKEDYFKKIECFDSVEISGVEDRFNASLGTYHDLLKIIKDKDFLDNEENEDILEDIVLTLTLFEDREMIEERLKTYAHLFDDKVMKQLKRRRYTGWGRLSRKLINGIRDKQSGKTILDFLKSDGFANRNFMQLIHDDSLTFKEDIQKAQVSGQGDSLHEHIANLAGSPAIKKGILQTVKVVDELVKVMGRHKPENIVIEMARENQTTQKGQKNSRERMKRIEEGIKELGSQILKEHPVENTQLQNEKLYLYYLQNGRDMYVDQELDINRLSDYDVDHIVPQSFLKDDSIDNKVLTRSDKARGKSDNVPSEEVVKKMKNYWRQLLNAKLITQRKFDNLTKAERGGLSELDKAGFIKRQLVETRQITKHVAQILDSRMNTKYDENDKLIREVKVITLKSKLVSDFRKDFQFYKVREINNYHHAHDAYLNAVVGTALIKKYPKLESEFVYGDYKVYDVRKMIAKSEQEIGKATAKYFFYSNIMNFFKTEITLANGEIRKRPLIETNGETGEIVWDKGRDFATVRKVLSMPQVNIVKKTEVQTGGFSKESILPKRNSDKLIARKKDWDPKKYGGFDSPTVAYSVLVVAKVEKGKSKKLKSVKELLGITIMERSSFEKNPIDFLEAKGYKEVKKDLIIKLPKYSLFELENGRKRMLASAGELQKGNELALPSKYVNFLYLASHYEKLKGSPEDNEQKQLFVEQHKHYLDEIIEQISEFSKRVILADANLDKVLSAYNKHRDKPIREQAENIIHLFTLTNLGAPAAFKYFDTTIDRKRYTSTKEVLDATLIHQSITGLYETRIDLSQLGGDGGEAAAKEAAAKGGTVSLQDEHRLFDIPVTTSLPDVWLQDFPQAWAETGGLGRAKCQAPIIIDLKPTAVPVSIKQYPMSLEAHMGIRQHIIKFLELGVLRPCRSPWNTPLLPVKKPGTQDYRPVQDLREINKRTVDIHPTVPNPYNLLSTLKPDYSWYTVLDLKDAFFCLPLAPQSQELFAFEWKDPERGISGQLTWTRLPQGFKNSPTLFNEALHRDLTDFRTQHPEVTLLQYVDDLLLAAPTKKACTQGTRHLLQELGEKGYRASAKKAQICQTKVTYLGYILSEGKRWLTPGRIETVARIPPPRNPREVREFLGTAGFCRLWIPGFAELAAPLYALTKPSTPFTWQTEHQLAFEALKKALLSAPALGLPDTSKPFTLFLDERQGIAKGVLTQKLGPWKRPVAYLSKKLDPVAAGWPPCLRIMAATAMLVKDSAKLTLGQPLTVITPHTLEAIVRQPPDRWITNARLTHYQALLLDTDRVQFGPPVTLNPATLLPVPENQPSPHDCRQVLAETHGTREDLKDQELPDADHTWYTDGSSYLDSGTRRAGAAVVDGHNTIWAQSLPPGTSAQKAELIALTKALELSKGKKANIYTDSRYAFATAHTHGSIYERRGWLTSEGKEIKNKAEIIALLKALFLPQEVAIIHCPGHQKGQDPVAVGNRQADRVARQAAMAEVLTLATEPDNTSHITAGKRTADGSEFEKRTADGSEFESPKKKAKVE

SEQ ID NO: 1588 - protein, 2109 aa, synthetic construct
MPAAKRVKLDGGDKKYSIGLDIGTNSVGWAVITDEYKVPSKKFKVLGNTDRHSIKKNLIGALLFDSGETAEATRLKRTARRRYTRRKNRICYLQEIFSNEMAKVDDSFFHRLEESFLVEEDKKHERHPIFGNIVDEVAYHEKYPTIYHLRKKLVDSTDKADLRLIYLALAHMIKFRGHFLIEGDLNPDNSDVDKLFIQLVQTYNQLFEENPINASGVDAKAILSARLSKSRRLENLIAQLPGEKKNGLFGNLIALSLGLTPNFKSNFDLAEDAKLQLSKDTYDDDLDNLLAQIGDQYADLFLAAKNLSDAILLSDILRVNTEITKAPLSASMIKRYDEHHQDLTLLKALVRQQLPEKYKEIFFDQSKNGYAGYIDGGASQEEFYKFIKPILEKMDGTEELLVKLNREDLLRKQRTFDNGSIPHQIHLGELHAILRRQEDFYPFLKDNREKIEKILTFRIPYYVGPLARGNSRFAWMTRKSEETITPWNFEEVVDKGASAQSFIERMTNFDKNLPNEKVLPKHSLLYEYFTVYNELTKVKYVTEGMRKPAFLSGEQKKAIVDLLFKTNRKVTVKQLKEDYFKKIECFDSVEISGVEDRFNASLGTYHDLLKIIKDKDFLDNEENEDILEDIVLTLTLFEDREMIEERLKTYAHLFDDKVMKQLKRRRYTGWGRLSRKLINGIRDKQSGKTILDFLKSDGFANRNFMQLIHDDSLTFKEDIQKAQVSGQGDSLHEHIANLAGSPAIKKGILQTVKVVDELVKVMGRHKPENIVIEMARENQTTQKGQKNSRERMKRIEEGIKELGSQILKEHPVENTQLQNEKLYLYYLQNGRDMYVDQELDINRLSDYDVDHIVPQSFLKDDSIDNKVLTRSDKARGKSDNVPSEEVVKKMKNYWRQLLNAKLITQRKFDNLTKAERGGLSELDKAGFIKRQLVETRQITKHVAQILDSRMNTKYDENDKLIREVKVITLKSKLVSDFRKDFQFYKVREINNYHHAHDAYLNAVVGTALIKKYPKLESEFVYGDYKVYDVRKMIAKSEQEIGKATAKYFFYSNIMNFFKTEITLANGEIRKRPLIETNGETGEIVWDKGRDFATVRKVLSMPQVNIVKKTEVQTGGFSKESILPKRNSDKLIARKKDWDPKKYGGFDSPTVAYSVLVVAKVEKGKSKKLKSVKELLGITIMERSSFEKNPIDFLEAKGYKEVKKDLIIKLPKYSLFELENGRKRMLASAGELQKGNELALPSKYVNFLYLASHYEKLKGSPEDNEQKQLFVEQHKHYLDEIIEQISEFSKRVILADANLDKVLSAYNKHRDKPIREQAENIIHLFTLTNLGAPAAFKYFDTTIDRKRYTSTKEVLDATLIHQSITGLYETRIDLSQLGGDGGGSSGSSGSSGSSGSSGSSGGTVSLQDEHRLFDIPVTTSLPDVWLQDFPQAWAETGGLGRAKCQAPIIIDLKPTAVPVSIKQYPMSLEAHMGIRQHIIKFLELGVLRPCRSPWNTPLLPVKKPGTQDYRPVQDLREINKRTVDIHPTVPNPYNLLSTLKPDYSWYTVLDLKDAFFCLPLAPQSQELFAFEWKDPERGISGQLTWTRLPQGFKNSPTLFNEALHRDLTDFRTQHPEVTLLQYVDDLLLAAPTKKACTQGTRHLLQELGEKGYRASAKKAQICQTKVTYLGYILSEGKRWLTPGRIETVARIPPPRNPREVREFLGTAGFCRLWIPGFAELAAPLYALTKPSTPFTWQTEHQLAFEALKKALLSAPALGLPDTSKPFTLFLDERQGIAKGVLTQKLGPWKRPVAYLSKKLDPVAAGWPPCLRIMAATAMLVKDSAKLTLGQPLTVITPHTLEAIVRQPPDRWITNARLTHYQALLLDTDRVQFGPPVTLNPATLLPVPENQPSPHDCRQVLAETHGTREDLKDQELPDADHTWYTDGSSYLDSGTRRAGAAVVDGHNTIWAQSLPPGTSAQKAELIALTKALELSKGKKANIYTDSRYAFATAHTHGSIYERRGWLTSEGKEIKNKAEIIALLKALFLPQEVAIIHCPGHQKGQDPVAVGNRQADRVARQAAMAEVLTLATEPDNTSHITAGKRTADGSEFEKRTADGSEFESPKKKAKVE

SEQ ID NO: 1589 - protein, 2102 aa, synthetic construct
MPAAKRVKLDGGDKKYSIGLDIGTNSVGWAVITDEYKVPSKKFKVLGNTDRHSIKKNLIGALLFDSGETAEATRLKRTARRRYTRRKNRICYLQEIFSNEMAKVDDSFFHRLEESFLVEEDKKHERHPIFGNIVDEVAYHEKYPTIYHLRKKLVDSTDKADLRLIYLALAHMIKFRGHFLIEGDLNPDNSDVDKLFIQLVQTYNQLFEENPINASGVDAKAILSARLSKSRRLENLIAQLPGEKKNGLFGNLIALSLGLTPNFKSNFDLAEDAKLQLSKDTYDDDLDNLLAQIGDQYADLFLAAKNLSDAILLSDILRVNTEITKAPLSASMIKRYDEHHQDLTLLKALVRQQLPEKYKEIFFDQSKNGYAGYIDGGASQEEFYKFIKPILEKMDGTEELLVKLNREDLLRKQRTFDNGSIPHQIHLGELHAILRRQEDFYPFLKDNREKIEKILTFRIPYYVGPLARGNSRFAWMTRKSEETITPWNFEEVVDKGASAQSFIERMTNFDKNLPNEKVLPKHSLLYEYFTVYNELTKVKYVTEGMRKPAFLSGEQKKAIVDLLFKTNRKVTVKQLKEDYFKKIECFDSVEISGVEDRFNASLGTYHDLLKIIKDKDFLDNEENEDILEDIVLTLTLFEDREMIEERLKTYAHLFDDKVMKQLKRRRYTGWGRLSRKLINGIRDKQSGKTILDFLKSDGFANRNFMQLIHDDSLTFKEDIQKAQVSGQGDSLHEHIANLAGSPAIKKGILQTVKVVDELVKVMGRHKPENIVIEMARENQTTQKGQKNSRERMKRIEEGIKELGSQILKEHPVENTQLQNEKLYLYYLQNGRDMYVDQELDINRLSDYDVDHIVPQSFLKDDSIDNKVLTRSDKARGKSDNVPSEEVVKKMKNYWRQLLNAKLITQRKFDNLTKAERGGLSELDKAGFIKRQLVETRQITKHVAQILDSRMNTKYDENDKLIREVKVITLKSKLVSDFRKDFQFYKVREINNYHHAHDAYLNAVVGTALIKKYPKLESEFVYGDYKVYDVRKMIAKSEQEIGKATAKYFFYSNIMNFFKTEITLANGEIRKRPLIETNGETGEIVWDKGRDFATVRKVLSMPQVNIVKKTEVQTGGFSKESILPKRNSDKLIARKKDWDPKKYGGFDSPTVAYSVLVVAKVEKGKSKKLKSVKELLGITIMERSSFEKNPIDFLEAKGYKEVKKDLIIKLPKYSLFELENGRKRMLASAGELQKGNELALPSKYVNFLYLASHYEKLKGSPEDNEQKQLFVEQHKHYLDEIIEQISEFSKRVILADANLDKVLSAYNKHRDKPIREQAENIIHLFTLTNLGAPAAFKYFDTTIDRKRYTSTKEVLDATLIHQSITGLYETRIDLSQLGGDGGGGGEAAAKPAPGGTVSLQDEHRLFDIPVTTSLPDVWLQDFPQAWAETGGLGRAKCQAPIIIDLKPTAVPVSIKQYPMSLEAHMGIRQHIIKFLELGVLRPCRSPWNTPLLPVKKPGTQDYRPVQDLREINKRTVDIHPTVPNPYNLLSTLKPDYSWYTVLDLKDAFFCLPLAPQSQELFAFEWKDPERGISGQLTWTRLPQGFKNSPTLFNEALHRDLTDFRTQHPEVTLLQYVDDLLLAAPTKKACTQGTRHLLQELGEKGYRASAKKAQICQTKVTYLGYILSEGKRWLTPGRIETVARIPPPRNPREVREFLGTAGFCRLWIPGFAELAAPLYALTKPSTPFTWQTEHQLAFEALKKALLSAPALGLPDTSKPFTLFLDERQGIAKGVLTQKLGPWKRPVAYLSKKLDPVAAGWPPCLRIMAATAMLVKDSAKLTLGQPLTVITPHTLEAIVRQPPDRWITNARLTHYQALLLDTDRVQFGPPVTLNPATLLPVPENQPSPHDCRQVLAETHGTREDLKDQELPDADHTWYTDGSSYLDSGTRRAGAAVVDGHNTIWAQSLPPGTSAQKAELIALTKALELSKGKKANIYTDSRYAFATAHTHGSIYERRGWLTSEGKEIKNKAEIIALLKALFLPQEVAIIHCPGHQKGQDPVAVGNRQADRVARQAAMAEVLTLATEPDNTSHITAGKRTADGSEFEKRTADGSEFESPKKKAKVE

SEQ ID NO: 1590 - protein, 2097 aa, synthetic construct
MPAAKRVKLDGGDKKYSIGLDIGTNSVGWAVITDEYKVPSKKFKVLGNTDRHSIKKNLIGALLFDSGETAEATRLKRTARRRYTRRKNRICYLQEIFSNEMAKVDDSFFHRLEESFLVEEDKKHERHPIFGNIVDEVAYHEKYPTIYHLRKKLVDSTDKADLRLIYLALAHMIKFRGHFLIEGDLNPDNSDVDKLFIQLVQTYNQLFEENPINASGVDAKAILSARLSKSRRLENLIAQLPGEKKNGLFGNLIALSLGLTPNFKSNFDLAEDAKLQLSKDTYDDDLDNLLAQIGDQYADLFLAAKNLSDAILLSDILRVNTEITKAPLSASMIKRYDEHHQDLTLLKALVRQQLPEKYKEIFFDQSKNGYAGYIDGGASQEEFYKFIKPILEKMDGTEELLVKLNREDLLRKQRTFDNGSIPHQIHLGELHAILRRQEDFYPFLKDNREKIEKILTFRIPYYVGPLARGNSRFAWMTRKSEETITPWNFEEVVDKGASAQSFIERMTNFDKNLPNEKVLPKHSLLYEYFTVYNELTKVKYVTEGMRKPAFLSGEQKKAIVDLLFKTNRKVTVKQLKEDYFKKIECFDSVEISGVEDRFNASLGTYHDLLKIIKDKDFLDNEENEDILEDIVLTLTLFEDREMIEERLKTYAHLFDDKVMKQLKRRRYTGWGRLSRKLINGIRDKQSGKTILDFLKSDGFANRNFMQLIHDDSLTFKEDIQKAQVSGQGDSLHEHIANLAGSPAIKKGILQTVKVVDELVKVMGRHKPENIVIEMARENQTTQKGQKNSRERMKRIEEGIKELGSQILKEHPVENTQLQNEKLYLYYLQNGRDMYVDQELDINRLSDYDVDHIVPQSFLKDDSIDNKVLTRSDKARGKSDNVPSEEVVKKMKNYWRQLLNAKLITQRKFDNLTKAERGGLSELDKAGFIKRQLVETRQITKHVAQILDSRMNTKYDENDKLIREVKVITLKSKLVSDFRKDFQFYKVREINNYHHAHDAYLNAVVGTALIKKYPKLESEFVYGDYKVYDVRKMIAKSEQEIGKATAKYFFYSNIMNFFKTEITLANGEIRKRPLIETNGETGEIVWDKGRDFATVRKVLSMPQVNIVKKTEVQTGGFSKESILPKRNSDKLIARKKDWDPKKYGGFDSPTVAYSVLVVAKVEKGKSKKLKSVKELLGITIMERSSFEKNPIDFLEAKGYKEVKKDLIIKLPKYSLFELENGRKRMLASAGELQKGNELALPSKYVNFLYLASHYEKLKGSPEDNEQKQLFVEQHKHYLDEIIEQISEFSKRVILADANLDKVLSAYNKHRDKPIREQAENIIHLFTLTNLGAPAAFKYFDTTIDRKRYTSTKEVLDATLIHQSITGLYETRIDLSQLGGDGGPAPGGGGGTVSLQDEHRLFDIPVTTSLPDVWLQDFPQAWAETGGLGRAKCQAPIIIDLKPTAVPVSIKQYPMSLEAHMGIRQHIIKFLELGVLRPCRSPWNTPLLPVKKPGTQDYRPVQDLREINKRTVDIHPTVPNPYNLLSTLKPDYSWYTVLDLKDAFFCLPLAPQSQELFAFEWKDPERGISGQLTWTRLPQGFKNSPTLFNEALHRDLTDFRTQHPEVTLLQYVDDLLLAAPTKKACTQGTRHLLQELGEKGYRASAKKAQICQTKVTYLGYILSEGKRWLTPGRIETVARIPPPRNPREVREFLGTAGFCRLWIPGFAELAAPLYALTKPSTPFTWQTEHQLAFEALKKALLSAPALGLPDTSKPFTLFLDERQGIAKGVLTQKLGPWKRPVAYLSKKLDPVAAGWPPCLRIMAATAMLVKDSAKLTLGQPLTVITPHTLEAIVRQPPDRWITNARLTHYQALLLDTDRVQFGPPVTLNPATLLPVPENQPSPHDCRQVLAETHGTREDLKDQELPDADHTWYTDGSSYLDSGTRRAGAAVVDGHNTIWAQSLPPGTSAQKAELIALTKALELSKGKKANIYTDSRYAFATAHTHGSIYERRGWLTSEGKEIKNKAEIIALLKALFLPQEVAIIHCPGHQKGQDPVAVGNRQADRVARQAAMAEVLTLATEPDNTSHITAGKRTADGSEFEKRTADGSEFESPKKKAKVE

SEQ ID NO: 1591 - protein, 2100 aa, synthetic construct
MPAAKRVKLDGGDKKYSIGLDIGTNSVGWAVITDEYKVPSKKFKVLGNTDRHSIKKNLIGALLFDSGETAEATRLKRTARRRYTRRKNRICYLQEIFSNEMAKVDDSFFHRLEESFLVEEDKKHERHPIFGNIVDEVAYHEKYPTIYHLRKKLVDSTDKADLRLIYLALAHMIKFRGHFLIEGDLNPDNSDVDKLFIQLVQTYNQLFEENPINASGVDAKAILSARLSKSRRLENLIAQLPGEKKNGLFGNLIALSLGLTPNFKSNFDLAEDAKLQLSKDTYDDDLDNLLAQIGDQYADLFLAAKNLSDAILLSDILRVNTEITKAPLSASMIKRYDEHHQDLTLLKALVRQQLPEKYKEIFFDQSKNGYAGYIDGGASQEEFYKFIKPILEKMDGTEELLVKLNREDLLRKQRTFDNGSIPHQIHLGELHAILRRQEDFYPFLKDNREKIEKILTFRIPYYVGPLARGNSRFAWMTRKSEETITPWNFEEVVDKGASAQSFIERMTNFDKNLPNEKVLPKHSLLYEYFTVYNELTKVKYVTEGMRKPAFLSGEQKKAIVDLLFKTNRKVTVKQLKEDYFKKIECFDSVEISGVEDRFNASLGTYHDLLKIIKDKDFLDNEENEDILEDIVLTLTLFEDREMIEERLKTYAHLFDDKVMKQLKRRRYTGWGRLSRKLINGIRDKQSGKTILDFLKSDGFANRNFMQLIHDDSLTFKEDIQKAQVSGQGDSLHEHIANLAGSPAIKKGILQTVKVVDELVKVMGRHKPENIVIEMARENQTTQKGQKNSRERMKRIEEGIKELGSQILKEHPVENTQLQNEKLYLYYLQNGRDMYVDQELDINRLSDYDVDHIVPQSFLKDDSIDNKVLTRSDKARGKSDNVPSEEVVKKMKNYWRQLLNAKLITQRKFDNLTKAERGGLSELDKAGFIKRQLVETRQITKHVAQILDSRMNTKYDENDKLIREVKVITLKSKLVSDFRKDFQFYKVREINNYHHAHDAYLNAVVGTALIKKYPKLESEFVYGDYKVYDVRKMIAKSEQEIGKATAKYFFYSNIMNFFKTEITLANGEIRKRPLIETNGETGEIVWDKGRDFATVRKVLSMPQVNIVKKTEVQTGGFSKESILPKRNSDKLIARKKDWDPKKYGGFDSPTVAYSVLVVAKVEKGKSKKLKSVKELLGITIMERSSFEKNPIDFLEAKGYKEVKKDLIIKLPKYSLFELENGRKRMLASAGELQKGNELALPSKYVNFLYLASHYEKLKGSPEDNEQKQLFVEQHKHYLDEIIEQISEFSKRVILADANLDKVLSAYNKHRDKPIREQAENIIHLFTLTNLGAPAAFKYFDTTIDRKRYTSTKEVLDATLIHQSITGLYETRIDLSQLGGDGGGGSPAPGSSGGTVSLQDEHRLFDIPVTTSLPDVWLQDFPQAWAETGGLGRAKCQAPIIIDLKPTAVPVSIKQYPMSLEAHMGIRQHIIKFLELGVLRPCRSPWNTPLLPVKKPGTQDYRPVQDLREINKRTVDIHPTVPNPYNLLSTLKPDYSWYTVLDLKDAFFCLPLAPQSQELFAFEWKDPERGISGQLTWTRLPQGFKNSPTLFNEALHRDLTDFRTQHPEVTLLQYVDDLLLAAPTKKACTQGTRHLLQELGEKGYRASAKKAQICQTKVTYLGYILSEGKRWLTPGRIETVARIPPPRNPREVREFLGTAGFCRLWIPGFAELAAPLYALTKPSTPFTWQTEHQLAFEALKKALLSAPALGLPDTSKPFTLFLDERQGIAKGVLTQKLGPWKRPVAYLSKKLDPVAAGWPPCLRIMAATAMLVKDSAKLTLGQPLTVITPHTLEAIVRQPPDRWITNARLTHYQALLLDTDRVQFGPPVTLNPATLLPVPENQPSPHDCRQVLAETHGTREDLKDQELPDADHTWYTDGSSYLDSGTRRAGAAVVDGHNTIWAQSLPPGTSAQKAELIALTKALELSKGKKANIYTDSRYAFATAHTHGSIYERRGWLTSEGKEIKNKAEIIALLKALFLPQEVAIIHCPGHQKGQDPVAVGNRQADRVARQAAMAEVLTLATEPDNTSHITAGKRTADGSEFEKRTADGSEFESPKKKAKVE

SEQ ID NO: 1592 - protein, 2097 aa, synthetic construct
MPAAKRVKLDGGDKKYSIGLDIGTNSVGWAVITDEYKVPSKKFKVLGNTDRHSIKKNLIGALLFDSGETAEATRLKRTARRRYTRRKNRICYLQEIFSNEMAKVDDSFFHRLEESFLVEEDKKHERHPIFGNIVDEVAYHEKYPTIYHLRKKLVDSTDKADLRLIYLALAHMIKFRGHFLIEGDLNPDNSDVDKLFIQLVQTYNQLFEENPINASGVDAKAILSARLSKSRRLENLIAQLPGEKKNGLFGNLIALSLGLTPNFKSNFDLAEDAKLQLSKDTYDDDLDNLLAQIGDQYADLFLAAKNLSDAILLSDILRVNTEITKAPLSASMIKRYDEHHQDLTLLKALVRQQLPEKYKEIFFDQSKNGYAGYIDGGASQEEFYKFIKPILEKMDGTEELLVKLNREDLLRKQRTFDNGSIPHQIHLGELHAILRRQEDFYPFLKDNREKIEKILTFRIPYYVGPLARGNSRFAWMTRKSEETITPWNFEEVVDKGASAQSFIERMTNFDKNLPNEKVLPKHSLLYEYFTVYNELTKVKYVTEGMRKPAFLSGEQKKAIVDLLFKTNRKVTVKQLKEDYFKKIECFDSVEISGVEDRFNASLGTYHDLLKIIKDKDFLDNEENEDILEDIVLTLTLFEDREMIEERLKTYAHLFDDKVMKQLKRRRYTGWGRLSRKLINGIRDKQSGKTILDFLKSDGFANRNFMQLIHDDSLTFKEDIQKAQVSGQGDSLHEHIANLAGSPAIKKGILQTVKVVDELVKVMGRHKPENIVIEMARENQTTQKGQKNSRERMKRIEEGIKELGSQILKEHPVENTQLQNEKLYLYYLQNGRDMYVDQELDINRLSDYDVDHIVPQSFLKDDSIDNKVLTRSDKARGKSDNVPSEEVVKKMKNYWRQLLNAKLITQRKFDNLTKAERGGLSELDKAGFIKRQLVETRQITKHVAQILDSRMNTKYDENDKLIREVKVITLKSKLVSDFRKDFQFYKVREINNYHHAHDAYLNAVVGTALIKKYPKLESEFVYGDYKVYDVRKMIAKSEQEIGKATAKYFFYSNIMNFFKTEITLANGEIRKRPLIETNGETGEIVWDKGRDFATVRKVLSMPQVNIVKKTEVQTGGFSKESILPKRNSDKLIARKKDWDPKKYGGFDSPTVAYSVLVVAKVEKGKSKKLKSVKELLGITIMERSSFEKNPIDFLEAKGYKEVKKDLIIKLPKYSLFELENGRKRMLASAGELQKGNELALPSKYVNFLYLASHYEKLKGSPEDNEQKQLFVEQHKHYLDEIIEQISEFSKRVILADANLDKVLSAYNKHRDKPIREQAENIIHLFTLTNLGAPAAFKYFDTTIDRKRYTSTKEVLDATLIHQSITGLYETRIDLSQLGGDGGGSSPAPGGTVSLQDEHRLFDIPVTTSLPDVWLQDFPQAWAETGGLGRAKCQAPIIIDLKPTAVPVSIKQYPMSLEAHMGIRQHIIKFLELGVLRPCRSPWNTPLLPVKKPGTQDYRPVQDLREINKRTVDIHPTVPNPYNLLSTLKPDYSWYTVLDLKDAFFCLPLAPQSQELFAFEWKDPERGISGQLTWTRLPQGFKNSPTLFNEALHRDLTDFRTQHPEVTLLQYVDDLLLAAPTKKACTQGTRHLLQELGEKGYRASAKKAQICQTKVTYLGYILSEGKRWLTPGRIETVARIPPPRNPREVREFLGTAGFCRLWIPGFAELAAPLYALTKPSTPFTWQTEHQLAFEALKKALLSAPALGLPDTSKPFTLFLDERQGIAKGVLTQKLGPWKRPVAYLSKKLDPVAAGWPPCLRIMAATAMLVKDSAKLTLGQPLTVITPHTLEAIVRQPPDRWITNARLTHYQALLLDTDRVQFGPPVTLNPATLLPVPENQPSPHDCRQVLAETHGTREDLKDQELPDADHTWYTDGSSYLDSGTRRAGAAVVDGHNTIWAQSLPPGTSAQKAELIALTKALELSKGKKANIYTDSRYAFATAHTHGSIYERRGWLTSEGKEIKNKAEIIALLKALFLPQEVAIIHCPGHQKGQDPVAVGNRQADRVARQAAMAEVLTLATEPDNTSHITAGKRTADGSEFEKRTADGSEFESPKKKAKVE

SEQ ID NO: 1593 - protein, 2102 aa, synthetic construct
MPAAKRVKLDGGDKKYSIGLDIGTNSVGWAVITDEYKVPSKKFKVLGNTDRHSIKKNLIGALLFDSGETAEATRLKRTARRRYTRRKNRICYLQEIFSNEMAKVDDSFFHRLEESFLVEEDKKHERHPIFGNIVDEVAYHEKYPTIYHLRKKLVDSTDKADLRLIYLALAHMIKFRGHFLIEGDLNPDNSDVDKLFIQLVQTYNQLFEENPINASGVDAKAILSARLSKSRRLENLIAQLPGEKKNGLFGNLIALSLGLTPNFKSNFDLAEDAKLQLSKDTYDDDLDNLLAQIGDQYADLFLAAKNLSDAILLSDILRVNTEITKAPLSASMIKRYDEHHQDLTLLKALVRQQLPEKYKEIFFDQSKNGYAGYIDGGASQEEFYKFIKPILEKMDGTEELLVKLNREDLLRKQRTFDNGSIPHQIHLGELHAILRRQEDFYPFLKDNREKIEKILTFRIPYYVGPLARGNSRFAWMTRKSEETITPWNFEEVVDKGASAQSFIERMTNFDKNLPNEKVLPKHSLLYEYFTVYNELTKVKYVTEGMRKPAFLSGEQKKAIVDLLFKTNRKVTVKQLKEDYFKKIECFDSVEISGVEDRFNASLGTYHDLLKIIKDKDFLDNEENEDILEDIVLTLTLFEDREMIEERLKTYAHLFDDKVMKQLKRRRYTGWGRLSRKLINGIRDKQSGKTILDFLKSDGFANRNFMQLIHDDSLTFKEDIQKAQVSGQGDSLHEHIANLAGSPAIKKGILQTVKVVDELVKVMGRHKPENIVIEMARENQTTQKGQKNSRERMKRIEEGIKELGSQILKEHPVENTQLQNEKLYLYYLQNGRDMYVDQELDINRLSDYDVDHIVPQSFLKDDSIDNKVLTRSDKARGKSDNVPSEEVVKKMKNYWRQLLNAKLITQRKFDNLTKAERGGLSELDKAGFIKRQLVETRQITKHVAQILDSRMNTKYDENDKLIREVKVITLKSKLVSDFRKDFQFYKVREINNYHHAHDAYLNAVVGTALIKKYPKLESEFVYGDYKVYDVRKMIAKSEQEIGKATAKYFFYSNIMNFFKTEITLANGEIRKRPLIETNGETGEIVWDKGRDFATVRKVLSMPQVNIVKKTEVQTGGFSKESILPKRNSDKLIARKKDWDPKKYGGFDSPTVAYSVLVVAKVEKGKSKKLKSVKELLGITIMERSSFEKNPIDFLEAKGYKEVKKDLIIKLPKYSLFELENGRKRMLASAGELQKGNELALPSKYVNFLYLASHYEKLKGSPEDNEQKQLFVEQHKHYLDEIIEQISEFSKRVILADANLDKVLSAYNKHRDKPIREQAENIIHLFTLTNLGAPAAFKYFDTTIDRKRYTSTKEVLDATLIHQSITGLYETRIDLSQLGGDGGEAAAKGGGGSSGGTVSLQDEHRLFDIPVTTSLPDVWLQDFPQAWAETGGLGRAKCQAPIIIDLKPTAVPVSIKQYPMSLEAHMGIRQHIIKFLELGVLRPCRSPWNTPLLPVKKPGTQDYRPVQDLREINKRTVDIHPTVPNPYNLLSTLKPDYSWYTVLDLKDAFFCLPLAPQSQELFAFEWKDPERGISGQLTWTRLPQGFKNSPTLFNEALHRDLTDFRTQHPEVTLLQYVDDLLLAAPTKKACTQGTRHLLQELGEKGYRASAKKAQICQTKVTYLGYILSEGKRWLTPGRIETVARIPPPRNPREVREFLGTAGFCRLWIPGFAELAAPLYALTKPSTPFTWQTEHQLAFEALKKALLSAPALGLPDTSKPFTLFLDERQGIAKGVLTQKLGPWKRPVAYLSKKLDPVAAGWPPCLRIMAATAMLVKDSAKLTLGQPLTVITPHTLEAIVRQPPDRWITNARLTHYQALLLDTDRVQFGPPVTLNPATLLPVPENQPSPHDCRQVLAETHGTREDLKDQELPDADHTWYTDGSSYLDSGTRRAGAAVVDGHNTIWAQSLPPGTSAQKAELIALTKALELSKGKKANIYTDSRYAFATAHTHGSIYERRGWLTSEGKEIKNKAEIIALLKALFLPQEVAIIHCPGHQKGQDPVAVGNRQADRVARQAAMAEVLTLATEPDNTSHITAGKRTADGSEFEKRTADGSEFESPKKKAKVE

SEQ ID NO: 1594 - protein, 2103 aa, synthetic construct
MPAAKRVKLDGGDKKYSIGLDIGTNSVGWAVITDEYKVPSKKFKVLGNTDRHSIKKNLIGALLFDSGETAEATRLKRTARRRYTRRKNRICYLQEIFSNEMAKVDDSFFHRLEESFLVEEDKKHERHPIFGNIVDEVAYHEKYPTIYHLRKKLVDSTDKADLRLIYLALAHMIKFRGHFLIEGDLNPDNSDVDKLFIQLVQTYNQLFEENPINASGVDAKAILSARLSKSRRLENLIAQLPGEKKNGLFGNLIALSLGLTPNFKSNFDLAEDAKLQLSKDTYDDDLDNLLAQIGDQYADLFLAAKNLSDAILLSDILRVNTEITKAPLSASMIKRYDEHHQDLTLLKALVRQQLPEKYKEIFFDQSKNGYAGYIDGGASQEEFYKFIKPILEKMDGTEELLVKLNREDLLRKQRTFDNGSIPHQIHLGELHAILRRQEDFYPFLKDNREKIEKILTFRIPYYVGPLARGNSRFAWMTRKSEETITPWNFEEVVDKGASAQSFIERMTNFDKNLPNEKVLPKHSLLYEYFTVYNELTKVKYVTEGMRKPAFLSGEQKKAIVDLLFKTNRKVTVKQLKEDYFKKIECFDSVEISGVEDRFNASLGTYHDLLKIIKDKDFLDNEENEDILEDIVLTLTLFEDREMIEERLKTYAHLFDDKVMKQLKRRRYTGWGRLSRKLINGIRDKQSGKTILDFLKSDGFANRNFMQLIHDDSLTFKEDIQKAQVSGQGDSLHEHIANLAGSPAIKKGILQTVKVVDELVKVMGRHKPENIVIEMARENQTTQKGQKNSRERMKRIEEGIKELGSQILKEHPVENTQLQNEKLYLYYLQNGRDMYVDQELDINRLSDYDVDHIVPQSFLKDDSIDNKVLTRSDKARGKSDNVPSEEVVKKMKNYWRQLLNAKLITQRKFDNLTKAERGGLSELDKAGFIKRQLVETRQITKHVAQILDSRMNTKYDENDKLIREVKVITLKSKLVSDFRKDFQFYKVREINNYHHAHDAYLNAVVGTALIKKYPKLESEFVYGDYKVYDVRKMIAKSEQEIGKATAKYFFYSNIMNFFKTEITLANGEIRKRPLIETNGETGEIVWDKGRDFATVRKVLSMPQVNIVKKTEVQTGGFSKESILPKRNSDKLIARKKDWDPKKYGGFDSPTVAYSVLVVAKVEKGKSKKLKSVKELLGITIMERSSFEKNPIDFLEAKGYKEVKKDLIIKLPKYSLFELENGRKRMLASAGELQKGNELALPSKYVNFLYLASHYEKLKGSPEDNEQKQLFVEQHKHYLDEIIEQISEFSKRVILADANLDKVLSAYNKHRDKPIREQAENIIHLFTLTNLGAPAAFKYFDTTIDRKRYTSTKEVLDATLIHQSITGLYETRIDLSQLGGDGGGSAGSAAGSGEFGGTVSLQDEHRLFDIPVTTSLPDVWLQDFPQAWAETGGLGRAKCQAPIIIDLKPTAVPVSIKQYPMSLEAHMGIRQHIIKFLELGVLRPCRSPWNTPLLPVKKPGTQDYRPVQDLREINKRTVDIHPTVPNPYNLLSTLKPDYSWYTVLDLKDAFFCLPLAPQSQELFAFEWKDPERGISGQLTWTRLPQGFKNSPTLFNEALHRDLTDFRTQHPEVTLLQYVDDLLLAAPTKKACTQGTRHLLQELGEKGYRASAKKAQICQTKVTYLGYILSEGKRWLTPGRIETVARIPPPRNPREVREFLGTAGFCRLWIPGFAELAAPLYALTKPSTPFTWQTEHQLAFEALKKALLSAPALGLPDTSKPFTLFLDERQGIAKGVLTQKLGPWKRPVAYLSKKLDPVAAGWPPCLRIMAATAMLVKDSAKLTLGQPLTVITPHTLEAIVRQPPDRWITNARLTHYQALLLDTDRVQFGPPVTLNPATLLPVPENQPSPHDCRQVLAETHGTREDLKDQELPDADHTWYTDGSSYLDSGTRRAGAAVVDGHNTIWAQSLPPGTSAQKAELIALTKALELSKGKKANIYTDSRYAFATAHTHGSIYERRGWLTSEGKEIKNKAEIIALLKALFLPQEVAIIHCPGHQKGQDPVAVGNRQADRVARQAAMAEVLTLATEPDNTSHITAGKRTADGSEFEKRTADGSEFESPKKKAKVE

SEQ ID NO: 1595 - protein, 2100 aa, synthetic construct
MPAAKRVKLDGGDKKYSIGLDIGTNSVGWAVITDEYKVPSKKFKVLGNTDRHSIKKNLIGALLFDSGETAEATRLKRTARRRYTRRKNRICYLQEIFSNEMAKVDDSFFHRLEESFLVEEDKKHERHPIFGNIVDEVAYHEKYPTIYHLRKKLVDSTDKADLRLIYLALAHMIKFRGHFLIEGDLNPDNSDVDKLFIQLVQTYNQLFEENPINASGVDAKAILSARLSKSRRLENLIAQLPGEKKNGLFGNLIALSLGLTPNFKSNFDLAEDAKLQLSKDTYDDDLDNLLAQIGDQYADLFLAAKNLSDAILLSDILRVNTEITKAPLSASMIKRYDEHHQDLTLLKALVRQQLPEKYKEIFFDQSKNGYAGYIDGGASQEEFYKFIKPILEKMDGTEELLVKLNREDLLRKQRTFDNGSIPHQIHLGELHAILRRQEDFYPFLKDNREKIEKILTFRIPYYVGPLARGNSRFAWMTRKSEETITPWNFEEVVDKGASAQSFIERMTNFDKNLPNEKVLPKHSLLYEYFTVYNELTKVKYVTEGMRKPAFLSGEQKKAIVDLLFKTNRKVTVKQLKEDYFKKIECFDSVEISGVEDRFNASLGTYHDLLKIIKDKDFLDNEENEDILEDIVLTLTLFEDREMIEERLKTYAHLFDDKVMKQLKRRRYTGWGRLSRKLINGIRDKQSGKTILDFLKSDGFANRNFMQLIHDDSLTFKEDIQKAQVSGQGDSLHEHIANLAGSPAIKKGILQTVKVVDELVKVMGRHKPENIVIEMARENQTTQKGQKNSRERMKRIEEGIKELGSQILKEHPVENTQLQNEKLYLYYLQNGRDMYVDQELDINRLSDYDVDHIVPQSFLKDDSIDNKVLTRSDKARGKSDNVPSEEVVKKMKNYWRQLLNAKLITQRKFDNLTKAERGGLSELDKAGFIKRQLVETRQITKHVAQILDSRMNTKYDENDKLIREVKVITLKSKLVSDFRKDFQFYKVREINNYHHAHDAYLNAVVGTALIKKYPKLESEFVYGDYKVYDVRKMIAKSEQEIGKATAKYFFYSNIMNFFKTEITLANGEIRKRPLIETNGETGEIVWDKGRDFATVRKVLSMPQVNIVKKTEVQTGGFSKESILPKRNSDKLIARKKDWDPKKYGGFDSPTVAYSVLVVAKVEKGKSKKLKSVKELLGITIMERSSFEKNPIDFLEAKGYKEVKKDLIIKLPKYSLFELENGRKRMLASAGELQKGNELALPSKYVNFLYLASHYEKLKGSPEDNEQKQLFVEQHKHYLDEIIEQISEFSKRVILADANLDKVLSAYNKHRDKPIREQAENIIHLFTLTNLGAPAAFKYFDTTIDRKRYTSTKEVLDATLIHQSITGLYETRIDLSQLGGDGGGGGPAPGGSGGTVSLQDEHRLFDIPVTTSLPDVWLQDFPQAWAETGGLGRAKCQAPIIIDLKPTAVPVSIKQYPMSLEAHMGIRQHIIKFLELGVLRPCRSPWNTPLLPVKKPGTQDYRPVQDLREINKRTVDIHPTVPNPYNLLSTLKPDYSWYTVLDLKDAFFCLPLAPQSQELFAFEWKDPERGISGQLTWTRLPQGFKNSPTLFNEALHRDLTDFRTQHPEVTLLQYVDDLLLAAPTKKACTQGTRHLLQELGEKGYRASAKKAQICQTKVTYLGYILSEGKRWLTPGRIETVARIPPPRNPREVREFLGTAGFCRLWIPGFAELAAPLYALTKPSTPFTWQTEHQLAFEALKKALLSAPALGLPDTSKPFTLFLDERQGIAKGVLTQKLGPWKRPVAYLSKKLDPVAAGWPPCLRIMAATAMLVKDSAKLTLGQPLTVITPHTLEAIVRQPPDRWITNARLTHYQALLLDTDRVQFGPPVTLNPATLLPVPENQPSPHDCRQVLAETHGTREDLKDQELPDADHTWYTDGSSYLDSGTRRAGAAVVDGHNTIWAQSLPPGTSAQKAELIALTKALELSKGKKANIYTDSRYAFATAHTHGSIYERRGWLTSEGKEIKNKAEIIALLKALFLPQEVAIIHCPGHQKGQDPVAVGNRQADRVARQAAMAEVLTLATEPDNTSHITAGKRTADGSEFEKRTADGSEFESPKKKAKVE

SEQ ID NO: 1596 - protein, 2102 aa, synthetic construct
MPAAKRVKLDGGDKKYSIGLDIGTNSVGWAVITDEYKVPSKKFKVLGNTDRHSIKKNLIGALLFDSGETAEATRLKRTARRRYTRRKNRICYLQEIFSNEMAKVDDSFFHRLEESFLVEEDKKHERHPIFGNIVDEVAYHEKYPTIYHLRKKLVDSTDKADLRLIYLALAHMIKFRGHFLIEGDLNPDNSDVDKLFIQLVQTYNQLFEENPINASGVDAKAILSARLSKSRRLENLIAQLPGEKKNGLFGNLIALSLGLTPNFKSNFDLAEDAKLQLSKDTYDDDLDNLLAQIGDQYADLFLAAKNLSDAILLSDILRVNTEITKAPLSASMIKRYDEHHQDLTLLKALVRQQLPEKYKEIFFDQSKNGYAGYIDGGASQEEFYKFIKPILEKMDGTEELLVKLNREDLLRKQRTFDNGSIPHQIHLGELHAILRRQEDFYPFLKDNREKIEKILTFRIPYYVGPLARGNSRFAWMTRKSEETITPWNFEEVVDKGASAQSFIERMTNFDKNLPNEKVLPKHSLLYEYFTVYNELTKVKYVTEGMRKPAFLSGEQKKAIVDLLFKTNRKVTVKQLKEDYFKKIECFDSVEISGVEDRFNASLGTYHDLLKIIKDKDFLDNEENEDILEDIVLTLTLFEDREMIEERLKTYAHLFDDKVMKQLKRRRYTGWGRLSRKLINGIRDKQSGKTILDFLKSDGFANRNFMQLIHDDSLTFKEDIQKAQVSGQGDSLHEHIANLAGSPAIKKGILQTVKVVDELVKVMGRHKPENIVIEMARENQTTQKGQKNSRERMKRIEEGIKELGSQILKEHPVENTQLQNEKLYLYYLQNGRDMYVDQELDINRLSDYDVDHIVPQSFLKDDSIDNKVLTRSDKARGKSDNVPSEEVVKKMKNYWRQLLNAKLITQRKFDNLTKAERGGLSELDKAGFIKRQLVETRQITKHVAQILDSRMNTKYDENDKLIREVKVITLKSKLVSDFRKDFQFYKVREINNYHHAHDAYLNAVVGTALIKKYPKLESEFVYGDYKVYDVRKMIAKSEQEIGKATAKYFFYSNIMNFFKTEITLANGEIRKRPLIETNGETGEIVWDKGRDFATVRKVLSMPQVNIVKKTEVQTGGFSKESILPKRNSDKLIARKKDWDPKKYGGFDSPTVAYSVLVVAKVEKGKSKKLKSVKELLGITIMERSSFEKNPIDFLEAKGYKEVKKDLIIKLPKYSLFELENGRKRMLASAGELQKGNELALPSKYVNFLYLASHYEKLKGSPEDNEQKQLFVEQHKHYLDEIIEQISEFSKRVILADANLDKVLSAYNKHRDKPIREQAENIIHLFTLTNLGAPAAFKYFDTTIDRKRYTSTKEVLDATLIHQSITGLYETRIDLSQLGGDGGGSSPAPEAAAKGGTVSLQDEHRLFDIPVTTSLPDVWLQDFPQAWAETGGLGRAKCQAPIIIDLKPTAVPVSIKQYPMSLEAHMGIRQHIIKFLELGVLRPCRSPWNTPLLPVKKPGTQDYRPVQDLREINKRTVDIHPTVPNPYNLLSTLKPDYSWYTVLDLKDAFFCLPLAPQSQELFAFEWKDPERGISGQLTWTRLPQGFKNSPTLFNEALHRDLTDFRTQHPEVTLLQYVDDLLLAAPTKKACTQGTRHLLQELGEKGYRASAKKAQICQTKVTYLGYILSEGKRWLTPGRIETVARIPPPRNPREVREFLGTAGFCRLWIPGFAELAAPLYALTKPSTPFTWQTEHQLAFEALKKALLSAPALGLPDTSKPFTLFLDERQGIAKGVLTQKLGPWKRPVAYLSKKLDPVAAGWPPCLRIMAATAMLVKDSAKLTLGQPLTVITPHTLEAIVRQPPDRWITNARLTHYQALLLDTDRVQFGPPVTLNPATLLPVPENQPSPHDCRQVLAETHGTREDLKDQELPDADHTWYTDGSSYLDSGTRRAGAAVVDGHNTIWAQSLPPGTSAQKAELIALTKALELSKGKKANIYTDSRYAFATAHTHGSIYERRGWLTSEGKEIKNKAEIIALLKALFLPQEVAIIHCPGHQKGQDPVAVGNRQADRVARQAAMAEVLTLATEPDNTSHITAGKRTADGSEFEKRTADGSEFESPKKKAKVE

SEQ ID NO: 1597 - protein, 2101 aa, synthetic construct
MPAAKRVKLDGGDKKYSIGLDIGTNSVGWAVITDEYKVPSKKFKVLGNTDRHSIKKNLIGALLFDSGETAEATRLKRTARRRYTRRKNRICYLQEIFSNEMAKVDDSFFHRLEESFLVEEDKKHERHPIFGNIVDEVAYHEKYPTIYHLRKKLVDSTDKADLRLIYLALAHMIKFRGHFLIEGDLNPDNSDVDKLFIQLVQTYNQLFEENPINASGVDAKAILSARLSKSRRLENLIAQLPGEKKNGLFGNLIALSLGLTPNFKSNFDLAEDAKLQLSKDTYDDDLDNLLAQIGDQYADLFLAAKNLSDAILLSDILRVNTEITKAPLSASMIKRYDEHHQDLTLLKALVRQQLPEKYKEIFFDQSKNGYAGYIDGGASQEEFYKFIKPILEKMDGTEELLVKLNREDLLRKQRTFDNGSIPHQIHLGELHAILRRQEDFYPFLKDNREKIEKILTFRIPYYVGPLARGNSRFAWMTRKSEETITPWNFEEVVDKGASAQSFIERMTNFDKNLPNEKVLPKHSLLYEYFTVYNELTKVKYVTEGMRKPAFLSGEQKKAIVDLLFKTNRKVTVKQLKEDYFKKIECFDSVEISGVEDRFNASLGTYHDLLKIIKDKDFLDNEENEDILEDIVLTLTLFEDREMIEERLKTYAHLFDDKVMKQLKRRRYTGWGRLSRKLINGIRDKQSGKTILDFLKSDGFANRNFMQLIHDDSLTFKEDIQKAQVSGQGDSLHEHIANLAGSPAIKKGILQTVKVVDELVKVMGRHKPENIVIEMARENQTTQKGQKNSRERMKRIEEGIKELGSQILKEHPVENTQLQNEKLYLYYLQNGRDMYVDQELDINRLSDYDVDHIVPQSFLKDDSIDNKVLTRSDKARGKSDNVPSEEVVKKMKNYWRQLLNAKLITQRKFDNLTKAERGGLSELDKAGFIKRQLVETRQITKHVAQILDSRMNTKYDENDKLIREVKVITLKSKLVSDFRKDFQFYKVREINNYHHAHDAYLNAVVGTALIKKYPKLESEFVYGDYKVYDVRKMIAKSEQEIGKATAKYFFYSNIMNFFKTEITLANGEIRKRPLIETNGETGEIVWDKGRDFATVRKVLSMPQVNIVKKTEVQTGGFSKESILPKRNSDKLIARKKDWDPKKYGGFDSPTVAYSVLVVAKVEKGKSKKLKSVKELLGITIMERSSFEKNPIDFLEAKGYKEVKKDLIIKLPKYSLFELENGRKRMLASAGELQKGNELALPSKYVNFLYLASHYEKLKGSPEDNEQKQLFVEQHKHYLDEIIEQISEFSKRVILADANLDKVLSAYNKHRDKPIREQAENIIHLFTLTNLGAPAAFKYFDTTIDRKRYTSTKEVLDATLIHQSITGLYETRIDLSQLGGDGGGGGGSGGGGSGGTVSLQDEHRLFDIPVTTSLPDVWLQDFPQAWAETGGLGRAKCQAPIIIDLKPTAVPVSIKQYPMSLEAHMGIRQHIIKFLELGVLRPCRSPWNTPLLPVKKPGTQDYRPVQDLREINKRTVDIHPTVPNPYNLLSTLKPDYSWYTVLDLKDAFFCLPLAPQSQELFAFEWKDPERGISGQLTWTRLPQGFKNSPTLFNEALHRDLTDFRTQHPEVTLLQYVDDLLLAAPTKKACTQGTRHLLQELGEKGYRASAKKAQICQTKVTYLGYILSEGKRWLTPGRIETVARIPPPRNPREVREFLGTAGFCRLWIPGFAELAAPLYALTKPSTPFTWQTEHQLAFEALKKALLSAPALGLPDTSKPFTLFLDERQGIAKGVLTQKLGPWKRPVAYLSKKLDPVAAGWPPCLRIMAATAMLVKDSAKLTLGQPLTVITPHTLEAIVRQPPDRWITNARLTHYQALLLDTDRVQFGPPVTLNPATLLPVPENQPSPHDCRQVLAETHGTREDLKDQELPDADHTWYTDGSSYLDSGTRRAGAAVVDGHNTIWAQSLPPGTSAQKAELIALTKALELSKGKKANIYTDSRYAFATAHTHGSIYERRGWLTSEGKEIKNKAEIIALLKALFLPQEVAIIHCPGHQKGQDPVAVGNRQADRVARQAAMAEVLTLATEPDNTSHITAGKRTADGSEFEKRTADGSEFESPKKKAKVE

SEQ ID NO: 1598 - protein, 2102 aa, synthetic construct
MPAAKRVKLDGGDKKYSIGLDIGTNSVGWAVITDEYKVPSKKFKVLGNTDRHSIKKNLIGALLFDSGETAEATRLKRTARRRYTRRKNRICYLQEIFSNEMAKVDDSFFHRLEESFLVEEDKKHERHPIFGNIVDEVAYHEKYPTIYHLRKKLVDSTDKADLRLIYLALAHMIKFRGHFLIEGDLNPDNSDVDKLFIQLVQTYNQLFEENPINASGVDAKAILSARLSKSRRLENLIAQLPGEKKNGLFGNLIALSLGLTPNFKSNFDLAEDAKLQLSKDTYDDDLDNLLAQIGDQYADLFLAAKNLSDAILLSDILRVNTEITKAPLSASMIKRYDEHHQDLTLLKALVRQQLPEKYKEIFFDQSKNGYAGYIDGGASQEEFYKFIKPILEKMDGTEELLVKLNREDLLRKQRTFDNGSIPHQIHLGELHAILRRQEDFYPFLKDNREKIEKILTFRIPYYVGPLARGNSRFAWMTRKSEETITPWNFEEVVDKGASAQSFIERMTNFDKNLPNEKVLPKHSLLYEYFTVYNELTKVKYVTEGMRKPAFLSGEQKKAIVDLLFKTNRKVTVKQLKEDYFKKIECFDSVEISGVEDRFNASLGTYHDLLKIIKDKDFLDNEENEDILEDIVLTLTLFEDREMIEERLKTYAHLFDDKVMKQLKRRRYTGWGRLSRKLINGIRDKQSGKTILDFLKSDGFANRNFMQLIHDDSLTFKEDIQKAQVSGQGDSLHEHIANLAGSPAIKKGILQTVKVVDELVKVMGRHKPENIVIEMARENQTTQKGQKNSRERMKRIEEGIKELGSQILKEHPVENTQLQNEKLYLYYLQNGRDMYVDQELDINRLSDYDVDHIVPQSFLKDDSIDNKVLTRSDKARGKSDNVPSEEVVKKMKNYWRQLLNAKLITQRKFDNLTKAERGGLSELDKAGFIKRQLVETRQITKHVAQILDSRMNTKYDENDKLIREVKVITLKSKLVSDFRKDFQFYKVREINNYHHAHDAYLNAVVGTALIKKYPKLESEFVYGDYKVYDVRKMIAKSEQEIGKATAKYFFYSNIMNFFKTEITLANGEIRKRPLIETNGETGEIVWDKGRDFATVRKVLSMPQVNIVKKTEVQTGGFSKESILPKRNSDKLIARKKDWDPKKYGGFDSPTVAYSVLVVAKVEKGKSKKLKSVKELLGITIMERSSFEKNPIDFLEAKGYKEVKKDLIIKLPKYSLFELENGRKRMLASAGELQKGNELALPSKYVNFLYLASHYEKLKGSPEDNEQKQLFVEQHKHYLDEIIEQISEFSKRVILADANLDKVLSAYNKHRDKPIREQAENIIHLFTLTNLGAPAAFKYFDTTIDRKRYTSTKEVLDATLIHQSITGLYETRIDLSQLGGDGGGGSPAPEAAAKGGTVSLQDEHRLFDIPVTTSLPDVWLQDFPQAWAETGGLGRAKCQAPIIIDLKPTAVPVSIKQYPMSLEAHMGIRQHIIKFLELGVLRPCRSPWNTPLLPVKKPGTQDYRPVQDLREINKRTVDIHPTVPNPYNLLSTLKPDYSWYTVLDLKDAFFCLPLAPQSQELFAFEWKDPERGISGQLTWTRLPQGFKNSPTLFNEALHRDLTDFRTQHPEVTLLQYVDDLLLAAPTKKACTQGTRHLLQELGEKGYRASAKKAQICQTKVTYLGYILSEGKRWLTPGRIETVARIPPPRNPREVREFLGTAGFCRLWIPGFAELAAPLYALTKPSTPFTWQTEHQLAFEALKKALLSAPALGLPDTSKPFTLFLDERQGIAKGVLTQKLGPWKRPVAYLSKKLDPVAAGWPPCLRIMAATAMLVKDSAKLTLGQPLTVITPHTLEAIVRQPPDRWITNARLTHYQALLLDTDRVQFGPPVTLNPATLLPVPENQPSPHDCRQVLAETHGTREDLKDQELPDADHTWYTDGSSYLDSGTRRAGAAVVDGHNTIWAQSLPPGTSAQKAELIALTKALELSKGKKANIYTDSRYAFATAHTHGSIYERRGWLTSEGKEIKNKAEIIALLKALFLPQEVAIIHCPGHQKGQDPVAVGNRQADRVARQAAMAEVLTLATEPDNTSHITAGKRTADGSEFEKRTADGSEFESPKKKAKVE

SEQ ID NO: 1599 - protein, 2100 aa, synthetic construct
MPAAKRVKLDGGDKKYSIGLDIGTNSVGWAVITDEYKVPSKKFKVLGNTDRHSIKKNLIGALLFDSGETAEATRLKRTARRRYTRRKNRICYLQEIFSNEMAKVDDSFFHRLEESFLVEEDKKHERHPIFGNIVDEVAYHEKYPTIYHLRKKLVDSTDKADLRLIYLALAHMIKFRGHFLIEGDLNPDNSDVDKLFIQLVQTYNQLFEENPINASGVDAKAILSARLSKSRRLENLIAQLPGEKKNGLFGNLIALSLGLTPNFKSNFDLAEDAKLQLSKDTYDDDLDNLLAQIGDQYADLFLAAKNLSDAILLSDILRVNTEITKAPLSASMIKRYDEHHQDLTLLKALVRQQLPEKYKEIFFDQSKNGYAGYIDGGASQEEFYKFIKPILEKMDGTEELLVKLNREDLLRKQRTFDNGSIPHQIHLGELHAILRRQEDFYPFLKDNREKIEKILTFRIPYYVGPLARGNSRFAWMTRKSEETITPWNFEEVVDKGASAQSFIERMTNFDKNLPNEKVLPKHSLLYEYFTVYNELTKVKYVTEGMRKPAFLSGEQKKAIVDLLFKTNRKVTVKQLKEDYFKKIECFDSVEISGVEDRFNASLGTYHDLLKIIKDKDFLDNEENEDILEDIVLTLTLFEDREMIEERLKTYAHLFDDKVMKQLKRRRYTGWGRLSRKLINGIRDKQSGKTILDFLKSDGFANRNFMQLIHDDSLTFKEDIQKAQVSGQGDSLHEHIANLAGSPAIKKGILQTVKVVDELVKVMGRHKPENIVIEMARENQTTQKGQKNSRERMKRIEEGIKELGSQILKEHPVENTQLQNEKLYLYYLQNGRDMYVDQELDINRLSDYDVDHIVPQSFLKDDSIDNKVLTRSDKARGKSDNVPSEEVVKKMKNYWRQLLNAKLITQRKFDNLTKAERGGLSELDKAGFIKRQLVETRQITKHVAQILDSRMNTKYDENDKLIREVKVITLKSKLVSDFRKDFQFYKVREINNYHHAHDAYLNAVVGTALIKKYPKLESEFVYGDYKVYDVRKMIAKSEQEIGKATAKYFFYSNIMNFFKTEITLANGEIRKRPLIETNGETGEIVWDKGRDFATVRKVLSMPQVNIVKKTEVQTGGFSKESILPKRNSDKLIARKKDWDPKKYGGFDSPTVAYSVLVVAKVEKGKSKKLKSVKELLGITIMERSSFEKNPIDFLEAKGYKEVKKDLIIKLPKYSLFELENGRKRMLASAGELQKGNELALPSKYVNFLYLASHYEKLKGSPEDNEQKQLFVEQHKHYLDEIIEQISEFSKRVILADANLDKVLSAYNKHRDKPIREQAENIIHLFTLTNLGAPAAFKYFDTTIDRKRYTSTKEVLDATLIHQSITGLYETRIDLSQLGGDGGPAPGGSGSSGGTVSLQDEHRLFDIPVTTSLPDVWLQDFPQAWAETGGLGRAKCQAPIIIDLKPTAVPVSIKQYPMSLEAHMGIRQHIIKFLELGVLRPCRSPWNTPLLPVKKPGTQDYRPVQDLREINKRTVDIHPTVPNPYNLLSTLKPDYSWYTVLDLKDAFFCLPLAPQSQELFAFEWKDPERGISGQLTWTRLPQGFKNSPTLFNEALHRDLTDFRTQHPEVTLLQYVDDLLLAAPTKKACTQGTRHLLQELGEKGYRASAKKAQICQTKVTYLGYILSEGKRWLTPGRIETVARIPPPRNPREVREFLGTAGFCRLWIPGFAELAAPLYALTKPSTPFTWQTEHQLAFEALKKALLSAPALGLPDTSKPFTLFLDERQGIAKGVLTQKLGPWKRPVAYLSKKLDPVAAGWPPCLRIMAATAMLVKDSAKLTLGQPLTVITPHTLEAIVRQPPDRWITNARLTHYQALLLDTDRVQFGPPVTLNPATLLPVPENQPSPHDCRQVLAETHGTREDLKDQELPDADHTWYTDGSSYLDSGTRRAGAAVVDGHNTIWAQSLPPGTSAQKAELIALTKALELSKGKKANIYTDSRYAFATAHTHGSIYERRGWLTSEGKEIKNKAEIIALLKALFLPQEVAIIHCPGHQKGQDPVAVGNRQADRVARQAAMAEVLTLATEPDNTSHITAGKRTADGSEFEKRTADGSEFESPKKKAKVE

SEQ ID NO: 1600 - protein, 2006 aa, synthetic construct
MPAAKRVKLDGGDKKYSIGLDIGTNSVGWAVITDEYKVPSKKFKVLGNTDRHSIKKNLIGALLFDSGETAEATRLKRTARRRYTRRKNRICYLQEIFSNEMAKVDDSFFHRLEESFLVEEDKKHERHPIFGNIVDEVAYHEKYPTIYHLRKKLVDSTDKADLRLIYLALAHMIKFRGHFLIEGDLNPDNSDVDKLFIQLVQTYNQLFEENPINASGVDAKAILSARLSKSRRLENLIAQLPGEKKNGLFGNLIALSLGLTPNFKSNFDLAEDAKLQLSKDTYDDDLDNLLAQIGDQYADLFLAAKNLSDAILLSDILRVNTEITKAPLSASMIKRYDEHHQDLTLLKALVRQQLPEKYKEIFFDQSKNGYAGYIDGGASQEEFYKFIKPILEKMDGTEELLVKLNREDLLRKQRTFDNGSIPHQIHLGELHAILRRQEDFYPFLKDNREKIEKILTFRIPYYVGPLARGNSRFAWMTRKSEETITPWNFEEVVDKGASAQSFIERMTNFDKNLPNEKVLPKHSLLYEYFTVYNELTKVKYVTEGMRKPAFLSGEQKKAIVDLLFKTNRKVTVKQLKEDYFKKIECFDSVEISGVEDRFNASLGTYHDLLKIIKDKDFLDNEENEDILEDIVLTLTLFEDREMIEERLKTYAHLFDDKVMKQLKRRRYTGWGRLSRKLINGIRDKQSGKTILDFLKSDGFANRNFMQLIHDDSLTFKEDIQKAQVSGQGDSLHEHIANLAGSPAIKKGILQTVKVVDELVKVMGRHKPENIVIEMARENQTTQKGQKNSRERMKRIEEGIKELGSQILKEHPVENTQLQNEKLYLYYLQNGRDMYVDQELDINRLSDYDVDHIVPQSFLKDDSIDNKVLTRSDKARGKSDNVPSEEVVKKMKNYWRQLLNAKLITQRKFDNLTKAERGGLSELDKAGFIKRQLVETRQITKHVAQILDSRMNTKYDENDKLIREVKVITLKSKLVSDFRKDFQFYKVREINNYHHAHDAYLNAVVGTALIKKYPKLESEFVYGDYKVYDVRKMIAKSEQEIGKATAKYFFYSNIMNFFKTEITLANGEIRKRPLIETNGETGEIVWDKGRDFATVRKVLSMPQVNIVKKTEVQTGGFSKESILPKRNSDKLIARKKDWDPKKYGGFDSPTVAYSVLVVAKVEKGKSKKLKSVKELLGITIMERSSFEKNPIDFLEAKGYKEVKKDLIIKLPKYSLFELENGRKRMLASAGELQKGNELALPSKYVNFLYLASHYEKLKGSPEDNEQKQLFVEQHKHYLDEIIEQISEFSKRVILADANLDKVLSAYNKHRDKPIREQAENIIHLFTLTNLGAPAAFKYFDTTIDRKRYTSTKEVLDATLIHQSITGLYETRIDLSQLGGDGGEAAAKGGGPAPGGPLGTSDSPVTHADPIDWKSEEPVWVDQWPLTQEKLSAAQQLVQEQLRLGHIEPSTSAWNSPIFVIKKKSGKWRLLQDLRKVNETMMHMGALQPGLPTPSPIPDKSYIIVIDLKDCFYTIPLAPQDCKRFAFSLPSVNFKEPMQRYQWRVLPQGMTNSPTLCQKFVATAIAPVRQRFPQLYLVHYMDDILLAHTDEHLLYQAFSILKQHLSLNGLVIADEKIQTHFPYNYLGFSLYPRVYNTQLVKLQTDHLKTLNDFQKLLGDINWIRPYLKLPTYTLQPLFDILKGDSDPASPRTLSLEGRTALQSIEEAIRQQQITYCDYQRSWGLYILPTPRAPTGVLYQDKPLRWIYLSATPTKHLLPYYELVAKIIAKGRHEAIQYFGMEPPFICVPYALEQQDWLFQFSDNWSIAFANYPGQITHHYPSDKLLQFASSHAFIFPKIVRRQPIPEATLIFTDGSSNGTAALIINHQTYYAQTSFSSAQVVELFAVHQALLTVPTSFNLFTDSSYVVGALQMIETVPIIGTTSPEVLNLFTLIQQVLHCRQHPCFFGHIRAHSTLPGALVQGNHTADVLTKQVFFQSAGKRTADGSEFEKRTADGSEFESPKKKAKVE

SEQ ID NO: 1601 - protein, 2006 aa, synthetic construct
MPAAKRVKLDGGDKKYSIGLDIGTNSVGWAVITDEYKVPSKKFKVLGNTDRHSIKKNLIGALLFDSGETAEATRLKRTARRRYTRRKNRICYLQEIFSNEMAKVDDSFFHRLEESFLVEEDKKHERHPIFGNIVDEVAYHEKYPTIYHLRKKLVDSTDKADLRLIYLALAHMIKFRGHFLIEGDLNPDNSDVDKLFIQLVQTYNQLFEENPINASGVDAKAILSARLSKSRRLENLIAQLPGEKKNGLFGNLIALSLGLTPNFKSNFDLAEDAKLQLSKDTYDDDLDNLLAQIGDQYADLFLAAKNLSDAILLSDILRVNTEITKAPLSASMIKRYDEHHQDLTLLKALVRQQLPEKYKEIFFDQSKNGYAGYIDGGASQEEFYKFIKPILEKMDGTEELLVKLNREDLLRKQRTFDNGSIPHQIHLGELHAILRRQEDFYPFLKDNREKIEKILTFRIPYYVGPLARGNSRFAWMTRKSEETITPWNFEEVVDKGASAQSFIERMTNFDKNLPNEKVLPKHSLLYEYFTVYNELTKVKYVTEGMRKPAFLSGEQKKAIVDLLFKTNRKVTVKQLKEDYFKKIECFDSVEISGVEDRFNASLGTYHDLLKIIKDKDFLDNEENEDILEDIVLTLTLFEDREMIEERLKTYAHLFDDKVMKQLKRRRYTGWGRLSRKLINGIRDKQSGKTILDFLKSDGFANRNFMQLIHDDSLTFKEDIQKAQVSGQGDSLHEHIANLAGSPAIKKGILQTVKVVDELVKVMGRHKPENIVIEMARENQTTQKGQKNSRERMKRIEEGIKELGSQILKEHPVENTQLQNEKLYLYYLQNGRDMYVDQELDINRLSDYDVDHIVPQSFLKDDSIDNKVLTRSDKARGKSDNVPSEEVVKKMKNYWRQLLNAKLITQRKFDNLTKAERGGLSELDKAGFIKRQLVETRQITKHVAQILDSRMNTKYDENDKLIREVKVITLKSKLVSDFRKDFQFYKVREINNYHHAHDAYLNAVVGTALIKKYPKLESEFVYGDYKVYDVRKMIAKSEQEIGKATAKYFFYSNIMNFFKTEITLANGEIRKRPLIETNGETGEIVWDKGRDFATVRKVLSMPQVNIVKKTEVQTGGFSKESILPKRNSDKLIARKKDWDPKKYGGFDSPTVAYSVLVVAKVEKGKSKKLKSVKELLGITIMERSSFEKNPIDFLEAKGYKEVKKDLIIKLPKYSLFELENGRKRMLASAGELQKGNELALPSKYVNFLYLASHYEKLKGSPEDNEQKQLFVEQHKHYLDEIIEQISEFSKRVILADANLDKVLSAYNKHRDKPIREQAENIIHLFTLTNLGAPAAFKYFDTTIDRKRYTSTKEVLDATLIHQSITGLYETRIDLSQLGGDGGGGSEAAAKGSSGGPLGTSDSPVTHADPIDWKSEEPVWVDQWPLTQEKLSAAQQLVQEQLRLGHIEPSTSAWNSPIFVIKKKSGKWRLLQDLRKVNETMMHMGALQPGLPTPSPIPDKSYIIVIDLKDCFYTIPLAPQDCKRFAFSLPSVNFKEPMQRYQWRVLPQGMTNSPTLCQKFVATAIAPVRQRFPQLYLVHYMDDILLAHTDEHLLYQAFSILKQHLSLNGLVIADEKIQTHFPYNYLGFSLYPRVYNTQLVKLQTDHLKTLNDFQKLLGDINWIRPYLKLPTYTLQPLFDILKGDSDPASPRTLSLEGRTALQSIEEAIRQQQITYCDYQRSWGLYILPTPRAPTGVLYQDKPLRWIYLSATPTKHLLPYYELVAKIIAKGRHEAIQYFGMEPPFICVPYALEQQDWLFQFSDNWSIAFANYPGQITHHYPSDKLLQFASSHAFIFPKIVRRQPIPEATLIFTDGSSNGTAALIINHQTYYAQTSFSSAQVVELFAVHQALLTVPTSFNLFTDSSYVVGALQMIETVPIIGTTSPEVLNLFTLIQQVLHCRQHPCFFGHIRAHSTLPGALVQGNHTADVLTKQVFFQSAGKRTADGSEFEKRTADGSEFESPKKKAKVE

SEQ ID NO: 1602 - protein, 2013 aa, synthetic construct
MPAAKRVKLDGGDKKYSIGLDIGTNSVGWAVITDEYKVPSKKFKVLGNTDRHSIKKNLIGALLFDSGETAEATRLKRTARRRYTRRKNRICYLQEIFSNEMAKVDDSFFHRLEESFLVEEDKKHERHPIFGNIVDEVAYHEKYPTIYHLRKKLVDSTDKADLRLIYLALAHMIKFRGHFLIEGDLNPDNSDVDKLFIQLVQTYNQLFEENPINASGVDAKAILSARLSKSRRLENLIAQLPGEKKNGLFGNLIALSLGLTPNFKSNFDLAEDAKLQLSKDTYDDDLDNLLAQIGDQYADLFLAAKNLSDAILLSDILRVNTEITKAPLSASMIKRYDEHHQDLTLLKALVRQQLPEKYKEIFFDQSKNGYAGYIDGGASQEEFYKFIKPILEKMDGTEELLVKLNREDLLRKQRTFDNGSIPHQIHLGELHAILRRQEDFYPFLKDNREKIEKILTFRIPYYVGPLARGNSRFAWMTRKSEETITPWNFEEVVDKGASAQSFIERMTNFDKNLPNEKVLPKHSLLYEYFTVYNELTKVKYVTEGMRKPAFLSGEQKKAIVDLLFKTNRKVTVKQLKEDYFKKIECFDSVEISGVEDRFNASLGTYHDLLKIIKDKDFLDNEENEDILEDIVLTLTLFEDREMIEERLKTYAHLFDDKVMKQLKRRRYTGWGRLSRKLINGIRDKQSGKTILDFLKSDGFANRNFMQLIHDDSLTFKEDIQKAQVSGQGDSLHEHIANLAGSPAIKKGILQTVKVVDELVKVMGRHKPENIVIEMARENQTTQKGQKNSRERMKRIEEGIKELGSQILKEHPVENTQLQNEKLYLYYLQNGRDMYVDQELDINRLSDYDVDHIVPQSFLKDDSIDNKVLTRSDKARGKSDNVPSEEVVKKMKNYWRQLLNAKLITQRKFDNLTKAERGGLSELDKAGFIKRQLVETRQITKHVAQILDSRMNTKYDENDKLIREVKVITLKSKLVSDFRKDFQFYKVREINNYHHAHDAYLNAVVGTALIKKYPKLESEFVYGDYKVYDVRKMIAKSEQEIGKATAKYFFYSNIMNFFKTEITLANGEIRKRPLIETNGETGEIVWDKGRDFATVRKVLSMPQVNIVKKTEVQTGGFSKESILPKRNSDKLIARKKDWDPKKYGGFDSPTVAYSVLVVAKVEKGKSKKLKSVKELLGITIMERSSFEKNPIDFLEAKGYKEVKKDLIIKLPKYSLFELENGRKRMLASAGELQKGNELALPSKYVNFLYLASHYEKLKGSPEDNEQKQLFVEQHKHYLDEIIEQISEFSKRVILADANLDKVLSAYNKHRDKPIREQAENIIHLFTLTNLGAPAAFKYFDTTIDRKRYTSTKEVLDATLIHQSITGLYETRIDLSQLGGDGGGSSGSSGSSGSSGSSGSSGGPLGTSDSPVTHADPIDWKSEEPVWVDQWPLTQEKLSAAQQLVQEQLRLGHIEPSTSAWNSPIFVIKKKSGKWRLLQDLRKVNETMMHMGALQPGLPTPSPIPDKSYIIVIDLKDCFYTIPLAPQDCKRFAFSLPSVNFKEPMQRYQWRVLPQGMTNSPTLCQKFVATAIAPVRQRFPQLYLVHYMDDILLAHTDEHLLYQAFSILKQHLSLNGLVIADEKIQTHFPYNYLGFSLYPRVYNTQLVKLQTDHLKTLNDFQKLLGDINWIRPYLKLPTYTLQPLFDILKGDSDPASPRTLSLEGRTALQSIEEAIRQQQITYCDYQRSWGLYILPTPRAPTGVLYQDKPLRWIYLSATPTKHLLPYYELVAKIIAKGRHEAIQYFGMEPPFICVPYALEQQDWLFQFSDNWSIAFANYPGQITHHYPSDKLLQFASSHAFIFPKIVRRQPIPEATLIFTDGSSNGTAALIINHQTYYAQTSFSSAQVVELFAVHQALLTVPTSFNLFTDSSYVVGALQMIETVPIIGTTSPEVLNLFTLIQQVLHCRQHPCFFGHIRAHSTLPGALVQGNHTADVLTKQVFFQSAGKRTADGSEFEKRTADGSEFESPKKKAKVE

SEQ ID NO: 1603 - protein, 2001 aa, synthetic construct
MPAAKRVKLDGGDKKYSIGLDIGTNSVGWAVITDEYKVPSKKFKVLGNTDRHSIKKNLIGALLFDSGETAEATRLKRTARRRYTRRKNRICYLQEIFSNEMAKVDDSFFHRLEESFLVEEDKKHERHPIFGNIVDEVAYHEKYPTIYHLRKKLVDSTDKADLRLIYLALAHMIKFRGHFLIEGDLNPDNSDVDKLFIQLVQTYNQLFEENPINASGVDAKAILSARLSKSRRLENLIAQLPGEKKNGLFGNLIALSLGLTPNFKSNFDLAEDAKLQLSKDTYDDDLDNLLAQIGDQYADLFLAAKNLSDAILLSDILRVNTEITKAPLSASMIKRYDEHHQDLTLLKALVRQQLPEKYKEIFFDQSKNGYAGYIDGGASQEEFYKFIKPILEKMDGTEELLVKLNREDLLRKQRTFDNGSIPHQIHLGELHAILRRQEDFYPFLKDNREKIEKILTFRIPYYVGPLARGNSRFAWMTRKSEETITPWNFEEVVDKGASAQSFIERMTNFDKNLPNEKVLPKHSLLYEYFTVYNELTKVKYVTEGMRKPAFLSGEQKKAIVDLLFKTNRKVTVKQLKEDYFKKIECFDSVEISGVEDRFNASLGTYHDLLKIIKDKDFLDNEENEDILEDIVLTLTLFEDREMIEERLKTYAHLFDDKVMKQLKRRRYTGWGRLSRKLINGIRDKQSGKTILDFLKSDGFANRNFMQLIHDDSLTFKEDIQKAQVSGQGDSLHEHIANLAGSPAIKKGILQTVKVVDELVKVMGRHKPENIVIEMARENQTTQKGQKNSRERMKRIEEGIKELGSQILKEHPVENTQLQNEKLYLYYLQNGRDMYVDQELDINRLSDYDVDHIVPQSFLKDDSIDNKVLTRSDKARGKSDNVPSEEVVKKMKNYWRQLLNAKLITQRKFDNLTKAERGGLSELDKAGFIKRQLVETRQITKHVAQILDSRMNTKYDENDKLIREVKVITLKSKLVSDFRKDFQFYKVREINNYHHAHDAYLNAVVGTALIKKYPKLESEFVYGDYKVYDVRKMIAKSEQEIGKATAKYFFYSNIMNFFKTEITLANGEIRKRPLIETNGETGEIVWDKGRDFATVRKVLSMPQVNIVKKTEVQTGGFSKESILPKRNSDKLIARKKDWDPKKYGGFDSPTVAYSVLVVAKVEKGKSKKLKSVKELLGITIMERSSFEKNPIDFLEAKGYKEVKKDLIIKLPKYSLFELENGRKRMLASAGELQKGNELALPSKYVNFLYLASHYEKLKGSPEDNEQKQLFVEQHKHYLDEIIEQISEFSKRVILADANLDKVLSAYNKHRDKPIREQAENIIHLFTLTNLGAPAAFKYFDTTIDRKRYTSTKEVLDATLIHQSITGLYETRIDLSQLGGDGGGSSGSSGGPLGTSDSPVTHADPIDWKSEEPVWVDQWPLTQEKLSAAQQLVQEQLRLGHIEPSTSAWNSPIFVIKKKSGKWRLLQDLRKVNETMMHMGALQPGLPTPSPIPDKSYIIVIDLKDCFYTIPLAPQDCKRFAFSLPSVNFKEPMQRYQWRVLPQGMTNSPTLCQKFVATAIAPVRQRFPQLYLVHYMDDILLAHTDEHLLYQAFSILKQHLSLNGLVIADEKIQTHFPYNYLGFSLYPRVYNTQLVKLQTDHLKTLNDFQKLLGDINWIRPYLKLPTYTLQPLFDILKGDSDPASPRTLSLEGRTALQSIEEAIRQQQITYCDYQRSWGLYILPTPRAPTGVLYQDKPLRWIYLSATPTKHLLPYYELVAKIIAKGRHEAIQYFGMEPPFICVPYALEQQDWLFQFSDNWSIAFANYPGQITHHYPSDKLLQFASSHAFIFPKIVRRQPIPEATLIFTDGSSNGTAALIINHQTYYAQTSFSSAQVVELFAVHQALLTVPTSFNLFTDSSYVVGALQMIETVPIIGTTSPEVLNLFTLIQQVLHCRQHPCFFGHIRAHSTLPGALVQGNHTADVLTKQVFFQSAGKRTADGSEFEKRTADGSEFESPKKKAKVE

SEQ ID NO: 1604 - protein, 2216 aa, synthetic construct
MPAAKRVKLDGGDKKYSIGLDIGTNSVGWAVITDEYKVPSKKFKVLGNTDRHSIKKNLIGALLFDSGETAEATRLKRTARRRYTRRKNRICYLQEIFSNEMAKVDDSFFHRLEESFLVEEDKKHERHPIFGNIVDEVAYHEKYPTIYHLRKKLVDSTDKADLRLIYLALAHMIKFRGHFLIEGDLNPDNSDVDKLFIQLVQTYNQLFEENPINASGVDAKAILSARLSKSRRLENLIAQLPGEKKNGLFGNLIALSLGLTPNFKSNFDLAEDAKLQLSKDTYDDDLDNLLAQIGDQYADLFLAAKNLSDAILLSDILRVNTEITKAPLSASMIKRYDEHHQDLTLLKALVRQQLPEKYKEIFFDQSKNGYAGYIDGGASQEEFYKFIKPILEKMDGTEELLVKLNREDLLRKQRTFDNGSIPHQIHLGELHAILRRQEDFYPFLKDNREKIEKILTFRIPYYVGPLARGNSRFAWMTRKSEETITPWNFEEVVDKGASAQSFIERMTNFDKNLPNEKVLPKHSLLYEYFTVYNELTKVKYVTEGMRKPAFLSGEQKKAIVDLLFKTNRKVTVKQLKEDYFKKIECFDSVEISGVEDRFNASLGTYHDLLKIIKDKDFLDNEENEDILEDIVLTLTLFEDREMIEERLKTYAHLFDDKVMKQLKRRRYTGWGRLSRKLINGIRDKQSGKTILDFLKSDGFANRNFMQLIHDDSLTFKEDIQKAQVSGQGDSLHEHIANLAGSPAIKKGILQTVKVVDELVKVMGRHKPENIVIEMARENQTTQKGQKNSRERMKRIEEGIKELGSQILKEHPVENTQLQNEKLYLYYLQNGRDMYVDQELDINRLSDYDVDHIVPQSFLKDDSIDNKVLTRSDKARGKSDNVPSEEVVKKMKNYWRQLLNAKLITQRKFDNLTKAERGGLSELDKAGFIKRQLVETRQITKHVAQILDSRMNTKYDENDKLIREVKVITLKSKLVSDFRKDFQFYKVREINNYHHAHDAYLNAVVGTALIKKYPKLESEFVYGDYKVYDVRKMIAKSEQEIGKATAKYFFYSNIMNFFKTEITLANGEIRKRPLIETNGETGEIVWDKGRDFATVRKVLSMPQVNIVKKTEVQTGGFSKESILPKRNSDKLIARKKDWDPKKYGGFDSPTVAYSVLVVAKVEKGKSKKLKSVKELLGITIMERSSFEKNPIDFLEAKGYKEVKKDLIIKLPKYSLFELENGRKRMLASAGELQKGNELALPSKYVNFLYLASHYEKLKGSPEDNEQKQLFVEQHKHYLDEIIEQISEFSKRVILADANLDKVLSAYNKHRDKPIREQAENIIHLFTLTNLGAPAAFKYFDTTIDRKRYTSTKEVLDATLIHQSITGLYETRIDLSQLGGDGGPAPGSSGGGGGTLGDQGSRGSDPLPEPRVTLTVEGIPTEFLVNTGAEHSVLTKPMGKMGSKRTVVAGATGSKVYPWTTKRLLKIGQKQVTHSFLVIPECPAPLLGRDLLTKLKAQIQFSTEGPQVTWEDRPAMCLVLNLEEEYRLHEKPVPPSIDPSWLQLFPMVWAEKAGMGLANQVPPVVVELKSDASPVAVRQYPMSKEAREGIRPHIQRFLDLGILVPCQSPWNTPLLPVKKPGTNDYRPVQDLREVNKRVQDIHPTVPNPYNLLSSLPPSHTWYSVLDLKDAFFCLKLHPNSQPLFAFEWRDPEKGNTGQLTWTRLPQGFKNSPTLFDEALHRDLASFRALNPQVVMLQYVDDLLVAAPTYRDCKEGTRRLLQELSKLGYRVSAKKAQLCREEVTYLGYLLKGGKRWLTPARKATVMKIPTPTTPRQVREFLGTAGFCRLWIPGFASLAAPLYPLTREKVPFTWTEAHQEAFGRIKEALLSAPALALPDLTKPFALYVDEKEGVARGVLTQTLGPWRRPVAYLSKKLDPVASGWPTCLKAIAAVALLLKDADKLTLGQNVLVIAPHNLESIVRQPPDRWMTNARMTHYQSLLLNERVSFAPPAILNPATLLPVESDDTPIHICSEILAEETGTRPDLRDQPLPGVPAWYTDGSSFIMDGRRQAGAAIVDNKRTVWASNLPEGTSAQKAELIALTQALRLAEGKSINIYTDSRYAFATAHVHGAIYKQRGLLTSAGKDIKNKEEILALLEAIHLPKRVAIIHCPGHQRGTDPVATGNRKADEAAKQAAQSTRILTETTKNAGKRTADGSEFEKRTADGSEFESPKKKAKVE

SEQ ID NO: 1605 - protein, 2218 aa, synthetic construct
MPAAKRVKLDGGDKKYSIGLDIGTNSVGWAVITDEYKVPSKKFKVLGNTDRHSIKKNLIGALLFDSGETAEATRLKRTARRRYTRRKNRICYLQEIFSNEMAKVDDSFFHRLEESFLVEEDKKHERHPIFGNIVDEVAYHEKYPTIYHLRKKLVDSTDKADLRLIYLALAHMIKFRGHFLIEGDLNPDNSDVDKLFIQLVQTYNQLFEENPINASGVDAKAILSARLSKSRRLENLIAQLPGEKKNGLFGNLIALSLGLTPNFKSNFDLAEDAKLQLSKDTYDDDLDNLLAQIGDQYADLFLAAKNLSDAILLSDILRVNTEITKAPLSASMIKRYDEHHQDLTLLKALVRQQLPEKYKEIFFDQSKNGYAGYIDGGASQEEFYKFIKPILEKMDGTEELLVKLNREDLLRKQRTFDNGSIPHQIHLGELHAILRRQEDFYPFLKDNREKIEKILTFRIPYYVGPLARGNSRFAWMTRKSEETITPWNFEEVVDKGASAQSFIERMTNFDKNLPNEKVLPKHSLLYEYFTVYNELTKVKYVTEGMRKPAFLSGEQKKAIVDLLFKTNRKVTVKQLKEDYFKKIECFDSVEISGVEDRFNASLGTYHDLLKIIKDKDFLDNEENEDILEDIVLTLTLFEDREMIEERLKTYAHLFDDKVMKQLKRRRYTGWGRLSRKLINGIRDKQSGKTILDFLKSDGFANRNFMQLIHDDSLTFKEDIQKAQVSGQGDSLHEHIANLAGSPAIKKGILQTVKVVDELVKVMGRHKPENIVIEMARENQTTQKGQKNSRERMKRIEEGIKELGSQILKEHPVENTQLQNEKLYLYYLQNGRDMYVDQELDINRLSDYDVDHIVPQSFLKDDSIDNKVLTRSDKARGKSDNVPSEEVVKKMKNYWRQLLNAKLITQRKFDNLTKAERGGLSELDKAGFIKRQLVETRQITKHVAQILDSRMNTKYDENDKLIREVKVITLKSKLVSDFRKDFQFYKVREINNYHHAHDAYLNAVVGTALIKKYPKLESEFVYGDYKVYDVRKMIAKSEQEIGKATAKYFFYSNIMNFFKTEITLANGEIRKRPLIETNGETGEIVWDKGRDFATVRKVLSMPQVNIVKKTEVQTGGFSKESILPKRNSDKLIARKKDWDPKKYGGFDSPTVAYSVLVVAKVEKGKSKKLKSVKELLGITIMERSSFEKNPIDFLEAKGYKEVKKDLIIKLPKYSLFELENGRKRMLASAGELQKGNELALPSKYVNFLYLASHYEKLKGSPEDNEQKQLFVEQHKHYLDEIIEQISEFSKRVILADANLDKVLSAYNKHRDKPIREQAENIIHLFTLTNLGAPAAFKYFDTTIDRKRYTSTKEVLDATLIHQSITGLYETRIDLSQLGGDGGPAPGGGEAAAKGGTLGDQGSRGSDPLPEPRVTLTVEGIPTEFLVNTGAEHSVLTKPMGKMGSKRTVVAGATGSKVYPWTTKRLLKIGQKQVTHSFLVIPECPAPLLGRDLLTKLKAQIQFSTEGPQVTWEDRPAMCLVLNLEEEYRLHEKPVPPSIDPSWLQLFPMVWAEKAGMGLANQVPPVVVELKSDASPVAVRQYPMSKEAREGIRPHIQRFLDLGILVPCQSPWNTPLLPVKKPGTNDYRPVQDLREVNKRVQDIHPTVPNPYNLLSSLPPSHTWYSVLDLKDAFFCLKLHPNSQPLFAFEWRDPEKGNTGQLTWTRLPQGFKNSPTLFDEALHRDLASFRALNPQVVMLQYVDDLLVAAPTYRDCKEGTRRLLQELSKLGYRVSAKKAQLCREEVTYLGYLLKGGKRWLTPARKATVMKIPTPTTPRQVREFLGTAGFCRLWIPGFASLAAPLYPLTREKVPFTWTEAHQEAFGRIKEALLSAPALALPDLTKPFALYVDEKEGVARGVLTQTLGPWRRPVAYLSKKLDPVASGWPTCLKAIAAVALLLKDADKLTLGQNVLVIAPHNLESIVRQPPDRWMTNARMTHYQSLLLNERVSFAPPAILNPATLLPVESDDTPIHICSEILAEETGTRPDLRDQPLPGVPAWYTDGSSFIMDGRRQAGAAIVDNKRTVWASNLPEGTSAQKAELIALTQALRLAEGKSINIYTDSRYAFATAHVHGAIYKQRGLLTSAGKDIKNKEEILALLEAIHLPKRVAIIHCPGHQRGTDPVATGNRKADEAAKQAAQSTRILTETTKNAGKRTADGSEFEKRTADGSEFESPKKKAKVE

SEQ ID NO: 1606 - protein, 2218 aa, synthetic construct
MPAAKRVKLDGGDKKYSIGLDIGTNSVGWAVITDEYKVPSKKFKVLGNTDRHSIKKNLIGALLFDSGETAEATRLKRTARRRYTRRKNRICYLQEIFSNEMAKVDDSFFHRLEESFLVEEDKKHERHPIFGNIVDEVAYHEKYPTIYHLRKKLVDSTDKADLRLIYLALAHMIKFRGHFLIEGDLNPDNSDVDKLFIQLVQTYNQLFEENPINASGVDAKAILSARLSKSRRLENLIAQLPGEKKNGLFGNLIALSLGLTPNFKSNFDLAEDAKLQLSKDTYDDDLDNLLAQIGDQYADLFLAAKNLSDAILLSDILRVNTEITKAPLSASMIKRYDEHHQDLTLLKALVRQQLPEKYKEIFFDQSKNGYAGYIDGGASQEEFYKFIKPILEKMDGTEELLVKLNREDLLRKQRTFDNGSIPHQIHLGELHAILRRQEDFYPFLKDNREKIEKILTFRIPYYVGPLARGNSRFAWMTRKSEETITPWNFEEVVDKGASAQSFIERMTNFDKNLPNEKVLPKHSLLYEYFTVYNELTKVKYVTEGMRKPAFLSGEQKKAIVDLLFKTNRKVTVKQLKEDYFKKIECFDSVEISGVEDRFNASLGTYHDLLKIIKDKDFLDNEENEDILEDIVLTLTLFEDREMIEERLKTYAHLFDDKVMKQLKRRRYTGWGRLSRKLINGIRDKQSGKTILDFLKSDGFANRNFMQLIHDDSLTFKEDIQKAQVSGQGDSLHEHIANLAGSPAIKKGILQTVKVVDELVKVMGRHKPENIVIEMARENQTTQKGQKNSRERMKRIEEGIKELGSQILKEHPVENTQLQNEKLYLYYLQNGRDMYVDQELDINRLSDYDVDHIVPQSFLKDDSIDNKVLTRSDKARGKSDNVPSEEVVKKMKNYWRQLLNAKLITQRKFDNLTKAERGGLSELDKAGFIKRQLVETRQITKHVAQILDSRMNTKYDENDKLIREVKVITLKSKLVSDFRKDFQFYKVREINNYHHAHDAYLNAVVGTALIKKYPKLESEFVYGDYKVYDVRKMIAKSEQEIGKATAKYFFYSNIMNFFKTEITLANGEIRKRPLIETNGETGEIVWDKGRDFATVRKVLSMPQVNIVKKTEVQTGGFSKESILPKRNSDKLIARKKDWDPKKYGGFDSPTVAYSVLVVAKVEKGKSKKLKSVKELLGITIMERSSFEKNPIDFLEAKGYKEVKKDLIIKLPKYSLFELENGRKRMLASAGELQKGNELALPSKYVNFLYLASHYEKLKGSPEDNEQKQLFVEQHKHYLDEIIEQISEFSKRVILADANLDKVLSAYNKHRDKPIREQAENIIHLFTLTNLGAPAAFKYFDTTIDRKRYTSTKEVLDATLIHQSITGLYETRIDLSQLGGDGGGGGGSSEAAAKGGTLGDQGSRGSDPLPEPRVTLTVEGIPTEFLVNTGAEHSVLTKPMGKMGSKRTVVAGATGSKVYPWTTKRLLKIGQKQVTHSFLVIPECPAPLLGRDLLTKLKAQIQFSTEGPQVTWEDRPAMCLVLNLEEEYRLHEKPVPPSIDPSWLQLFPMVWAEKAGMGLANQVPPVVVELKSDASPVAVRQYPMSKEAREGIRPHIQRFLDLGILVPCQSPWNTPLLPVKKPGTNDYRPVQDLREVNKRVQDIHPTVPNPYNLLSSLPPSHTWYSVLDLKDAFFCLKLHPNSQPLFAFEWRDPEKGNTGQLTWTRLPQGFKNSPTLFDEALHRDLASFRALNPQVVMLQYVDDLLVAAPTYRDCKEGTRRLLQELSKLGYRVSAKKAQLCREEVTYLGYLLKGGKRWLTPARKATVMKIPTPTTPRQVREFLGTAGFCRLWIPGFASLAAPLYPLTREKVPFTWTEAHQEAFGRIKEALLSAPALALPDLTKPFALYVDEKEGVARGVLTQTLGPWRRPVAYLSKKLDPVASGWPTCLKAIAAVALLLKDADKLTLGQNVLVIAPHNLESIVRQPPDRWMTNARMTHYQSLLLNERVSFAPPAILNPATLLPVESDDTPIHICSEILAEETGTRPDLRDQPLPGVPAWYTDGSSFIMDGRRQAGAAIVDNKRTVWASNLPEGTSAQKAELIALTQALRLAEGKSINIYTDSRYAFATAHVHGAIYKQRGLLTSAGKDIKNKEEILALLEAIHLPKRVAIIHCPGHQRGTDPVATGNRKADEAAKQAAQSTRILTETTKNAGKRTADGSEFEKRTADGSEFESPKKKAKVE

SEQ ID NO: 1607 - protein, 2213 aa, synthetic construct
MPAAKRVKLDGGDKKYSIGLDIGTNSVGWAVITDEYKVPSKKFKVLGNTDRHSIKKNLIGALLFDSGETAEATRLKRTARRRYTRRKNRICYLQEIFSNEMAKVDDSFFHRLEESFLVEEDKKHERHPIFGNIVDEVAYHEKYPTIYHLRKKLVDSTDKADLRLIYLALAHMIKFRGHFLIEGDLNPDNSDVDKLFIQLVQTYNQLFEENPINASGVDAKAILSARLSKSRRLENLIAQLPGEKKNGLFGNLIALSLGLTPNFKSNFDLAEDAKLQLSKDTYDDDLDNLLAQIGDQYADLFLAAKNLSDAILLSDILRVNTEITKAPLSASMIKRYDEHHQDLTLLKALVRQQLPEKYKEIFFDQSKNGYAGYIDGGASQEEFYKFIKPILEKMDGTEELLVKLNREDLLRKQRTFDNGSIPHQIHLGELHAILRRQEDFYPFLKDNREKIEKILTFRIPYYVGPLARGNSRFAWMTRKSEETITPWNFEEVVDKGASAQSFIERMTNFDKNLPNEKVLPKHSLLYEYFTVYNELTKVKYVTEGMRKPAFLSGEQKKAIVDLLFKTNRKVTVKQLKEDYFKKIECFDSVEISGVEDRFNASLGTYHDLLKIIKDKDFLDNEENEDILEDIVLTLTLFEDREMIEERLKTYAHLFDDKVMKQLKRRRYTGWGRLSRKLINGIRDKQSGKTILDFLKSDGFANRNFMQLIHDDSLTFKEDIQKAQVSGQGDSLHEHIANLAGSPAIKKGILQTVKVVDELVKVMGRHKPENIVIEMARENQTTQKGQKNSRERMKRIEEGIKELGSQILKEHPVENTQLQNEKLYLYYLQNGRDMYVDQELDINRLSDYDVDHIVPQSFLKDDSIDNKVLTRSDKARGKSDNVPSEEVVKKMKNYWRQLLNAKLITQRKFDNLTKAERGGLSELDKAGFIKRQLVETRQITKHVAQILDSRMNTKYDENDKLIREVKVITLKSKLVSDFRKDFQFYKVREINNYHHAHDAYLNAVVGTALIKKYPKLESEFVYGDYKVYDVRKMIAKSEQEIGKATAKYFFYSNIMNFFKTEITLANGEIRKRPLIETNGETGEIVWDKGRDFATVRKVLSMPQVNIVKKTEVQTGGFSKESILPKRNSDKLIARKKDWDPKKYGGFDSPTVAYSVLVVAKVEKGKSKKLKSVKELLGITIMERSSFEKNPIDFLEAKGYKEVKKDLIIKLPKYSLFELENGRKRMLASAGELQKGNELALPSKYVNFLYLASHYEKLKGSPEDNEQKQLFVEQHKHYLDEIIEQISEFSKRVILADANLDKVLSAYNKHRDKPIREQAENIIHLFTLTNLGAPAAFKYFDTTIDRKRYTSTKEVLDATLIHQSITGLYETRIDLSQLGGDGGGGSPAPGGTLGDQGSRGSDPLPEPRVTLTVEGIPTEFLVNTGAEHSVLTKPMGKMGSKRTVVAGATGSKVYPWTTKRLLKIGQKQVTHSFLVIPECPAPLLGRDLLTKLKAQIQFSTEGPQVTWEDRPAMCLVLNLEEEYRLHEKPVPPSIDPSWLQLFPMVWAEKAGMGLANQVPPVVVELKSDASPVAVRQYPMSKEAREGIRPHIQRFLDLGILVPCQSPWNTPLLPVKKPGTNDYRPVQDLREVNKRVQDIHPTVPNPYNLLSSLPPSHTWYSVLDLKDAFFCLKLHPNSQPLFAFEWRDPEKGNTGQLTWTRLPQGFKNSPTLFDEALHRDLASFRALNPQVVMLQYVDDLLVAAPTYRDCKEGTRRLLQELSKLGYRVSAKKAQLCREEVTYLGYLLKGGKRWLTPARKATVMKIPTPTTPRQVREFLGTAGFCRLWIPGFASLAAPLYPLTREKVPFTWTEAHQEAFGRIKEALLSAPALALPDLTKPFALYVDEKEGVARGVLTQTLGPWRRPVAYLSKKLDPVASGWPTCLKAIAAVALLLKDADKLTLGQNVLVIAPHNLESIVRQPPDRWMTNARMTHYQSLLLNERVSFAPPAILNPATLLPVESDDTPIHICSEILAEETGTRPDLRDQPLPGVPAWYTDGSSFIMDGRRQAGAAIVDNKRTVWASNLPEGTSAQKAELIALTQALRLAEGKSINIYTDSRYAFATAHVHGAIYKQRGLLTSAGKDIKNKEEILALLEAIHLPKRVAIIHCPGHQRGTDPVATGNRKADEAAKQAAQSTRILTETTKNAGKRTADGSEFEKRTADGSEFESPKKKAKVE

SEQ ID NO: 1608 - protein, 2216 aa, synthetic construct
MPAAKRVKLDGGDKKYSIGLDIGTNSVGWAVITDEYKVPSKKFKVLGNTDRHSIKKNLIGALLFDSGETAEATRLKRTARRRYTRRKNRICYLQEIFSNEMAKVDDSFFHRLEESFLVEEDKKHERHPIFGNIVDEVAYHEKYPTIYHLRKKLVDSTDKADLRLIYLALAHMIKFRGHFLIEGDLNPDNSDVDKLFIQLVQTYNQLFEENPINASGVDAKAILSARLSKSRRLENLIAQLPGEKKNGLFGNLIALSLGLTPNFKSNFDLAEDAKLQLSKDTYDDDLDNLLAQIGDQYADLFLAAKNLSDAILLSDILRVNTEITKAPLSASMIKRYDEHHQDLTLLKALVRQQLPEKYKEIFFDQSKNGYAGYIDGGASQEEFYKFIKPILEKMDGTEELLVKLNREDLLRKQRTFDNGSIPHQIHLGELHAILRRQEDFYPFLKDNREKIEKILTFRIPYYVGPLARGNSRFAWMTRKSEETITPWNFEEVVDKGASAQSFIERMTNFDKNLPNEKVLPKHSLLYEYFTVYNELTKVKYVTEGMRKPAFLSGEQKKAIVDLLFKTNRKVTVKQLKEDYFKKIECFDSVEISGVEDRFNASLGTYHDLLKIIKDKDFLDNEENEDILEDIVLTLTLFEDREMIEERLKTYAHLFDDKVMKQLKRRRYTGWGRLSRKLINGIRDKQSGKTILDFLKSDGFANRNFMQLIHDDSLTFKEDIQKAQVSGQGDSLHEHIANLAGSPAIKKGILQTVKVVDELVKVMGRHKPENIVIEMARENQTTQKGQKNSRERMKRIEEGIKELGSQILKEHPVENTQLQNEKLYLYYLQNGRDMYVDQELDINRLSDYDVDHIVPQSFLKDDSIDNKVLTRSDKARGKSDNVPSEEVVKKMKNYWRQLLNAKLITQRKFDNLTKAERGGLSELDKAGFIKRQLVETRQITKHVAQILDSRMNTKYDENDKLIREVKVITLKSKLVSDFRKDFQFYKVREINNYHHAHDAYLNAVVGTALIKKYPKLESEFVYGDYKVYDVRKMIAKSEQEIGKATAKYFFYSNIMNFFKTEITLANGEIRKRPLIETNGETGEIVWDKGRDFATVRKVLSMPQVNIVKKTEVQTGGFSKESILPKRNSDKLIARKKDWDPKKYGGFDSPTVAYSVLVVAKVEKGKSKKLKSVKELLGITIMERSSFEKNPIDFLEAKGYKEVKKDLIIKLPKYSLFELENGRKRMLASAGELQKGNELALPSKYVNFLYLASHYEKLKGSPEDNEQKQLFVEQHKHYLDEIIEQISEFSKRVILADANLDKVLSAYNKHRDKPIREQAENIIHLFTLTNLGAPAAFKYFDTTIDRKRYTSTKEVLDATLIHQSITGLYETRIDLSQLGGDGGGGSGGGGSSGGTLGDQGSRGSDPLPEPRVTLTVEGIPTEFLVNTGAEHSVLTKPMGKMGSKRTVVAGATGSKVYPWTTKRLLKIGQKQVTHSFLVIPECPAPLLGRDLLTKLKAQIQFSTEGPQVTWEDRPAMCLVLNLEEEYRLHEKPVPPSIDPSWLQLFPMVWAEKAGMGLANQVPPVVVELKSDASPVAVRQYPMSKEAREGIRPHIQRFLDLGILVPCQSPWNTPLLPVKKPGTNDYRPVQDLREVNKRVQDIHPTVPNPYNLLSSLPPSHTWYSVLDLKDAFFCLKLHPNSQPLFAFEWRDPEKGNTGQLTWTRLPQGFKNSPTLFDEALHRDLASFRALNPQVVMLQYVDDLLVAAPTYRDCKEGTRRLLQELSKLGYRVSAKKAQLCREEVTYLGYLLKGGKRWLTPARKATVMKIPTPTTPRQVREFLGTAGFCRLWIPGFASLAAPLYPLTREKVPFTWTEAHQEAFGRIKEALLSAPALALPDLTKPFALYVDEKEGVARGVLTQTLGPWRRPVAYLSKKLDPVASGWPTCLKAIAAVALLLKDADKLTLGQNVLVIAPHNLESIVRQPPDRWMTNARMTHYQSLLLNERVSFAPPAILNPATLLPVESDDTPIHICSEILAEETGTRPDLRDQPLPGVPAWYTDGSSFIMDGRRQAGAAIVDNKRTVWASNLPEGTSAQKAELIALTQALRLAEGKSINIYTDSRYAFATAHVHGAIYKQRGLLTSAGKDIKNKEEILALLEAIHLPKRVAIIHCPGHQRGTDPVATGNRKADEAAKQAAQSTRILTETTKNAGKRTADGSEFEKRTADGSEFESPKKKAKVE

SEQ ID NO: 1609 - protein, 2220 aa, synthetic construct
MPAAKRVKLDGGDKKYSIGLDIGTNSVGWAVITDEYKVPSKKFKVLGNTDRHSIKKNLIGALLFDSGETAEATRLKRTARRRYTRRKNRICYLQEIFSNEMAKVDDSFFHRLEESFLVEEDKKHERHPIFGNIVDEVAYHEKYPTIYHLRKKLVDSTDKADLRLIYLALAHMIKFRGHFLIEGDLNPDNSDVDKLFIQLVQTYNQLFEENPINASGVDAKAILSARLSKSRRLENLIAQLPGEKKNGLFGNLIALSLGLTPNFKSNFDLAEDAKLQLSKDTYDDDLDNLLAQIGDQYADLFLAAKNLSDAILLSDILRVNTEITKAPLSASMIKRYDEHHQDLTLLKALVRQQLPEKYKEIFFDQSKNGYAGYIDGGASQEEFYKFIKPILEKMDGTEELLVKLNREDLLRKQRTFDNGSIPHQIHLGELHAILRRQEDFYPFLKDNREKIEKILTFRIPYYVGPLARGNSRFAWMTRKSEETITPWNFEEVVDKGASAQSFIERMTNFDKNLPNEKVLPKHSLLYEYFTVYNELTKVKYVTEGMRKPAFLSGEQKKAIVDLLFKTNRKVTVKQLKEDYFKKIECFDSVEISGVEDRFNASLGTYHDLLKIIKDKDFLDNEENEDILEDIVLTLTLFEDREMIEERLKTYAHLFDDKVMKQLKRRRYTGWGRLSRKLINGIRDKQSGKTILDFLKSDGFANRNFMQLIHDDSLTFKEDIQKAQVSGQGDSLHEHIANLAGSPAIKKGILQTVKVVDELVKVMGRHKPENIVIEMARENQTTQKGQKNSRERMKRIEEGIKELGSQILKEHPVENTQLQNEKLYLYYLQNGRDMYVDQELDINRLSDYDVDHIVPQSFLKDDSIDNKVLTRSDKARGKSDNVPSEEVVKKMKNYWRQLLNAKLITQRKFDNLTKAERGGLSELDKAGFIKRQLVETRQITKHVAQILDSRMNTKYDENDKLIREVKVITLKSKLVSDFRKDFQFYKVREINNYHHAHDAYLNAVVGTALIKKYPKLESEFVYGDYKVYDVRKMIAKSEQEIGKATAKYFFYSNIMNFFKTEITLANGEIRKRPLIETNGETGEIVWDKGRDFATVRKVLSMPQVNIVKKTEVQTGGFSKESILPKRNSDKLIARKKDWDPKKYGGFDSPTVAYSVLVVAKVEKGKSKKLKSVKELLGITIMERSSFEKNPIDFLEAKGYKEVKKDLIIKLPKYSLFELENGRKRMLASAGELQKGNELALPSKYVNFLYLASHYEKLKGSPEDNEQKQLFVEQHKHYLDEIIEQISEFSKRVILADANLDKVLSAYNKHRDKPIREQAENIIHLFTLTNLGAPAAFKYFDTTIDRKRYTSTKEVLDATLIHQSITGLYETRIDLSQLGGDGGPAPAPAPAPAPAPGGTLGDQGSRGSDPLPEPRVTLTVEGIPTEFLVNTGAEHSVLTKPMGKMGSKRTVVAGATGSKVYPWTTKRLLKIGQKQVTHSFLVIPECPAPLLGRDLLTKLKAQIQFSTEGPQVTWEDRPAMCLVLNLEEEYRLHEKPVPPSIDPSWLQLFPMVWAEKAGMGLANQVPPVVVELKSDASPVAVRQYPMSKEAREGIRPHIQRFLDLGILVPCQSPWNTPLLPVKKPGTNDYRPVQDLREVNKRVQDIHPTVPNPYNLLSSLPPSHTWYSVLDLKDAFFCLKLHPNSQPLFAFEWRDPEKGNTGQLTWTRLPQGFKNSPTLFDEALHRDLASFRALNPQVVMLQYVDDLLVAAPTYRDCKEGTRRLLQELSKLGYRVSAKKAQLCREEVTYLGYLLKGGKRWLTPARKATVMKIPTPTTPRQVREFLGTAGFCRLWIPGFASLAAPLYPLTREKVPFTWTEAHQEAFGRIKEALLSAPALALPDLTKPFALYVDEKEGVARGVLTQTLGPWRRPVAYLSKKLDPVASGWPTCLKAIAAVALLLKDADKLTLGQNVLVIAPHNLESIVRQPPDRWMTNARMTHYQSLLLNERVSFAPPAILNPATLLPVESDDTPIHICSEILAEETGTRPDLRDQPLPGVPAWYTDGSSFIMDGRRQAGAAIVDNKRTVWASNLPEGTSAQKAELIALTQALRLAEGKSINIYTDSRYAFATAHVHGAIYKQRGLLTSAGKDIKNKEEILALLEAIHLPKRVAIIHCPGHQRGTDPVATGNRKADEAAKQAAQSTRILTETTKNAGKRTADGSEFEKRTADGSEFESPKKKAKVE

SEQ ID NO: 1610 - protein, 2127 aa, synthetic construct
MPAAKRVKLDGGDKKYSIGLDIGTNSVGWAVITDEYKVPSKKFKVLGNTDRHSIKKNLIGALLFDSGETAEATRLKRTARRRYTRRKNRICYLQEIFSNEMAKVDDSFFHRLEESFLVEEDKKHERHPIFGNIVDEVAYHEKYPTIYHLRKKLVDSTDKADLRLIYLALAHMIKFRGHFLIEGDLNPDNSDVDKLFIQLVQTYNQLFEENPINASGVDAKAILSARLSKSRRLENLIAQLPGEKKNGLFGNLIALSLGLTPNFKSNFDLAEDAKLQLSKDTYDDDLDNLLAQIGDQYADLFLAAKNLSDAILLSDILRVNTEITKAPLSASMIKRYDEHHQDLTLLKALVRQQLPEKYKEIFFDQSKNGYAGYIDGGASQEEFYKFIKPILEKMDGTEELLVKLNREDLLRKQRTFDNGSIPHQIHLGELHAILRRQEDFYPFLKDNREKIEKILTFRIPYYVGPLARGNSRFAWMTRKSEETITPWNFEEVVDKGASAQSFIERMTNFDKNLPNEKVLPKHSLLYEYFTVYNELTKVKYVTEGMRKPAFLSGEQKKAIVDLLFKTNRKVTVKQLKEDYFKKIECFDSVEISGVEDRFNASLGTYHDLLKIIKDKDFLDNEENEDILEDIVLTLTLFEDREMIEERLKTYAHLFDDKVMKQLKRRRYTGWGRLSRKLINGIRDKQSGKTILDFLKSDGFANRNFMQLIHDDSLTFKEDIQKAQVSGQGDSLHEHIANLAGSPAIKKGILQTVKVVDELVKVMGRHKPENIVIEMARENQTTQKGQKNSRERMKRIEEGIKELGSQILKEHPVENTQLQNEKLYLYYLQNGRDMYVDQELDINRLSDYDVDHIVPQSFLKDDSIDNKVLTRSDKARGKSDNVPSEEVVKKMKNYWRQLLNAKLITQRKFDNLTKAERGGLSELDKAGFIKRQLVETRQITKHVAQILDSRMNTKYDENDKLIREVKVITLKSKLVSDFRKDFQFYKVREINNYHHAHDAYLNAVVGTALIKKYPKLESEFVYGDYKVYDVRKMIAKSEQEIGKATAKYFFYSNIMNFFKTEITLANGEIRKRPLIETNGETGEIVWDKGRDFATVRKVLSMPQVNIVKKTEVQTGGFSKESILPKRNSDKLIARKKDWDPKKYGGFDSPTVAYSVLVVAKVEKGKSKKLKSVKELLGITIMERSSFEKNPIDFLEAKGYKEVKKDLIIKLPKYSLFELENGRKRMLASAGELQKGNELALPSKYVNFLYLASHYEKLKGSPEDNEQKQLFVEQHKHYLDEIIEQISEFSKRVILADANLDKVLSAYNKHRDKPIREQAENIIHLFTLTNLGAPAAFKYFDTTIDRKRYTSTKEVLDATLIHQSITGLYETRIDLSQLGGDGGEAAAKGGSPAPGGLLGRDLLTKLKAQIQFSTEGPQVTWEDRPAMCLVLNLEEEYRLHEKPVPPSIDPSWLQLFPMVWAEKAGMGLANQVPPVVVELKSDASPVAVRQYPMSKEAREGIRPHIQRFLDLGILVPCQSPWNTPLLPVKKPGTNDYRPVQDLREVNKRVQDIHPTVPNPYNLLSSLPPSHTWYSVLDLKDAFFCLKLHPNSQPLFAFEWRDPEKGNTGQLTWTRLPQGFKNSPTLFDEALHRDLASFRALNPQVVMLQYVDDLLVAAPTYRDCKEGTRRLLQELSKLGYRVSAKKAQLCREEVTYLGYLLKGGKRWLTPARKATVMKIPTPTTPRQVREFLGTAGFCRLWIPGFASLAAPLYPLTREKVPFTWTEAHQEAFGRIKEALLSAPALALPDLTKPFALYVDEKEGVARGVLTQTLGPWRRPVAYLSKKLDPVASGWPTCLKAIAAVALLLKDADKLTLGQNVLVIAPHNLESIVRQPPDRWMTNARMTHYQSLLLNERVSFAPPAILNPATLLPVESDDTPIHICSEILAEETGTRPDLRDQPLPGVPAWYTDGSSFIMDGRRQAGAAIVDNKRTVWASNLPEGTSAQKAELIALTQALRLAEGKSINIYTDSRYAFATAHVHGAIYKQRGLLTSAGKDIKNKEEILALLEAIHLPKRVAIIHCPGHQRGTDPVATGNRKADEAAKQAAQSTRILTETTKNAGKRTADGSEFEKRTADGSEFESPKKKAKVE

SEQ ID NO: 1611 - protein, 2125 aa, synthetic construct
MPAAKRVKLDGGDKKYSIGLDIGTNSVGWAVITDEYKVPSKKFKVLGNTDRHSIKKNLIGALLFDSGETAEATRLKRTARRRYTRRKNRICYLQEIFSNEMAKVDDSFFHRLEESFLVEEDKKHERHPIFGNIVDEVAYHEKYPTIYHLRKKLVDSTDKADLRLIYLALAHMIKFRGHFLIEGDLNPDNSDVDKLFIQLVQTYNQLFEENPINASGVDAKAILSARLSKSRRLENLIAQLPGEKKNGLFGNLIALSLGLTPNFKSNFDLAEDAKLQLSKDTYDDDLDNLLAQIGDQYADLFLAAKNLSDAILLSDILRVNTEITKAPLSASMIKRYDEHHQDLTLLKALVRQQLPEKYKEIFFDQSKNGYAGYIDGGASQEEFYKFIKPILEKMDGTEELLVKLNREDLLRKQRTFDNGSIPHQIHLGELHAILRRQEDFYPFLKDNREKIEKILTFRIPYYVGPLARGNSRFAWMTRKSEETITPWNFEEVVDKGASAQSFIERMTNFDKNLPNEKVLPKHSLLYEYFTVYNELTKVKYVTEGMRKPAFLSGEQKKAIVDLLFKTNRKVTVKQLKEDYFKKIECFDSVEISGVEDRFNASLGTYHDLLKIIKDKDFLDNEENEDILEDIVLTLTLFEDREMIEERLKTYAHLFDDKVMKQLKRRRYTGWGRLSRKLINGIRDKQSGKTILDFLKSDGFANRNFMQLIHDDSLTFKEDIQKAQVSGQGDSLHEHIANLAGSPAIKKGILQTVKVVDELVKVMGRHKPENIVIEMARENQTTQKGQKNSRERMKRIEEGIKELGSQILKEHPVENTQLQNEKLYLYYLQNGRDMYVDQELDINRLSDYDVDHIVPQSFLKDDSIDNKVLTRSDKARGKSDNVPSEEVVKKMKNYWRQLLNAKLITQRKFDNLTKAERGGLSELDKAGFIKRQLVETRQITKHVAQILDSRMNTKYDENDKLIREVKVITLKSKLVSDFRKDFQFYKVREINNYHHAHDAYLNAVVGTALIKKYPKLESEFVYGDYKVYDVRKMIAKSEQEIGKATAKYFFYSNIMNFFKTEITLANGEIRKRPLIETNGETGEIVWDKGRDFATVRKVLSMPQVNIVKKTEVQTGGFSKESILPKRNSDKLIARKKDWDPKKYGGFDSPTVAYSVLVVAKVEKGKSKKLKSVKELLGITIMERSSFEKNPIDFLEAKGYKEVKKDLIIKLPKYSLFELENGRKRMLASAGELQKGNELALPSKYVNFLYLASHYEKLKGSPEDNEQKQLFVEQHKHYLDEIIEQISEFSKRVILADANLDKVLSAYNKHRDKPIREQAENIIHLFTLTNLGAPAAFKYFDTTIDRKRYTSTKEVLDATLIHQSITGLYETRIDLSQLGGDGGGGGGGSGSSGGLLGRDLLTKLKAQIQFSTEGPQVTWEDRPAMCLVLNLEEEYRLHEKPVPPSIDPSWLQLFPMVWAEKAGMGLANQVPPVVVELKSDASPVAVRQYPMSKEAREGIRPHIQRFLDLGILVPCQSPWNTPLLPVKKPGTNDYRPVQDLREVNKRVQDIHPTVPNPYNLLSSLPPSHTWYSVLDLKDAFFCLKLHPNSQPLFAFEWRDPEKGNTGQLTWTRLPQGFKNSPTLFDEALHRDLASFRALNPQVVMLQYVDDLLVAAPTYRDCKEGTRRLLQELSKLGYRVSAKKAQLCREEVTYLGYLLKGGKRWLTPARKATVMKIPTPTTPRQVREFLGTAGFCRLWIPGFASLAAPLYPLTREKVPFTWTEAHQEAFGRIKEALLSAPALALPDLTKPFALYVDEKEGVARGVLTQTLGPWRRPVAYLSKKLDPVASGWPTCLKAIAAVALLLKDADKLTLGQNVLVIAPHNLESIVRQPPDRWMTNARMTHYQSLLLNERVSFAPPAILNPATLLPVESDDTPIHICSEILAEETGTRPDLRDQPLPGVPAWYTDGSSFIMDGRRQAGAAIVDNKRTVWASNLPEGTSAQKAELIALTQALRLAEGKSINIYTDSRYAFATAHVHGAIYKQRGLLTSAGKDIKNKEEILALLEAIHLPKRVAIIHCPGHQRGTDPVATGNRKADEAAKQAAQSTRILTETTKNAGKRTADGSEFEKRTADGSEFESPKKKAKVE

SEQ ID NO: 1612 - protein, 2127 aa, synthetic construct
MPAAKRVKLDGGDKKYSIGLDIGTNSVGWAVITDEYKVPSKKFKVLGNTDRHSIKKNLIGALLFDSGETAEATRLKRTARRRYTRRKNRICYLQEIFSNEMAKVDDSFFHRLEESFLVEEDKKHERHPIFGNIVDEVAYHEKYPTIYHLRKKLVDSTDKADLRLIYLALAHMIKFRGHFLIEGDLNPDNSDVDKLFIQLVQTYNQLFEENPINASGVDAKAILSARLSKSRRLENLIAQLPGEKKNGLFGNLIALSLGLTPNFKSNFDLAEDAKLQLSKDTYDDDLDNLLAQIGDQYADLFLAAKNLSDAILLSDILRVNTEITKAPLSASMIKRYDEHHQDLTLLKALVRQQLPEKYKEIFFDQSKNGYAGYIDGGASQEEFYKFIKPILEKMDGTEELLVKLNREDLLRKQRTFDNGSIPHQIHLGELHAILRRQEDFYPFLKDNREKIEKILTFRIPYYVGPLARGNSRFAWMTRKSEETITPWNFEEVVDKGASAQSFIERMTNFDKNLPNEKVLPKHSLLYEYFTVYNELTKVKYVTEGMRKPAFLSGEQKKAIVDLLFKTNRKVTVKQLKEDYFKKIECFDSVEISGVEDRFNASLGTYHDLLKIIKDKDFLDNEENEDILEDIVLTLTLFEDREMIEERLKTYAHLFDDKVMKQLKRRRYTGWGRLSRKLINGIRDKQSGKTILDFLKSDGFANRNFMQLIHDDSLTFKEDIQKAQVSGQGDSLHEHIANLAGSPAIKKGILQTVKVVDELVKVMGRHKPENIVIEMARENQTTQKGQKNSRERMKRIEEGIKELGSQILKEHPVENTQLQNEKLYLYYLQNGRDMYVDQELDINRLSDYDVDHIVPQSFLKDDSIDNKVLTRSDKARGKSDNVPSEEVVKKMKNYWRQLLNAKLITQRKFDNLTKAERGGLSELDKAGFIKRQLVETRQITKHVAQILDSRMNTKYDENDKLIREVKVITLKSKLVSDFRKDFQFYKVREINNYHHAHDAYLNAVVGTALIKKYPKLESEFVYGDYKVYDVRKMIAKSEQEIGKATAKYFFYSNIMNFFKTEITLANGEIRKRPLIETNGETGEIVWDKGRDFATVRKVLSMPQVNIVKKTEVQTGGFSKESILPKRNSDKLIARKKDWDPKKYGGFDSPTVAYSVLVVAKVEKGKSKKLKSVKELLGITIMERSSFEKNPIDFLEAKGYKEVKKDLIIKLPKYSLFELENGRKRMLASAGELQKGNELALPSKYVNFLYLASHYEKLKGSPEDNEQKQLFVEQHKHYLDEIIEQISEFSKRVILADANLDKVLSAYNKHRDKPIREQAENIIHLFTLTNLGAPAAFKYFDTTIDRKRYTSTKEVLDATLIHQSITGLYETRIDLSQLGGDGGEAAAKGGGPAPGGLLGRDLLTKLKAQIQFSTEGPQVTWEDRPAMCLVLNLEEEYRLHEKPVPPSIDPSWLQLFPMVWAEKAGMGLANQVPPVVVELKSDASPVAVRQYPMSKEAREGIRPHIQRFLDLGILVPCQSPWNTPLLPVKKPGTNDYRPVQDLREVNKRVQDIHPTVPNPYNLLSSLPPSHTWYSVLDLKDAFFCLKLHPNSQPLFAFEWRDPEKGNTGQLTWTRLPQGFKNSPTLFDEALHRDLASFRALNPQVVMLQYVDDLLVAAPTYRDCKEGTRRLLQELSKLGYRVSAKKAQLCREEVTYLGYLLKGGKRWLTPARKATVMKIPTPTTPRQVREFLGTAGFCRLWIPGFASLAAPLYPLTREKVPFTWTEAHQEAFGRIKEALLSAPALALPDLTKPFALYVDEKEGVARGVLTQTLGPWRRPVAYLSKKLDPVASGWPTCLKAIAAVALLLKDADKLTLGQNVLVIAPHNLESIVRQPPDRWMTNARMTHYQSLLLNERVSFAPPAILNPATLLPVESDDTPIHICSEILAEETGTRPDLRDQPLPGVPAWYTDGSSFIMDGRRQAGAAIVDNKRTVWASNLPEGTSAQKAELIALTQALRLAEGKSINIYTDSRYAFATAHVHGAIYKQRGLLTSAGKDIKNKEEILALLEAIHLPKRVAIIHCPGHQRGTDPVATGNRKADEAAKQAAQSTRILTETTKNAGKRTADGSEFEKRTADGSEFESPKKKAKVE

SEQ ID NO: 1613 - protein, 2127 aa, synthetic construct
MPAAKRVKLDGGDKKYSIGLDIGTNSVGWAVITDEYKVPSKKFKVLGNTDRHSIKKNLIGALLFDSGETAEATRLKRTARRRYTRRKNRICYLQEIFSNEMAKVDDSFFHRLEESFLVEEDKKHERHPIFGNIVDEVAYHEKYPTIYHLRKKLVDSTDKADLRLIYLALAHMIKFRGHFLIEGDLNPDNSDVDKLFIQLVQTYNQLFEENPINASGVDAKAILSARLSKSRRLENLIAQLPGEKKNGLFGNLIALSLGLTPNFKSNFDLAEDAKLQLSKDTYDDDLDNLLAQIGDQYADLFLAAKNLSDAILLSDILRVNTEITKAPLSASMIKRYDEHHQDLTLLKALVRQQLPEKYKEIFFDQSKNGYAGYIDGGASQEEFYKFIKPILEKMDGTEELLVKLNREDLLRKQRTFDNGSIPHQIHLGELHAILRRQEDFYPFLKDNREKIEKILTFRIPYYVGPLARGNSRFAWMTRKSEETITPWNFEEVVDKGASAQSFIERMTNFDKNLPNEKVLPKHSLLYEYFTVYNELTKVKYVTEGMRKPAFLSGEQKKAIVDLLFKTNRKVTVKQLKEDYFKKIECFDSVEISGVEDRFNASLGTYHDLLKIIKDKDFLDNEENEDILEDIVLTLTLFEDREMIEERLKTYAHLFDDKVMKQLKRRRYTGWGRLSRKLINGIRDKQSGKTILDFLKSDGFANRNFMQLIHDDSLTFKEDIQKAQVSGQGDSLHEHIANLAGSPAIKKGILQTVKVVDELVKVMGRHKPENIVIEMARENQTTQKGQKNSRERMKRIEEGIKELGSQILKEHPVENTQLQNEKLYLYYLQNGRDMYVDQELDINRLSDYDVDHIVPQSFLKDDSIDNKVLTRSDKARGKSDNVPSEEVVKKMKNYWRQLLNAKLITQRKFDNLTKAERGGLSELDKAGFIKRQLVETRQITKHVAQILDSRMNTKYDENDKLIREVKVITLKSKLVSDFRKDFQFYKVREINNYHHAHDAYLNAVVGTALIKKYPKLESEFVYGDYKVYDVRKMIAKSEQEIGKATAKYFFYSNIMNFFKTEITLANGEIRKRPLIETNGETGEIVWDKGRDFATVRKVLSMPQVNIVKKTEVQTGGFSKESILPKRNSDKLIARKKDWDPKKYGGFDSPTVAYSVLVVAKVEKGKSKKLKSVKELLGITIMERSSFEKNPIDFLEAKGYKEVKKDLIIKLPKYSLFELENGRKRMLASAGELQKGNELALPSKYVNFLYLASHYEKLKGSPEDNEQKQLFVEQHKHYLDEIIEQISEFSKRVILADANLDKVLSAYNKHRDKPIREQAENIIHLFTLTNLGAPAAFKYFDTTIDRKRYTSTKEVLDATLIHQSITGLYETRIDLSQLGGDGGEAAAKPAPGSSGGLLGRDLLTKLKAQIQFSTEGPQVTWEDRPAMCLVLNLEEEYRLHEKPVPPSIDPSWLQLFPMVWAEKAGMGLANQVPPVVVELKSDASPVAVRQYPMSKEAREGIRPHIQRFLDLGILVPCQSPWNTPLLPVKKPGTNDYRPVQDLREVNKRVQDIHPTVPNPYNLLSSLPPSHTWYSVLDLKDAFFCLKLHPNSQPLFAFEWRDPEKGNTGQLTWTRLPQGFKNSPTLFDEALHRDLASFRALNPQVVMLQYVDDLLVAAPTYRDCKEGTRRLLQELSKLGYRVSAKKAQLCREEVTYLGYLLKGGKRWLTPARKATVMKIPTPTTPRQVREFLGTAGFCRLWIPGFASLAAPLYPLTREKVPFTWTEAHQEAFGRIKEALLSAPALALPDLTKPFALYVDEKEGVARGVLTQTLGPWRRPVAYLSKKLDPVASGWPTCLKAIAAVALLLKDADKLTLGQNVLVIAPHNLESIVRQPPDRWMTNARMTHYQSLLLNERVSFAPPAILNPATLLPVESDDTPIHICSEILAEETGTRPDLRDQPLPGVPAWYTDGSSFIMDGRRQAGAAIVDNKRTVWASNLPEGTSAQKAELIALTQALRLAEGKSINIYTDSRYAFATAHVHGAIYKQRGLLTSAGKDIKNKEEILALLEAIHLPKRVAIIHCPGHQRGTDPVATGNRKADEAAKQAAQSTRILTETTKNAGKRTADGSEFEKRTADGSEFESPKKKAKVE

SEQ ID NO: 1614 - protein, 2127 aa, synthetic construct
MPAAKRVKLDGGDKKYSIGLDIGTNSVGWAVITDEYKVPSKKFKVLGNTDRHSIKKNLIGALLFDSGETAEATRLKRTARRRYTRRKNRICYLQEIFSNEMAKVDDSFFHRLEESFLVEEDKKHERHPIFGNIVDEVAYHEKYPTIYHLRKKLVDSTDKADLRLIYLALAHMIKFRGHFLIEGDLNPDNSDVDKLFIQLVQTYNQLFEENPINASGVDAKAILSARLSKSRRLENLIAQLPGEKKNGLFGNLIALSLGLTPNFKSNFDLAEDAKLQLSKDTYDDDLDNLLAQIGDQYADLFLAAKNLSDAILLSDILRVNTEITKAPLSASMIKRYDEHHQDLTLLKALVRQQLPEKYKEIFFDQSKNGYAGYIDGGASQEEFYKFIKPILEKMDGTEELLVKLNREDLLRKQRTFDNGSIPHQIHLGELHAILRRQEDFYPFLKDNREKIEKILTFRIPYYVGPLARGNSRFAWMTRKSEETITPWNFEEVVDKGASAQSFIERMTNFDKNLPNEKVLPKHSLLYEYFTVYNELTKVKYVTEGMRKPAFLSGEQKKAIVDLLFKTNRKVTVKQLKEDYFKKIECFDSVEISGVEDRFNASLGTYHDLLKIIKDKDFLDNEENEDILEDIVLTLTLFEDREMIEERLKTYAHLFDDKVMKQLKRRRYTGWGRLSRKLINGIRDKQSGKTILDFLKSDGFANRNFMQLIHDDSLTFKEDIQKAQVSGQGDSLHEHIANLAGSPAIKKGILQTVKVVDELVKVMGRHKPENIVIEMARENQTTQKGQKNSRERMKRIEEGIKELGSQILKEHPVENTQLQNEKLYLYYLQNGRDMYVDQELDINRLSDYDVDHIVPQSFLKDDSIDNKVLTRSDKARGKSDNVPSEEVVKKMKNYWRQLLNAKLITQRKFDNLTKAERGGLSELDKAGFIKRQLVETRQITKHVAQILDSRMNTKYDENDKLIREVKVITLKSKLVSDFRKDFQFYKVREINNYHHAHDAYLNAVVGTALIKKYPKLESEFVYGDYKVYDVRKMIAKSEQEIGKATAKYFFYSNIMNFFKTEITLANGEIRKRPLIETNGETGEIVWDKGRDFATVRKVLSMPQVNIVKKTEVQTGGFSKESILPKRNSDKLIARKKDWDPKKYGGFDSPTVAYSVLVVAKVEKGKSKKLKSVKELLGITIMERSSFEKNPIDFLEAKGYKEVKKDLIIKLPKYSLFELENGRKRMLASAGELQKGNELALPSKYVNFLYLASHYEKLKGSPEDNEQKQLFVEQHKHYLDEIIEQISEFSKRVILADANLDKVLSAYNKHRDKPIREQAENIIHLFTLTNLGAPAAFKYFDTTIDRKRYTSTKEVLDATLIHQSITGLYETRIDLSQLGGDGGPAPGGSEAAAKGGLLGRDLLTKLKAQIQFSTEGPQVTWEDRPAMCLVLNLEEEYRLHEKPVPPSIDPSWLQLFPMVWAEKAGMGLANQVPPVVVELKSDASPVAVRQYPMSKEAREGIRPHIQRFLDLGILVPCQSPWNTPLLPVKKPGTNDYRPVQDLREVNKRVQDIHPTVPNPYNLLSSLPPSHTWYSVLDLKDAFFCLKLHPNSQPLFAFEWRDPEKGNTGQLTWTRLPQGFKNSPTLFDEALHRDLASFRALNPQVVMLQYVDDLLVAAPTYRDCKEGTRRLLQELSKLGYRVSAKKAQLCREEVTYLGYLLKGGKRWLTPARKATVMKIPTPTTPRQVREFLGTAGFCRLWIPGFASLAAPLYPLTREKVPFTWTEAHQEAFGRIKEALLSAPALALPDLTKPFALYVDEKEGVARGVLTQTLGPWRRPVAYLSKKLDPVASGWPTCLKAIAAVALLLKDADKLTLGQNVLVIAPHNLESIVRQPPDRWMTNARMTHYQSLLLNERVSFAPPAILNPATLLPVESDDTPIHICSEILAEETGTRPDLRDQPLPGVPAWYTDGSSFIMDGRRQAGAAIVDNKRTVWASNLPEGTSAQKAELIALTQALRLAEGKSINIYTDSRYAFATAHVHGAIYKQRGLLTSAGKDIKNKEEILALLEAIHLPKRVAIIHCPGHQRGTDPVATGNRKADEAAKQAAQSTRILTETTKNAGKRTADGSEFEKRTADGSEFESPKKKAKVE

SEQ ID NO: 1615 - protein, 2134 aa, synthetic construct
MPAAKRVKLDGGDKKYSIGLDIGTNSVGWAVITDEYKVPSKKFKVLGNTDRHSIKKNLIGALLFDSGETAEATRLKRTARRRYTRRKNRICYLQEIFSNEMAKVDDSFFHRLEESFLVEEDKKHERHPIFGNIVDEVAYHEKYPTIYHLRKKLVDSTDKADLRLIYLALAHMIKFRGHFLIEGDLNPDNSDVDKLFIQLVQTYNQLFEENPINASGVDAKAILSARLSKSRRLENLIAQLPGEKKNGLFGNLIALSLGLTPNFKSNFDLAEDAKLQLSKDTYDDDLDNLLAQIGDQYADLFLAAKNLSDAILLSDILRVNTEITKAPLSASMIKRYDEHHQDLTLLKALVRQQLPEKYKEIFFDQSKNGYAGYIDGGASQEEFYKFIKPILEKMDGTEELLVKLNREDLLRKQRTFDNGSIPHQIHLGELHAILRRQEDFYPFLKDNREKIEKILTFRIPYYVGPLARGNSRFAWMTRKSEETITPWNFEEVVDKGASAQSFIERMTNFDKNLPNEKVLPKHSLLYEYFTVYNELTKVKYVTEGMRKPAFLSGEQKKAIVDLLFKTNRKVTVKQLKEDYFKKIECFDSVEISGVEDRFNASLGTYHDLLKIIKDKDFLDNEENEDILEDIVLTLTLFEDREMIEERLKTYAHLFDDKVMKQLKRRRYTGWGRLSRKLINGIRDKQSGKTILDFLKSDGFANRNFMQLIHDDSLTFKEDIQKAQVSGQGDSLHEHIANLAGSPAIKKGILQTVKVVDELVKVMGRHKPENIVIEMARENQTTQKGQKNSRERMKRIEEGIKELGSQILKEHPVENTQLQNEKLYLYYLQNGRDMYVDQELDINRLSDYDVDHIVPQSFLKDDSIDNKVLTRSDKARGKSDNVPSEEVVKKMKNYWRQLLNAKLITQRKFDNLTKAERGGLSELDKAGFIKRQLVETRQITKHVAQILDSRMNTKYDENDKLIREVKVITLKSKLVSDFRKDFQFYKVREINNYHHAHDAYLNAVVGTALIKKYPKLESEFVYGDYKVYDVRKMIAKSEQEIGKATAKYFFYSNIMNFFKTEITLANGEIRKRPLIETNGETGEIVWDKGRDFATVRKVLSMPQVNIVKKTEVQTGGFSKESILPKRNSDKLIARKKDWDPKKYGGFDSPTVAYSVLVVAKVEKGKSKKLKSVKELLGITIMERSSFEKNPIDFLEAKGYKEVKKDLIIKLPKYSLFELENGRKRMLASAGELQKGNELALPSKYVNFLYLASHYEKLKGSPEDNEQKQLFVEQHKHYLDEIIEQISEFSKRVILADANLDKVLSAYNKHRDKPIREQAENIIHLFTLTNLGAPAAFKYFDTTIDRKRYTSTKEVLDATLIHQSITGLYETRIDLSQLGGDGGGSSGSSGSSGSSGSSGSSGGLLGRDLLTKLKAQIQFSTEGPQVTWEDRPAMCLVLNLEEEYRLHEKPVPPSIDPSWLQLFPMVWAEKAGMGLANQVPPVVVELKSDASPVAVRQYPMSKEAREGIRPHIQRFLDLGILVPCQSPWNTPLLPVKKPGTNDYRPVQDLREVNKRVQDIHPTVPNPYNLLSSLPPSHTWYSVLDLKDAFFCLKLHPNSQPLFAFEWRDPEKGNTGQLTWTRLPQGFKNSPTLFDEALHRDLASFRALNPQVVMLQYVDDLLVAAPTYRDCKEGTRRLLQELSKLGYRVSAKKAQLCREEVTYLGYLLKGGKRWLTPARKATVMKIPTPTTPRQVREFLGTAGFCRLWIPGFASLAAPLYPLTREKVPFTWTEAHQEAFGRIKEALLSAPALALPDLTKPFALYVDEKEGVARGVLTQTLGPWRRPVAYLSKKLDPVASGWPTCLKAIAAVALLLKDADKLTLGQNVLVIAPHNLESIVRQPPDRWMTNARMTHYQSLLLNERVSFAPPAILNPATLLPVESDDTPIHICSEILAEETGTRPDLRDQPLPGVPAWYTDGSSFIMDGRRQAGAAIVDNKRTVWASNLPEGTSAQKAELIALTQALRLAEGKSINIYTDSRYAFATAHVHGAIYKQRGLLTSAGKDIKNKEEILALLEAIHLPKRVAIIHCPGHQRGTDPVATGNRKADEAAKQAAQSTRILTETTKNAGKRTADGSEFEKRTADGSEFESPKKKAKVE

SEQ ID NO: 1616 - protein, 2123 aa, synthetic construct
MPAAKRVKLDGGDKKYSIGLDIGTNSVGWAVITDEYKVPSKKFKVLGNTDRHSIKKNLIGALLFDSGETAEATRLKRTARRRYTRRKNRICYLQEIFSNEMAKVDDSFFHRLEESFLVEEDKKHERHPIFGNIVDEVAYHEKYPTIYHLRKKLVDSTDKADLRLIYLALAHMIKFRGHFLIEGDLNPDNSDVDKLFIQLVQTYNQLFEENPINASGVDAKAILSARLSKSRRLENLIAQLPGEKKNGLFGNLIALSLGLTPNFKSNFDLAEDAKLQLSKDTYDDDLDNLLAQIGDQYADLFLAAKNLSDAILLSDILRVNTEITKAPLSASMIKRYDEHHQDLTLLKALVRQQLPEKYKEIFFDQSKNGYAGYIDGGASQEEFYKFIKPILEKMDGTEELLVKLNREDLLRKQRTFDNGSIPHQIHLGELHAILRRQEDFYPFLKDNREKIEKILTFRIPYYVGPLARGNSRFAWMTRKSEETITPWNFEEVVDKGASAQSFIERMTNFDKNLPNEKVLPKHSLLYEYFTVYNELTKVKYVTEGMRKPAFLSGEQKKAIVDLLFKTNRKVTVKQLKEDYFKKIECFDSVEISGVEDRFNASLGTYHDLLKIIKDKDFLDNEENEDILEDIVLTLTLFEDREMIEERLKTYAHLFDDKVMKQLKRRRYTGWGRLSRKLINGIRDKQSGKTILDFLKSDGFANRNFMQLIHDDSLTFKEDIQKAQVSGQGDSLHEHIANLAGSPAIKKGILQTVKVVDELVKVMGRHKPENIVIEMARENQTTQKGQKNSRERMKRIEEGIKELGSQILKEHPVENTQLQNEKLYLYYLQNGRDMYVDQELDINRLSDYDVDHIVPQSFLKDDSIDNKVLTRSDKARGKSDNVPSEEVVKKMKNYWRQLLNAKLITQRKFDNLTKAERGGLSELDKAGFIKRQLVETRQITKHVAQILDSRMNTKYDENDKLIREVKVITLKSKLVSDFRKDFQFYKVREINNYHHAHDAYLNAVVGTALIKKYPKLESEFVYGDYKVYDVRKMIAKSEQEIGKATAKYFFYSNIMNFFKTEITLANGEIRKRPLIETNGETGEIVWDKGRDFATVRKVLSMPQVNIVKKTEVQTGGFSKESILPKRNSDKLIARKKDWDPKKYGGFDSPTVAYSVLVVAKVEKGKSKKLKSVKELLGITIMERSSFEKNPIDFLEAKGYKEVKKDLIIKLPKYSLFELENGRKRMLASAGELQKGNELALPSKYVNFLYLASHYEKLKGSPEDNEQKQLFVEQHKHYLDEIIEQISEFSKRVILADANLDKVLSAYNKHRDKPIREQAENIIHLFTLTNLGAPAAFKYFDTTIDRKRYTSTKEVLDATLIHQSITGLYETRIDLSQLGGDGGPAPAPAPGGLLGRDLLTKLKAQIQFSTEGPQVTWEDRPAMCLVLNLEEEYRLHEKPVPPSIDPSWLQLFPMVWAEKAGMGLANQVPPVVVELKSDASPVAVRQYPMSKEAREGIRPHIQRFLDLGILVPCQSPWNTPLLPVKKPGTNDYRPVQDLREVNKRVQDIHPTVPNPYNLLSSLPPSHTWYSVLDLKDAFFCLKLHPNSQPLFAFEWRDPEKGNTGQLTWTRLPQGFKNSPTLFNEALHRDLASFRALNPQVVMLQYVDDLLVAAPTYRDCKEGTRRLLQELSKLGYRVSAKKAQLCREEVTYLGYLLKGGKRWLTPARKATVMKIPTPTTPRQVREFLGTAGFCRLWIPGFASLAAPLYPLTRPKVPFTWTEAHQEAFGRIKEALLSAPALALPDLTKPFALYVDEKEGVARGVLTQTLGPWRRPVAYLSKKLDPVASGWPTCLKAIAAVALLLKDADKLTLGQNVLVIAPHNLESIVRQPPDRWMTNARMTHYQSLLLNERVSFAPPAILNPATLLPVESDDTPIHICSEILAEETGTRPDLRDQPLPGVPAWYTDGSSFIMDGRRQAGAAIVDNKRTVWASNLPEGTSAQKAELIALTQALRLAEGKSINIYTDSRYAFATAHVHGAIYKQRGWLTSAGKDIKNKEEILALLEAIHLPKRVAIIHCPGHQRGTDPVATGNRKADEAAKQAAQSTRILTETTKNAGKRTADGSEFEKRTADGSEFESPKKKAKVE

SEQ ID NO: 1617 - protein, 2131 aa, synthetic construct
MPAAKRVKLDGGDKKYSIGLDIGTNSVGWAVITDEYKVPSKKFKVLGNTDRHSIKKNLIGALLFDSGETAEATRLKRTARRRYTRRKNRICYLQEIFSNEMAKVDDSFFHRLEESFLVEEDKKHERHPIFGNIVDEVAYHEKYPTIYHLRKKLVDSTDKADLRLIYLALAHMIKFRGHFLIEGDLNPDNSDVDKLFIQLVQTYNQLFEENPINASGVDAKAILSARLSKSRRLENLIAQLPGEKKNGLFGNLIALSLGLTPNFKSNFDLAEDAKLQLSKDTYDDDLDNLLAQIGDQYADLFLAAKNLSDAILLSDILRVNTEITKAPLSASMIKRYDEHHQDLTLLKALVRQQLPEKYKEIFFDQSKNGYAGYIDGGASQEEFYKFIKPILEKMDGTEELLVKLNREDLLRKQRTFDNGSIPHQIHLGELHAILRRQEDFYPFLKDNREKIEKILTFRIPYYVGPLARGNSRFAWMTRKSEETITPWNFEEVVDKGASAQSFIERMTNFDKNLPNEKVLPKHSLLYEYFTVYNELTKVKYVTEGMRKPAFLSGEQKKAIVDLLFKTNRKVTVKQLKEDYFKKIECFDSVEISGVEDRFNASLGTYHDLLKIIKDKDFLDNEENEDILEDIVLTLTLFEDREMIEERLKTYAHLFDDKVMKQLKRRRYTGWGRLSRKLINGIRDKQSGKTILDFLKSDGFANRNFMQLIHDDSLTFKEDIQKAQVSGQGDSLHEHIANLAGSPAIKKGILQTVKVVDELVKVMGRHKPENIVIEMARENQTTQKGQKNSRERMKRIEEGIKELGSQILKEHPVENTQLQNEKLYLYYLQNGRDMYVDQELDINRLSDYDVDHIVPQSFLKDDSIDNKVLTRSDKARGKSDNVPSEEVVKKMKNYWRQLLNAKLITQRKFDNLTKAERGGLSELDKAGFIKRQLVETRQITKHVAQILDSRMNTKYDENDKLIREVKVITLKSKLVSDFRKDFQFYKVREINNYHHAHDAYLNAVVGTALIKKYPKLESEFVYGDYKVYDVRKMIAKSEQEIGKATAKYFFYSNIMNFFKTEITLANGEIRKRPLIETNGETGEIVWDKGRDFATVRKVLSMPQVNIVKKTEVQTGGFSKESILPKRNSDKLIARKKDWDPKKYGGFDSPTVAYSVLVVAKVEKGKSKKLKSVKELLGITIMERSSFEKNPIDFLEAKGYKEVKKDLIIKLPKYSLFELENGRKRMLASAGELQKGNELALPSKYVNFLYLASHYEKLKGSPEDNEQKQLFVEQHKHYLDEIIEQISEFSKRVILADANLDKVLSAYNKHRDKPIREQAENIIHLFTLTNLGAPAAFKYFDTTIDRKRYTSTKEVLDATLIHQSITGLYETRIDLSQLGGDGGGSSGSSGSSGSSGSSGGLLGRDLLTKLKAQIQFSTEGPQVTWEDRPAMCLVLNLEEEYRLHEKPVPPSIDPSWLQLFPMVWAEKAGMGLANQVPPVVVELKSDASPVAVRQYPMSKEAREGIRPHIQRFLDLGILVPCQSPWNTPLLPVKKPGTNDYRPVQDLREVNKRVQDIHPTVPNPYNLLSSLPPSHTWYSVLDLKDAFFCLKLHPNSQPLFAFEWRDPEKGNTGQLTWTRLPQGFKNSPTLFNEALHRDLASFRALNPQVVMLQYVDDLLVAAPTYRDCKEGTRRLLQELSKLGYRVSAKKAQLCREEVTYLGYLLKGGKRWLTPARKATVMKIPTPTTPRQVREFLGTAGFCRLWIPGFASLAAPLYPLTRPKVPFTWTEAHQEAFGRIKEALLSAPALALPDLTKPFALYVDEKEGVARGVLTQTLGPWRRPVAYLSKKLDPVASGWPTCLKAIAAVALLLKDADKLTLGQNVLVIAPHNLESIVRQPPDRWMTNARMTHYQSLLLNERVSFAPPAILNPATLLPVESDDTPIHICSEILAEETGTRPDLRDQPLPGVPAWYTDGSSFIMDGRRQAGAAIVDNKRTVWASNLPEGTSAQKAELIALTQALRLAEGKSINIYTDSRYAFATAHVHGAIYKQRGWLTSAGKDIKNKEEILALLEAIHLPKRVAIIHCPGHQRGTDPVATGNRKADEAAKQAAQSTRILTETTKNAGKRTADGSEFEKRTADGSEFESPKKKAKVE

SEQ ID NO: 1618 - protein, 2127 aa, synthetic construct
MPAAKRVKLDGGDKKYSIGLDIGTNSVGWAVITDEYKVPSKKFKVLGNTDRHSIKKNLIGALLFDSGETAEATRLKRTARRRYTRRKNRICYLQEIFSNEMAKVDDSFFHRLEESFLVEEDKKHERHPIFGNIVDEVAYHEKYPTIYHLRKKLVDSTDKADLRLIYLALAHMIKFRGHFLIEGDLNPDNSDVDKLFIQLVQTYNQLFEENPINASGVDAKAILSARLSKSRRLENLIAQLPGEKKNGLFGNLIALSLGLTPNFKSNFDLAEDAKLQLSKDTYDDDLDNLLAQIGDQYADLFLAAKNLSDAILLSDILRVNTEITKAPLSASMIKRYDEHHQDLTLLKALVRQQLPEKYKEIFFDQSKNGYAGYIDGGASQEEFYKFIKPILEKMDGTEELLVKLNREDLLRKQRTFDNGSIPHQIHLGELHAILRRQEDFYPFLKDNREKIEKILTFRIPYYVGPLARGNSRFAWMTRKSEETITPWNFEEVVDKGASAQSFIERMTNFDKNLPNEKVLPKHSLLYEYFTVYNELTKVKYVTEGMRKPAFLSGEQKKAIVDLLFKTNRKVTVKQLKEDYFKKIECFDSVEISGVEDRFNASLGTYHDLLKIIKDKDFLDNEENEDILEDIVLTLTLFEDREMIEERLKTYAHLFDDKVMKQLKRRRYTGWGRLSRKLINGIRDKQSGKTILDFLKSDGFANRNFMQLIHDDSLTFKEDIQKAQVSGQGDSLHEHIANLAGSPAIKKGILQTVKVVDELVKVMGRHKPENIVIEMARENQTTQKGQKNSRERMKRIEEGIKELGSQILKEHPVENTQLQNEKLYLYYLQNGRDMYVDQELDINRLSDYDVDHIVPQSFLKDDSIDNKVLTRSDKARGKSDNVPSEEVVKKMKNYWRQLLNAKLITQRKFDNLTKAERGGLSELDKAGFIKRQLVETRQITKHVAQILDSRMNTKYDENDKLIREVKVITLKSKLVSDFRKDFQFYKVREINNYHHAHDAYLNAVVGTALIKKYPKLESEFVYGDYKVYDVRKMIAKSEQEIGKATAKYFFYSNIMNFFKTEITLANGEIRKRPLIETNGETGEIVWDKGRDFATVRKVLSMPQVNIVKKTEVQTGGFSKESILPKRNSDKLIARKKDWDPKKYGGFDSPTVAYSVLVVAKVEKGKSKKLKSVKELLGITIMERSSFEKNPIDFLEAKGYKEVKKDLIIKLPKYSLFELENGRKRMLASAGELQKGNELALPSKYVNFLYLASHYEKLKGSPEDNEQKQLFVEQHKHYLDEIIEQISEFSKRVILADANLDKVLSAYNKHRDKPIREQAENIIHLFTLTNLGAPAAFKYFDTTIDRKRYTSTKEVLDATLIHQSITGLYETRIDLSQLGGDGGEAAAKPAPGSSGGLLGRDLLTKLKAQIQFSTEGPQVTWEDRPAMCLVLNLEEEYRLHEKPVPPSIDPSWLQLFPMVWAEKAGMGLANQVPPVVVELKSDASPVAVRQYPMSKEAREGIRPHIQRFLDLGILVPCQSPWNTPLLPVKKPGTNDYRPVQDLREVNKRVQDIHPTVPNPYNLLSSLPPSHTWYSVLDLKDAFFCLKLHPNSQPLFAFEWRDPEKGNTGQLTWTRLPQGFKNSPTLFNEALHRDLASFRALNPQVVMLQYVDDLLVAAPTYRDCKEGTRRLLQELSKLGYRVSAKKAQLCREEVTYLGYLLKGGKRWLTPARKATVMKIPTPTTPRQVREFLGTAGFCRLWIPGFASLAAPLYPLTRPKVPFTWTEAHQEAFGRIKEALLSAPALALPDLTKPFALYVDEKEGVARGVLTQTLGPWRRPVAYLSKKLDPVASGWPTCLKAIAAVALLLKDADKLTLGQNVLVIAPHNLESIVRQPPDRWMTNARMTHYQSLLLNERVSFAPPAILNPATLLPVESDDTPIHICSEILAEETGTRPDLRDQPLPGVPAWYTDGSSFIMDGRRQAGAAIVDNKRTVWASNLPEGTSAQKAELIALTQALRLAEGKSINIYTDSRYAFATAHVHGAIYKQRGWLTSAGKDIKNKEEILALLEAIHLPKRVAIIHCPGHQRGTDPVATGNRKADEAAKQAAQSTRILTETTKNAGKRTADGSEFEKRTADGSEFESPKKKAKVE

SEQ ID NO: 1619 - protein, 2127 aa, synthetic construct
MPAAKRVKLDGGDKKYSIGLDIGTNSVGWAVITDEYKVPSKKFKVLGNTDRHSIKKNLIGALLFDSGETAEATRLKRTARRRYTRRKNRICYLQEIFSNEMAKVDDSFFHRLEESFLVEEDKKHERHPIFGNIVDEVAYHEKYPTIYHLRKKLVDSTDKADLRLIYLALAHMIKFRGHFLIEGDLNPDNSDVDKLFIQLVQTYNQLFEENPINASGVDAKAILSARLSKSRRLENLIAQLPGEKKNGLFGNLIALSLGLTPNFKSNFDLAEDAKLQLSKDTYDDDLDNLLAQIGDQYADLFLAAKNLSDAILLSDILRVNTEITKAPLSASMIKRYDEHHQDLTLLKALVRQQLPEKYKEIFFDQSKNGYAGYIDGGASQEEFYKFIKPILEKMDGTEELLVKLNREDLLRKQRTFDNGSIPHQIHLGELHAILRRQEDFYPFLKDNREKIEKILTFRIPYYVGPLARGNSRFAWMTRKSEETITPWNFEEVVDKGASAQSFIERMTNFDKNLPNEKVLPKHSLLYEYFTVYNELTKVKYVTEGMRKPAFLSGEQKKAIVDLLFKTNRKVTVKQLKEDYFKKIECFDSVEISGVEDRFNASLGTYHDLLKIIKDKDFLDNEENEDILEDIVLTLTLFEDREMIEERLKTYAHLFDDKVMKQLKRRRYTGWGRLSRKLINGIRDKQSGKTILDFLKSDGFANRNFMQLIHDDSLTFKEDIQKAQVSGQGDSLHEHIANLAGSPAIKKGILQTVKVVDELVKVMGRHKPENIVIEMARENQTTQKGQKNSRERMKRIEEGIKELGSQILKEHPVENTQLQNEKLYLYYLQNGRDMYVDQELDINRLSDYDVDHIVPQSFLKDDSIDNKVLTRSDKARGKSDNVPSEEVVKKMKNYWRQLLNAKLITQRKFDNLTKAERGGLSELDKAGFIKRQLVETRQITKHVAQILDSRMNTKYDENDKLIREVKVITLKSKLVSDFRKDFQFYKVREINNYHHAHDAYLNAVVGTALIKKYPKLESEFVYGDYKVYDVRKMIAKSEQEIGKATAKYFFYSNIMNFFKTEITLANGEIRKRPLIETNGETGEIVWDKGRDFATVRKVLSMPQVNIVKKTEVQTGGFSKESILPKRNSDKLIARKKDWDPKKYGGFDSPTVAYSVLVVAKVEKGKSKKLKSVKELLGITIMERSSFEKNPIDFLEAKGYKEVKKDLIIKLPKYSLFELENGRKRMLASAGELQKGNELALPSKYVNFLYLASHYEKLKGSPEDNEQKQLFVEQHKHYLDEIIEQISEFSKRVILADANLDKVLSAYNKHRDKPIREQAENIIHLFTLTNLGAPAAFKYFDTTIDRKRYTSTKEVLDATLIHQSITGLYETRIDLSQLGGDGGPAPAPAPAPAPGGLLGRDLLTKLKAQIQFSTEGPQVTWEDRPAMCLVLNLEEEYRLHEKPVPPSIDPSWLQLFPMVWAEKAGMGLANQVPPVVVELKSDASPVAVRQYPMSKEAREGIRPHIQRFLDLGILVPCQSPWNTPLLPVKKPGTNDYRPVQDLREVNKRVQDIHPTVPNPYNLLSSLPPSHTWYSVLDLKDAFFCLKLHPNSQPLFAFEWRDPEKGNTGQLTWTRLPQGFKNSPTLFNEALHRDLASFRALNPQVVMLQYVDDLLVAAPTYRDCKEGTRRLLQELSKLGYRVSAKKAQLCREEVTYLGYLLKGGKRWLTPARKATVMKIPTPTTPRQVREFLGTAGFCRLWIPGFASLAAPLYPLTRPKVPFTWTEAHQEAFGRIKEALLSAPALALPDLTKPFALYVDEKEGVARGVLTQTLGPWRRPVAYLSKKLDPVASGWPTCLKAIAAVALLLKDADKLTLGQNVLVIAPHNLESIVRQPPDRWMTNARMTHYQSLLLNERVSFAPPAILNPATLLPVESDDTPIHICSEILAEETGTRPDLRDQPLPGVPAWYTDGSSFIMDGRRQAGAAIVDNKRTVWASNLPEGTSAQKAELIALTQALRLAEGKSINIYTDSRYAFATAHVHGAIYKQRGWLTSAGKDIKNKEEILALLEAIHLPKRVAIIHCPGHQRGTDPVATGNRKADEAAKQAAQSTRILTETTKNAGKRTADGSEFEKRTADGSEFESPKKKAKVE

SEQ ID NO: 1620 - protein, 2127 aa, synthetic construct
MPAAKRVKLDGGDKKYSIGLDIGTNSVGWAVITDEYKVPSKKFKVLGNTDRHSIKKNLIGALLFDSGETAEATRLKRTARRRYTRRKNRICYLQEIFSNEMAKVDDSFFHRLEESFLVEEDKKHERHPIFGNIVDEVAYHEKYPTIYHLRKKLVDSTDKADLRLIYLALAHMIKFRGHFLIEGDLNPDNSDVDKLFIQLVQTYNQLFEENPINASGVDAKAILSARLSKSRRLENLIAQLPGEKKNGLFGNLIALSLGLTPNFKSNFDLAEDAKLQLSKDTYDDDLDNLLAQIGDQYADLFLAAKNLSDAILLSDILRVNTEITKAPLSASMIKRYDEHHQDLTLLKALVRQQLPEKYKEIFFDQSKNGYAGYIDGGASQEEFYKFIKPILEKMDGTEELLVKLNREDLLRKQRTFDNGSIPHQIHLGELHAILRRQEDFYPFLKDNREKIEKILTFRIPYYVGPLARGNSRFAWMTRKSEETITPWNFEEVVDKGASAQSFIERMTNFDKNLPNEKVLPKHSLLYEYFTVYNELTKVKYVTEGMRKPAFLSGEQKKAIVDLLFKTNRKVTVKQLKEDYFKKIECFDSVEISGVEDRFNASLGTYHDLLKIIKDKDFLDNEENEDILEDIVLTLTLFEDREMIEERLKTYAHLFDDKVMKQLKRRRYTGWGRLSRKLINGIRDKQSGKTILDFLKSDGFANRNFMQLIHDDSLTFKEDIQKAQVSGQGDSLHEHIANLAGSPAIKKGILQTVKVVDELVKVMGRHKPENIVIEMARENQTTQKGQKNSRERMKRIEEGIKELGSQILKEHPVENTQLQNEKLYLYYLQNGRDMYVDQELDINRLSDYDVDHIVPQSFLKDDSIDNKVLTRSDKARGKSDNVPSEEVVKKMKNYWRQLLNAKLITQRKFDNLTKAERGGLSELDKAGFIKRQLVETRQITKHVAQILDSRMNTKYDENDKLIREVKVITLKSKLVSDFRKDFQFYKVREINNYHHAHDAYLNAVVGTALIKKYPKLESEFVYGDYKVYDVRKMIAKSEQEIGKATAKYFFYSNIMNFFKTEITLANGEIRKRPLIETNGETGEIVWDKGRDFATVRKVLSMPQVNIVKKTEVQTGGFSKESILPKRNSDKLIARKKDWDPKKYGGFDSPTVAYSVLVVAKVEKGKSKKLKSVKELLGITIMERSSFEKNPIDFLEAKGYKEVKKDLIIKLPKYSLFELENGRKRMLASAGELQKGNELALPSKYVNFLYLASHYEKLKGSPEDNEQKQLFVEQHKHYLDEIIEQISEFSKRVILADANLDKVLSAYNKHRDKPIREQAENIIHLFTLTNLGAPAAFKYFDTTIDRKRYTSTKEVLDATLIHQSITGLYETRIDLSQLGGDGGGGSPAPEAAAKGGLLGRDLLTKLKAQIQFSTEGPQVTWEDRPAMCLVLNLEEEYRLHEKPVPPSIDPSWLQLFPMVWAEKAGMGLANQVPPVVVELKSDASPVAVRQYPMSKEAREGIRPHIQRFLDLGILVPCQSPWNTPLLPVKKPGTNDYRPVQDLREVNKRVQDIHPTVPNPYNLLSSLPPSHTWYSVLDLKDAFFCLKLHPNSQPLFAFEWRDPEKGNTGQLTWTRLPQGFKNSPTLFNEALHRDLASFRALNPQVVMLQYVDDLLVAAPTYRDCKEGTRRLLQELSKLGYRVSAKKAQLCREEVTYLGYLLKGGKRWLTPARKATVMKIPTPTTPRQVREFLGTAGFCRLWIPGFASLAAPLYPLTRPKVPFTWTEAHQEAFGRIKEALLSAPALALPDLTKPFALYVDEKEGVARGVLTQTLGPWRRPVAYLSKKLDPVASGWPTCLKAIAAVALLLKDADKLTLGQNVLVIAPHNLESIVRQPPDRWMTNARMTHYQSLLLNERVSFAPPAILNPATLLPVESDDTPIHICSEILAEETGTRPDLRDQPLPGVPAWYTDGSSFIMDGRRQAGAAIVDNKRTVWASNLPEGTSAQKAELIALTQALRLAEGKSINIYTDSRYAFATAHVHGAIYKQRGWLTSAGKDIKNKEEILALLEAIHLPKRVAIIHCPGHQRGTDPVATGNRKADEAAKQAAQSTRILTETTKNAGKRTADGSEFEKRTADGSEFESPKKKAKVE

SEQ ID NO: 1621 - protein, 2146 aa, synthetic construct
MPAAKRVKLDGGDKKYSIGLDIGTNSVGWAVITDEYKVPSKKFKVLGNTDRHSIKKNLIGALLFDSGETAEATRLKRTARRRYTRRKNRICYLQEIFSNEMAKVDDSFFHRLEESFLVEEDKKHERHPIFGNIVDEVAYHEKYPTIYHLRKKLVDSTDKADLRLIYLALAHMIKFRGHFLIEGDLNPDNSDVDKLFIQLVQTYNQLFEENPINASGVDAKAILSARLSKSRRLENLIAQLPGEKKNGLFGNLIALSLGLTPNFKSNFDLAEDAKLQLSKDTYDDDLDNLLAQIGDQYADLFLAAKNLSDAILLSDILRVNTEITKAPLSASMIKRYDEHHQDLTLLKALVRQQLPEKYKEIFFDQSKNGYAGYIDGGASQEEFYKFIKPILEKMDGTEELLVKLNREDLLRKQRTFDNGSIPHQIHLGELHAILRRQEDFYPFLKDNREKIEKILTFRIPYYVGPLARGNSRFAWMTRKSEETITPWNFEEVVDKGASAQSFIERMTNFDKNLPNEKVLPKHSLLYEYFTVYNELTKVKYVTEGMRKPAFLSGEQKKAIVDLLFKTNRKVTVKQLKEDYFKKIECFDSVEISGVEDRFNASLGTYHDLLKIIKDKDFLDNEENEDILEDIVLTLTLFEDREMIEERLKTYAHLFDDKVMKQLKRRRYTGWGRLSRKLINGIRDKQSGKTILDFLKSDGFANRNFMQLIHDDSLTFKEDIQKAQVSGQGDSLHEHIANLAGSPAIKKGILQTVKVVDELVKVMGRHKPENIVIEMARENQTTQKGQKNSRERMKRIEEGIKELGSQILKEHPVENTQLQNEKLYLYYLQNGRDMYVDQELDINRLSDYDVDHIVPQSFLKDDSIDNKVLTRSDKARGKSDNVPSEEVVKKMKNYWRQLLNAKLITQRKFDNLTKAERGGLSELDKAGFIKRQLVETRQITKHVAQILDSRMNTKYDENDKLIREVKVITLKSKLVSDFRKDFQFYKVREINNYHHAHDAYLNAVVGTALIKKYPKLESEFVYGDYKVYDVRKMIAKSEQEIGKATAKYFFYSNIMNFFKTEITLANGEIRKRPLIETNGETGEIVWDKGRDFATVRKVLSMPQVNIVKKTEVQTGGFSKESILPKRNSDKLIARKKDWDPKKYGGFDSPTVAYSVLVVAKVEKGKSKKLKSVKELLGITIMERSSFEKNPIDFLEAKGYKEVKKDLIIKLPKYSLFELENGRKRMLASAGELQKGNELALPSKYVNFLYLASHYEKLKGSPEDNEQKQLFVEQHKHYLDEIIEQISEFSKRVILADANLDKVLSAYNKHRDKPIREQAENIIHLFTLTNLGAPAAFKYFDTTIDRKRYTSTKEVLDATLIHQSITGLYETRIDLSQLGGDGGEAAAKEAAAKEAAAKEAAAKEAAAKEAAAKGGLLGRDLLTKLKAQIQFSTEGPQVTWEDRPAMCLVLNLEEEYRLHEKPVPPSIDPSWLQLFPMVWAEKAGMGLANQVPPVVVELKSDASPVAVRQYPMSKEAREGIRPHIQRFLDLGILVPCQSPWNTPLLPVKKPGTNDYRPVQDLREVNKRVQDIHPTVPNPYNLLSSLPPSHTWYSVLDLKDAFFCLKLHPNSQPLFAFEWRDPEKGNTGQLTWTRLPQGFKNSPTLFNEALHRDLASFRALNPQVVMLQYVDDLLVAAPTYRDCKEGTRRLLQELSKLGYRVSAKKAQLCREEVTYLGYLLKGGKRWLTPARKATVMKIPTPTTPRQVREFLGTAGFCRLWIPGFASLAAPLYPLTRPKVPFTWTEAHQEAFGRIKEALLSAPALALPDLTKPFALYVDEKEGVARGVLTQTLGPWRRPVAYLSKKLDPVASGWPTCLKAIAAVALLLKDADKLTLGQNVLVIAPHNLESIVRQPPDRWMTNARMTHYQSLLLNERVSFAPPAILNPATLLPVESDDTPIHICSEILAEETGTRPDLRDQPLPGVPAWYTDGSSFIMDGRRQAGAAIVDNKRTVWASNLPEGTSAQKAELIALTQALRLAEGKSINIYTDSRYAFATAHVHGAIYKQRGWLTSAGKDIKNKEEILALLEAIHLPKRVAIIHCPGHQRGTDPVATGNRKADEAAKQAAQSTRILTETTKNAGKRTADGSEFEKRTADGSEFESPKKKAKVE

SEQ ID NO: 1622 - protein, 2162 aa, synthetic construct
MPAAKRVKLDGGDKKYSIGLDIGTNSVGWAVITDEYKVPSKKFKVLGNTDRHSIKKNLIGALLFDSGETAEATRLKRTARRRYTRRKNRICYLQEIFSNEMAKVDDSFFHRLEESFLVEEDKKHERHPIFGNIVDEVAYHEKYPTIYHLRKKLVDSTDKADLRLIYLALAHMIKFRGHFLIEGDLNPDNSDVDKLFIQLVQTYNQLFEENPINASGVDAKAILSARLSKSRRLENLIAQLPGEKKNGLFGNLIALSLGLTPNFKSNFDLAEDAKLQLSKDTYDDDLDNLLAQIGDQYADLFLAAKNLSDAILLSDILRVNTEITKAPLSASMIKRYDEHHQDLTLLKALVRQQLPEKYKEIFFDQSKNGYAGYIDGGASQEEFYKFIKPILEKMDGTEELLVKLNREDLLRKQRTFDNGSIPHQIHLGELHAILRRQEDFYPFLKDNREKIEKILTFRIPYYVGPLARGNSRFAWMTRKSEETITPWNFEEVVDKGASAQSFIERMTNFDKNLPNEKVLPKHSLLYEYFTVYNELTKVKYVTEGMRKPAFLSGEQKKAIVDLLFKTNRKVTVKQLKEDYFKKIECFDSVEISGVEDRFNASLGTYHDLLKIIKDKDFLDNEENEDILEDIVLTLTLFEDREMIEERLKTYAHLFDDKVMKQLKRRRYTGWGRLSRKLINGIRDKQSGKTILDFLKSDGFANRNFMQLIHDDSLTFKEDIQKAQVSGQGDSLHEHIANLAGSPAIKKGILQTVKVVDELVKVMGRHKPENIVIEMARENQTTQKGQKNSRERMKRIEEGIKELGSQILKEHPVENTQLQNEKLYLYYLQNGRDMYVDQELDINRLSDYDVDHIVPQSFLKDDSIDNKVLTRSDKARGKSDNVPSEEVVKKMKNYWRQLLNAKLITQRKFDNLTKAERGGLSELDKAGFIKRQLVETRQITKHVAQILDSRMNTKYDENDKLIREVKVITLKSKLVSDFRKDFQFYKVREINNYHHAHDAYLNAVVGTALIKKYPKLESEFVYGDYKVYDVRKMIAKSEQEIGKATAKYFFYSNIMNFFKTEITLANGEIRKRPLIETNGETGEIVWDKGRDFATVRKVLSMPQVNIVKKTEVQTGGFSKESILPKRNSDKLIARKKDWDPKKYGGFDSPTVAYSVLVVAKVEKGKSKKLKSVKELLGITIMERSSFEKNPIDFLEAKGYKEVKKDLIIKLPKYSLFELENGRKRMLASAGELQKGNELALPSKYVNFLYLASHYEKLKGSPEDNEQKQLFVEQHKHYLDEIIEQISEFSKRVILADANLDKVLSAYNKHRDKPIREQAENIIHLFTLTNLGAPAAFKYFDTTIDRKRYTSTKEVLDATLIHQSITGLYETRIDLSQLGGDGGAEAAAKEAAAKEAAAKEAAAKALEAEAAAKEAAAKEAAAKEAAAKAGGLLGRDLLTKLKAQIQFSTEGPQVTWEDRPAMCLVLNLEEEYRLHEKPVPPSIDPSWLQLFPMVWAEKAGMGLANQVPPVVVELKSDASPVAVRQYPMSKEAREGIRPHIQRFLDLGILVPCQSPWNTPLLPVKKPGTNDYRPVQDLREVNKRVQDIHPTVPNPYNLLSSLPPSHTWYSVLDLKDAFFCLKLHPNSQPLFAFEWRDPEKGNTGQLTWTRLPQGFKNSPTLFNEALHRDLASFRALNPQVVMLQYVDDLLVAAPTYRDCKEGTRRLLQELSKLGYRVSAKKAQLCREEVTYLGYLLKGGKRWLTPARKATVMKIPTPTTPRQVREFLGTAGFCRLWIPGFASLAAPLYPLTRPKVPFTWTEAHQEAFGRIKEALLSAPALALPDLTKPFALYVDEKEGVARGVLTQTLGPWRRPVAYLSKKLDPVASGWPTCLKAIAAVALLLKDADKLTLGQNVLVIAPHNLESIVRQPPDRWMTNARMTHYQSLLLNERVSFAPPAILNPATLLPVESDDTPIHICSEILAEETGTRPDLRDQPLPGVPAWYTDGSSFIMDGRRQAGAAIVDNKRTVWASNLPEGTSAQKAELIALTQALRLAEGKSINIYTDSRYAFATAHVHGAIYKQRGWLTSAGKDIKNKEEILALLEAIHLPKRVAIIHCPGHQRGTDPVATGNRKADEAAKQAAQSTRILTETTKNAGKRTADGSEFEKRTADGSEFESPKKKAKVE

SEQ ID NO: 1623 - protein, 2127 aa, synthetic construct
MPAAKRVKLDGGDKKYSIGLDIGTNSVGWAVITDEYKVPSKKFKVLGNTDRHSIKKNLIGALLFDSGETAEATRLKRTARRRYTRRKNRICYLQEIFSNEMAKVDDSFFHRLEESFLVEEDKKHERHPIFGNIVDEVAYHEKYPTIYHLRKKLVDSTDKADLRLIYLALAHMIKFRGHFLIEGDLNPDNSDVDKLFIQLVQTYNQLFEENPINASGVDAKAILSARLSKSRRLENLIAQLPGEKKNGLFGNLIALSLGLTPNFKSNFDLAEDAKLQLSKDTYDDDLDNLLAQIGDQYADLFLAAKNLSDAILLSDILRVNTEITKAPLSASMIKRYDEHHQDLTLLKALVRQQLPEKYKEIFFDQSKNGYAGYIDGGASQEEFYKFIKPILEKMDGTEELLVKLNREDLLRKQRTFDNGSIPHQIHLGELHAILRRQEDFYPFLKDNREKIEKILTFRIPYYVGPLARGNSRFAWMTRKSEETITPWNFEEVVDKGASAQSFIERMTNFDKNLPNEKVLPKHSLLYEYFTVYNELTKVKYVTEGMRKPAFLSGEQKKAIVDLLFKTNRKVTVKQLKEDYFKKIECFDSVEISGVEDRFNASLGTYHDLLKIIKDKDFLDNEENEDILEDIVLTLTLFEDREMIEERLKTYAHLFDDKVMKQLKRRRYTGWGRLSRKLINGIRDKQSGKTILDFLKSDGFANRNFMQLIHDDSLTFKEDIQKAQVSGQGDSLHEHIANLAGSPAIKKGILQTVKVVDELVKVMGRHKPENIVIEMARENQTTQKGQKNSRERMKRIEEGIKELGSQILKEHPVENTQLQNEKLYLYYLQNGRDMYVDQELDINRLSDYDVDHIVPQSFLKDDSIDNKVLTRSDKARGKSDNVPSEEVVKKMKNYWRQLLNAKLITQRKFDNLTKAERGGLSELDKAGFIKRQLVETRQITKHVAQILDSRMNTKYDENDKLIREVKVITLKSKLVSDFRKDFQFYKVREINNYHHAHDAYLNAVVGTALIKKYPKLESEFVYGDYKVYDVRKMIAKSEQEIGKATAKYFFYSNIMNFFKTEITLANGEIRKRPLIETNGETGEIVWDKGRDFATVRKVLSMPQVNIVKKTEVQTGGFSKESILPKRNSDKLIARKKDWDPKKYGGFDSPTVAYSVLVVAKVEKGKSKKLKSVKELLGITIMERSSFEKNPIDFLEAKGYKEVKKDLIIKLPKYSLFELENGRKRMLASAGELQKGNELALPSKYVNFLYLASHYEKLKGSPEDNEQKQLFVEQHKHYLDEIIEQISEFSKRVILADANLDKVLSAYNKHRDKPIREQAENIIHLFTLTNLGAPAAFKYFDTTIDRKRYTSTKEVLDATLIHQSITGLYETRIDLSQLGGDGGGSSEAAAKGGSGGLLGRDLLTKLKAQIQFSTEGPQVTWEDRPAMCLVLNLEEEYRLHEKPVPPSIDPSWLQLFPMVWAEKAGMGLANQVPPVVVELKSDASPVAVRQYPMSKEAREGIRPHIQRFLDLGILVPCQSPWNTPLLPVKKPGTNDYRPVQDLREVNKRVQDIHPTVPNPYNLLSSLPPSHTWYSVLDLKDAFFCLKLHPNSQPLFAFEWRDPEKGNTGQLTWTRLPQGFKNSPTLFNEALHRDLASFRALNPQVVMLQYVDDLLVAAPTYRDCKEGTRRLLQELSKLGYRVSAKKAQLCREEVTYLGYLLKGGKRWLTPARKATVMKIPTPTTPRQVREFLGTAGFCRLWIPGFASLAAPLYPLTRPKVPFTWTEAHQEAFGRIKEALLSAPALALPDLTKPFALYVDEKEGVARGVLTQTLGPWRRPVAYLSKKLDPVASGWPTCLKAIAAVALLLKDADKLTLGQNVLVIAPHNLESIVRQPPDRWMTNARMTHYQSLLLNERVSFAPPAILNPATLLPVESDDTPIHICSEILAEETGTRPDLRDQPLPGVPAWYTDGSSFIMDGRRQAGAAIVDNKRTVWASNLPEGTSAQKAELIALTQALRLAEGKSINIYTDSRYAFATAHVHGAIYKQRGWLTSAGKDIKNKEEILALLEAIHLPKRVAIIHCPGHQRGTDPVATGNRKADEAAKQAAQSTRILTETTKNAGKRTADGSEFEKRTADGSEFESPKKKAKVE

SEQ ID NO: 1624 - protein, 2127 aa, synthetic construct
MPAAKRVKLDGGDKKYSIGLDIGTNSVGWAVITDEYKVPSKKFKVLGNTDRHSIKKNLIGALLFDSGETAEATRLKRTARRRYTRRKNRICYLQEIFSNEMAKVDDSFFHRLEESFLVEEDKKHERHPIFGNIVDEVAYHEKYPTIYHLRKKLVDSTDKADLRLIYLALAHMIKFRGHFLIEGDLNPDNSDVDKLFIQLVQTYNQLFEENPINASGVDAKAILSARLSKSRRLENLIAQLPGEKKNGLFGNLIALSLGLTPNFKSNFDLAEDAKLQLSKDTYDDDLDNLLAQIGDQYADLFLAAKNLSDAILLSDILRVNTEITKAPLSASMIKRYDEHHQDLTLLKALVRQQLPEKYKEIFFDQSKNGYAGYIDGGASQEEFYKFIKPILEKMDGTEELLVKLNREDLLRKQRTFDNGSIPHQIHLGELHAILRRQEDFYPFLKDNREKIEKILTFRIPYYVGPLARGNSRFAWMTRKSEETITPWNFEEVVDKGASAQSFIERMTNFDKNLPNEKVLPKHSLLYEYFTVYNELTKVKYVTEGMRKPAFLSGEQKKAIVDLLFKTNRKVTVKQLKEDYFKKIECFDSVEISGVEDRFNASLGTYHDLLKIIKDKDFLDNEENEDILEDIVLTLTLFEDREMIEERLKTYAHLFDDKVMKQLKRRRYTGWGRLSRKLINGIRDKQSGKTILDFLKSDGFANRNFMQLIHDDSLTFKEDIQKAQVSGQGDSLHEHIANLAGSPAIKKGILQTVKVVDELVKVMGRHKPENIVIEMARENQTTQKGQKNSRERMKRIEEGIKELGSQILKEHPVENTQLQNEKLYLYYLQNGRDMYVDQELDINRLSDYDVDHIVPQSFLKDDSIDNKVLTRSDKARGKSDNVPSEEVVKKMKNYWRQLLNAKLITQRKFDNLTKAERGGLSELDKAGFIKRQLVETRQITKHVAQILDSRMNTKYDENDKLIREVKVITLKSKLVSDFRKDFQFYKVREINNYHHAHDAYLNAVVGTALIKKYPKLESEFVYGDYKVYDVRKMIAKSEQEIGKATAKYFFYSNIMNFFKTEITLANGEIRKRPLIETNGETGEIVWDKGRDFATVRKVLSMPQVNIVKKTEVQTGGFSKESILPKRNSDKLIARKKDWDPKKYGGFDSPTVAYSVLVVAKVEKGKSKKLKSVKELLGITIMERSSFEKNPIDFLEAKGYKEVKKDLIIKLPKYSLFELENGRKRMLASAGELQKGNELALPSKYVNFLYLASHYEKLKGSPEDNEQKQLFVEQHKHYLDEIIEQISEFSKRVILADANLDKVLSAYNKHRDKPIREQAENIIHLFTLTNLGAPAAFKYFDTTIDRKRYTSTKEVLDATLIHQSITGLYETRIDLSQLGGDGGEAAAKGSSPAPGGLLGRDLLTKLKAQIQFSTEGPQVTWEDRPAMCLVLNLEEEYRLHEKPVPPSIDPSWLQLFPMVWAEKAGMGLANQVPPVVVELKSDASPVAVRQYPMSKEAREGIRPHIQRFLDLGILVPCQSPWNTPLLPVKKPGTNDYRPVQDLREVNKRVQDIHPTVPNPYNLLSSLPPSHTWYSVLDLKDAFFCLKLHPNSQPLFAFEWRDPEKGNTGQLTWTRLPQGFKNSPTLFNEALHRDLASFRALNPQVVMLQYVDDLLVAAPTYRDCKEGTRRLLQELSKLGYRVSAKKAQLCREEVTYLGYLLKGGKRWLTPARKATVMKIPTPTTPRQVREFLGTAGFCRLWIPGFASLAAPLYPLTRPKVPFTWTEAHQEAFGRIKEALLSAPALALPDLTKPFALYVDEKEGVARGVLTQTLGPWRRPVAYLSKKLDPVASGWPTCLKAIAAVALLLKDADKLTLGQNVLVIAPHNLESIVRQPPDRWMTNARMTHYQSLLLNERVSFAPPAILNPATLLPVESDDTPIHICSEILAEETGTRPDLRDQPLPGVPAWYTDGSSFIMDGRRQAGAAIVDNKRTVWASNLPEGTSAQKAELIALTQALRLAEGKSINIYTDSRYAFATAHVHGAIYKQRGWLTSAGKDIKNKEEILALLEAIHLPKRVAIIHCPGHQRGTDPVATGNRKADEAAKQAAQSTRILTETTKNAGKRTADGSEFEKRTADGSEFESPKKKAKVE

SEQ ID NO: 1625 - protein, 2122 aa, synthetic construct
MPAAKRVKLDGGDKKYSIGLDIGTNSVGWAVITDEYKVPSKKFKVLGNTDRHSIKKNLIGALLFDSGETAEATRLKRTARRRYTRRKNRICYLQEIFSNEMAKVDDSFFHRLEESFLVEEDKKHERHPIFGNIVDEVAYHEKYPTIYHLRKKLVDSTDKADLRLIYLALAHMIKFRGHFLIEGDLNPDNSDVDKLFIQLVQTYNQLFEENPINASGVDAKAILSARLSKSRRLENLIAQLPGEKKNGLFGNLIALSLGLTPNFKSNFDLAEDAKLQLSKDTYDDDLDNLLAQIGDQYADLFLAAKNLSDAILLSDILRVNTEITKAPLSASMIKRYDEHHQDLTLLKALVRQQLPEKYKEIFFDQSKNGYAGYIDGGASQEEFYKFIKPILEKMDGTEELLVKLNREDLLRKQRTFDNGSIPHQIHLGELHAILRRQEDFYPFLKDNREKIEKILTFRIPYYVGPLARGNSRFAWMTRKSEETITPWNFEEVVDKGASAQSFIERMTNFDKNLPNEKVLPKHSLLYEYFTVYNELTKVKYVTEGMRKPAFLSGEQKKAIVDLLFKTNRKVTVKQLKEDYFKKIECFDSVEISGVEDRFNASLGTYHDLLKIIKDKDFLDNEENEDILEDIVLTLTLFEDREMIEERLKTYAHLFDDKVMKQLKRRRYTGWGRLSRKLINGIRDKQSGKTILDFLKSDGFANRNFMQLIHDDSLTFKEDIQKAQVSGQGDSLHEHIANLAGSPAIKKGILQTVKVVDELVKVMGRHKPENIVIEMARENQTTQKGQKNSRERMKRIEEGIKELGSQILKEHPVENTQLQNEKLYLYYLQNGRDMYVDQELDINRLSDYDVDHIVPQSFLKDDSIDNKVLTRSDKARGKSDNVPSEEVVKKMKNYWRQLLNAKLITQRKFDNLTKAERGGLSELDKAGFIKRQLVETRQITKHVAQILDSRMNTKYDENDKLIREVKVITLKSKLVSDFRKDFQFYKVREINNYHHAHDAYLNAVVGTALIKKYPKLESEFVYGDYKVYDVRKMIAKSEQEIGKATAKYFFYSNIMNFFKTEITLANGEIRKRPLIETNGETGEIVWDKGRDFATVRKVLSMPQVNIVKKTEVQTGGFSKESILPKRNSDKLIARKKDWDPKKYGGFDSPTVAYSVLVVAKVEKGKSKKLKSVKELLGITIMERSSFEKNPIDFLEAKGYKEVKKDLIIKLPKYSLFELENGRKRMLASAGELQKGNELALPSKYVNFLYLASHYEKLKGSPEDNEQKQLFVEQHKHYLDEIIEQISEFSKRVILADANLDKVLSAYNKHRDKPIREQAENIIHLFTLTNLGAPAAFKYFDTTIDRKRYTSTKEVLDATLIHQSITGLYETRIDLSQLGGDGGGSSGSSGGLLGRDLLTKLKAQIQFSTEGPQVTWEDRPAMCLVLNLEEEYRLHEKPVPPSIDPSWLQLFPMVWAEKAGMGLANQVPPVVVELKSDASPVAVRQYPMSKEAREGIRPHIQRFLDLGILVPCQSPWNTPLLPVKKPGTNDYRPVQDLREVNKRVQDIHPTVPNPYNLLSSLPPSHTWYSVLDLKDAFFCLKLHPNSQPLFAFEWRDPEKGNTGQLTWTRLPQGFKNSPTLFNEALHRDLASFRALNPQVVMLQYVDDLLVAAPTYRDCKEGTRRLLQELSKLGYRVSAKKAQLCREEVTYLGYLLKGGKRWLTPARKATVMKIPTPTTPRQVREFLGTAGFCRLWIPGFASLAAPLYPLTRPKVPFTWTEAHQEAFGRIKEALLSAPALALPDLTKPFALYVDEKEGVARGVLTQTLGPWRRPVAYLSKKLDPVASGWPTCLKAIAAVALLLKDADKLTLGQNVLVIAPHNLESIVRQPPDRWMTNARMTHYQSLLLNERVSFAPPAILNPATLLPVESDDTPIHICSEILAEETGTRPDLRDQPLPGVPAWYTDGSSFIMDGRRQAGAAIVDNKRTVWASNLPEGTSAQKAELIALTQALRLAEGKSINIYTDSRYAFATAHVHGAIYKQRGWLTSAGKDIKNKEEILALLEAIHLPKRVAIIHCPGHQRGTDPVATGNRKADEAAKQAAQSTRILTETTKNAGKRTADGSEFEKRTADGSEFESPKKKAKVE

SEQ ID NO: 1626 - protein, 2122 aa, synthetic construct
MPAAKRVKLDGGDKKYSIGLDIGTNSVGWAVITDEYKVPSKKFKVLGNTDRHSIKKNLIGALLFDSGETAEATRLKRTARRRYTRRKNRICYLQEIFSNEMAKVDDSFFHRLEESFLVEEDKKHERHPIFGNIVDEVAYHEKYPTIYHLRKKLVDSTDKADLRLIYLALAHMIKFRGHFLIEGDLNPDNSDVDKLFIQLVQTYNQLFEENPINASGVDAKAILSARLSKSRRLENLIAQLPGEKKNGLFGNLIALSLGLTPNFKSNFDLAEDAKLQLSKDTYDDDLDNLLAQIGDQYADLFLAAKNLSDAILLSDILRVNTEITKAPLSASMIKRYDEHHQDLTLLKALVRQQLPEKYKEIFFDQSKNGYAGYIDGGASQEEFYKFIKPILEKMDGTEELLVKLNREDLLRKQRTFDNGSIPHQIHLGELHAILRRQEDFYPFLKDNREKIEKILTFRIPYYVGPLARGNSRFAWMTRKSEETITPWNFEEVVDKGASAQSFIERMTNFDKNLPNEKVLPKHSLLYEYFTVYNELTKVKYVTEGMRKPAFLSGEQKKAIVDLLFKTNRKVTVKQLKEDYFKKIECFDSVEISGVEDRFNASLGTYHDLLKIIKDKDFLDNEENEDILEDIVLTLTLFEDREMIEERLKTYAHLFDDKVMKQLKRRRYTGWGRLSRKLINGIRDKQSGKTILDFLKSDGFANRNFMQLIHDDSLTFKEDIQKAQVSGQGDSLHEHIANLAGSPAIKKGILQTVKVVDELVKVMGRHKPENIVIEMARENQTTQKGQKNSRERMKRIEEGIKELGSQILKEHPVENTQLQNEKLYLYYLQNGRDMYVDQELDINRLSDYDVDHIVPQSFLKDDSIDNKVLTRSDKARGKSDNVPSEEVVKKMKNYWRQLLNAKLITQRKFDNLTKAERGGLSELDKAGFIKRQLVETRQITKHVAQILDSRMNTKYDENDKLIREVKVITLKSKLVSDFRKDFQFYKVREINNYHHAHDAYLNAVVGTALIKKYPKLESEFVYGDYKVYDVRKMIAKSEQEIGKATAKYFFYSNIMNFFKTEITLANGEIRKRPLIETNGETGEIVWDKGRDFATVRKVLSMPQVNIVKKTEVQTGGFSKESILPKRNSDKLIARKKDWDPKKYGGFDSPTVAYSVLVVAKVEKGKSKKLKSVKELLGITIMERSSFEKNPIDFLEAKGYKEVKKDLIIKLPKYSLFELENGRKRMLASAGELQKGNELALPSKYVNFLYLASHYEKLKGSPEDNEQKQLFVEQHKHYLDEIIEQISEFSKRVILADANLDKVLSAYNKHRDKPIREQAENIIHLFTLTNLGAPAAFKYFDTTIDRKRYTSTKEVLDATLIHQSITGLYETRIDLSQLGGDGGGGSGGGGGLLGRDLLTKLKAQIQFSTEGPQVTWEDRPAMCLVLNLEEEYRLHEKPVPPSIDPSWLQLFPMVWAEKAGMGLANQVPPVVVELKSDASPVAVRQYPMSKEAREGIRPHIQRFLDLGILVPCQSPWNTPLLPVKKPGTNDYRPVQDLREVNKRVQDIHPTVPNPYNLLSSLPPSHTWYSVLDLKDAFFCLKLHPNSQPLFAFEWRDPEKGNTGQLTWTRLPQGFKNSPTLFNEALHRDLASFRALNPQVVMLQYVDDLLVAAPTYRDCKEGTRRLLQELSKLGYRVSAKKAQLCREEVTYLGYLLKGGKRWLTPARKATVMKIPTPTTPRQVREFLGTAGFCRLWIPGFASLAAPLYPLTRPKVPFTWTEAHQEAFGRIKEALLSAPALALPDLTKPFALYVDEKEGVARGVLTQTLGPWRRPVAYLSKKLDPVASGWPTCLKAIAAVALLLKDADKLTLGQNVLVIAPHNLESIVRQPPDRWMTNARMTHYQSLLLNERVSFAPPAILNPATLLPVESDDTPIHICSEILAEETGTRPDLRDQPLPGVPAWYTDGSSFIMDGRRQAGAAIVDNKRTVWASNLPEGTSAQKAELIALTQALRLAEGKSINIYTDSRYAFATAHVHGAIYKQRGWLTSAGKDIKNKEEILALLEAIHLPKRVAIIHCPGHQRGTDPVATGNRKADEAAKQAAQSTRILTETTKNAGKRTADGSEFEKRTADGSEFESPKKKAKVE

SEQ ID NO: 1627 - protein, 2122 aa, synthetic construct
MPAAKRVKLDGGDKKYSIGLDIGTNSVGWAVITDEYKVPSKKFKVLGNTDRHSIKKNLIGALLFDSGETAEATRLKRTARRRYTRRKNRICYLQEIFSNEMAKVDDSFFHRLEESFLVEEDKKHERHPIFGNIVDEVAYHEKYPTIYHLRKKLVDSTDKADLRLIYLALAHMIKFRGHFLIEGDLNPDNSDVDKLFIQLVQTYNQLFEENPINASGVDAKAILSARLSKSRRLENLIAQLPGEKKNGLFGNLIALSLGLTPNFKSNFDLAEDAKLQLSKDTYDDDLDNLLAQIGDQYADLFLAAKNLSDAILLSDILRVNTEITKAPLSASMIKRYDEHHQDLTLLKALVRQQLPEKYKEIFFDQSKNGYAGYIDGGASQEEFYKFIKPILEKMDGTEELLVKLNREDLLRKQRTFDNGSIPHQIHLGELHAILRRQEDFYPFLKDNREKIEKILTFRIPYYVGPLARGNSRFAWMTRKSEETITPWNFEEVVDKGASAQSFIERMTNFDKNLPNEKVLPKHSLLYEYFTVYNELTKVKYVTEGMRKPAFLSGEQKKAIVDLLFKTNRKVTVKQLKEDYFKKIECFDSVEISGVEDRFNASLGTYHDLLKIIKDKDFLDNEENEDILEDIVLTLTLFEDREMIEERLKTYAHLFDDKVMKQLKRRRYTGWGRLSRKLINGIRDKQSGKTILDFLKSDGFANRNFMQLIHDDSLTFKEDIQKAQVSGQGDSLHEHIANLAGSPAIKKGILQTVKVVDELVKVMGRHKPENIVIEMARENQTTQKGQKNSRERMKRIEEGIKELGSQILKEHPVENTQLQNEKLYLYYLQNGRDMYVDQELDINRLSDYDVDHIVPQSFLKDDSIDNKVLTRSDKARGKSDNVPSEEVVKKMKNYWRQLLNAKLITQRKFDNLTKAERGGLSELDKAGFIKRQLVETRQITKHVAQILDSRMNTKYDENDKLIREVKVITLKSKLVSDFRKDFQFYKVREINNYHHAHDAYLNAVVGTALIKKYPKLESEFVYGDYKVYDVRKMIAKSEQEIGKATAKYFFYSNIMNFFKTEITLANGEIRKRPLIETNGETGEIVWDKGRDFATVRKVLSMPQVNIVKKTEVQTGGFSKESILPKRNSDKLIARKKDWDPKKYGGFDSPTVAYSVLVVAKVEKGKSKKLKSVKELLGITIMERSSFEKNPIDFLEAKGYKEVKKDLIIKLPKYSLFELENGRKRMLASAGELQKGNELALPSKYVNFLYLASHYEKLKGSPEDNEQKQLFVEQHKHYLDEIIEQISEFSKRVILADANLDKVLSAYNKHRDKPIREQAENIIHLFTLTNLGAPAAFKYFDTTIDRKRYTSTKEVLDATLIHQSITGLYETRIDLSQLGGDGGPAPGSSGGLLGRDLLTKLKAQIQFSTEGPQVTWEDRPAMCLVLNLEEEYRLHEKPVPPSIDPSWLQLFPMVWAEKAGMGLANQVPPVVVELKSDASPVAVRQYPMSKEAREGIRPHIQRFLDLGILVPCQSPWNTPLLPVKKPGTNDYRPVQDLREVNKRVQDIHPTVPNPYNLLSSLPPSHTWYSVLDLKDAFFCLKLHPNSQPLFAFEWRDPEKGNTGQLTWTRLPQGFKNSPTLFNEALHRDLASFRALNPQVVMLQYVDDLLVAAPTYRDCKEGTRRLLQELSKLGYRVSAKKAQLCREEVTYLGYLLKGGKRWLTPARKATVMKIPTPTTPRQVREFLGTAGFCRLWIPGFASLAAPLYPLTRPKVPFTWTEAHQEAFGRIKEALLSAPALALPDLTKPFALYVDEKEGVARGVLTQTLGPWRRPVAYLSKKLDPVASGWPTCLKAIAAVALLLKDADKLTLGQNVLVIAPHNLESIVRQPPDRWMTNARMTHYQSLLLNERVSFAPPAILNPATLLPVESDDTPIHICSEILAEETGTRPDLRDQPLPGVPAWYTDGSSFIMDGRRQAGAAIVDNKRTVWASNLPEGTSAQKAELIALTQALRLAEGKSINIYTDSRYAFATAHVHGAIYKQRGWLTSAGKDIKNKEEILALLEAIHLPKRVAIIHCPGHQRGTDPVATGNRKADEAAKQAAQSTRILTETTKNAGKRTADGSEFEKRTADGSEFESPKKKAKVE

SEQ ID NO: 1628 - protein, 2122 aa, synthetic construct
MPAAKRVKLDGGDKKYSIGLDIGTNSVGWAVITDEYKVPSKKFKVLGNTDRHSIKKNLIGALLFDSGETAEATRLKRTARRRYTRRKNRICYLQEIFSNEMAKVDDSFFHRLEESFLVEEDKKHERHPIFGNIVDEVAYHEKYPTIYHLRKKLVDSTDKADLRLIYLALAHMIKFRGHFLIEGDLNPDNSDVDKLFIQLVQTYNQLFEENPINASGVDAKAILSARLSKSRRLENLIAQLPGEKKNGLFGNLIALSLGLTPNFKSNFDLAEDAKLQLSKDTYDDDLDNLLAQIGDQYADLFLAAKNLSDAILLSDILRVNTEITKAPLSASMIKRYDEHHQDLTLLKALVRQQLPEKYKEIFFDQSKNGYAGYIDGGASQEEFYKFIKPILEKMDGTEELLVKLNREDLLRKQRTFDNGSIPHQIHLGELHAILRRQEDFYPFLKDNREKIEKILTFRIPYYVGPLARGNSRFAWMTRKSEETITPWNFEEVVDKGASAQSFIERMTNFDKNLPNEKVLPKHSLLYEYFTVYNELTKVKYVTEGMRKPAFLSGEQKKAIVDLLFKTNRKVTVKQLKEDYFKKIECFDSVEISGVEDRFNASLGTYHDLLKIIKDKDFLDNEENEDILEDIVLTLTLFEDREMIEERLKTYAHLFDDKVMKQLKRRRYTGWGRLSRKLINGIRDKQSGKTILDFLKSDGFANRNFMQLIHDDSLTFKEDIQKAQVSGQGDSLHEHIANLAGSPAIKKGILQTVKVVDELVKVMGRHKPENIVIEMARENQTTQKGQKNSRERMKRIEEGIKELGSQILKEHPVENTQLQNEKLYLYYLQNGRDMYVDQELDINRLSDYDVDHIVPQSFLKDDSIDNKVLTRSDKARGKSDNVPSEEVVKKMKNYWRQLLNAKLITQRKFDNLTKAERGGLSELDKAGFIKRQLVETRQITKHVAQILDSRMNTKYDENDKLIREVKVITLKSKLVSDFRKDFQFYKVREINNYHHAHDAYLNAVVGTALIKKYPKLESEFVYGDYKVYDVRKMIAKSEQEIGKATAKYFFYSNIMNFFKTEITLANGEIRKRPLIETNGETGEIVWDKGRDFATVRKVLSMPQVNIVKKTEVQTGGFSKESILPKRNSDKLIARKKDWDPKKYGGFDSPTVAYSVLVVAKVEKGKSKKLKSVKELLGITIMERSSFEKNPIDFLEAKGYKEVKKDLIIKLPKYSLFELENGRKRMLASAGELQKGNELALPSKYVNFLYLASHYEKLKGSPEDNEQKQLFVEQHKHYLDEIIEQISEFSKRVILADANLDKVLSAYNKHRDKPIREQAENIIHLFTLTNLGAPAAFKYFDTTIDRKRYTSTKEVLDATLIHQSITGLYETRIDLSQLGGDGGGGGGGGGGLLGRDLLTKLKAQIQFSTEGPQVTWEDRPAMCLVLNLEEEYRLHEKPVPPSIDPSWLQLFPMVWAEKAGMGLANQVPPVVVELKSDASPVAVRQYPMSKEAREGIRPHIQRFLDLGILVPCQSPWNTPLLPVKKPGTNDYRPVQDLREVNKRVQDIHPTVPNPYNLLSSLPPSHTWYSVLDLKDAFFCLKLHPNSQPLFAFEWRDPEKGNTGQLTWTRLPQGFKNSPTLFNEALHRDLASFRALNPQVVMLQYVDDLLVAAPTYRDCKEGTRRLLQELSKLGYRVSAKKAQLCREEVTYLGYLLKGGKRWLTPARKATVMKIPTPTTPRQVREFLGTAGFCRLWIPGFASLAAPLYPLTRPKVPFTWTEAHQEAFGRIKEALLSAPALALPDLTKPFALYVDEKEGVARGVLTQTLGPWRRPVAYLSKKLDPVASGWPTCLKAIAAVALLLKDADKLTLGQNVLVIAPHNLESIVRQPPDRWMTNARMTHYQSLLLNERVSFAPPAILNPATLLPVESDDTPIHICSEILAEETGTRPDLRDQPLPGVPAWYTDGSSFIMDGRRQAGAAIVDNKRTVWASNLPEGTSAQKAELIALTQALRLAEGKSINIYTDSRYAFATAHVHGAIYKQRGWLTSAGKDIKNKEEILALLEAIHLPKRVAIIHCPGHQRGTDPVATGNRKADEAAKQAAQSTRILTETTKNAGKRTADGSEFEKRTADGSEFESPKKKAKVE

SEQ ID NO: 1629 - protein, 2124 aa, synthetic construct
MPAAKRVKLDGGDKKYSIGLDIGTNSVGWAVITDEYKVPSKKFKVLGNTDRHSIKKNLIGALLFDSGETAEATRLKRTARRRYTRRKNRICYLQEIFSNEMAKVDDSFFHRLEESFLVEEDKKHERHPIFGNIVDEVAYHEKYPTIYHLRKKLVDSTDKADLRLIYLALAHMIKFRGHFLIEGDLNPDNSDVDKLFIQLVQTYNQLFEENPINASGVDAKAILSARLSKSRRLENLIAQLPGEKKNGLFGNLIALSLGLTPNFKSNFDLAEDAKLQLSKDTYDDDLDNLLAQIGDQYADLFLAAKNLSDAILLSDILRVNTEITKAPLSASMIKRYDEHHQDLTLLKALVRQQLPEKYKEIFFDQSKNGYAGYIDGGASQEEFYKFIKPILEKMDGTEELLVKLNREDLLRKQRTFDNGSIPHQIHLGELHAILRRQEDFYPFLKDNREKIEKILTFRIPYYVGPLARGNSRFAWMTRKSEETITPWNFEEVVDKGASAQSFIERMTNFDKNLPNEKVLPKHSLLYEYFTVYNELTKVKYVTEGMRKPAFLSGEQKKAIVDLLFKTNRKVTVKQLKEDYFKKIECFDSVEISGVEDRFNASLGTYHDLLKIIKDKDFLDNEENEDILEDIVLTLTLFEDREMIEERLKTYAHLFDDKVMKQLKRRRYTGWGRLSRKLINGIRDKQSGKTILDFLKSDGFANRNFMQLIHDDSLTFKEDIQKAQVSGQGDSLHEHIANLAGSPAIKKGILQTVKVVDELVKVMGRHKPENIVIEMARENQTTQKGQKNSRERMKRIEEGIKELGSQILKEHPVENTQLQNEKLYLYYLQNGRDMYVDQELDINRLSDYDVDHIVPQSFLKDDSIDNKVLTRSDKARGKSDNVPSEEVVKKMKNYWRQLLNAKLITQRKFDNLTKAERGGLSELDKAGFIKRQLVETRQITKHVAQILDSRMNTKYDENDKLIREVKVITLKSKLVSDFRKDFQFYKVREINNYHHAHDAYLNAVVGTALIKKYPKLESEFVYGDYKVYDVRKMIAKSEQEIGKATAKYFFYSNIMNFFKTEITLANGEIRKRPLIETNGETGEIVWDKGRDFATVRKVLSMPQVNIVKKTEVQTGGFSKESILPKRNSDKLIARKKDWDPKKYGGFDSPTVAYSVLVVAKVEKGKSKKLKSVKELLGITIMERSSFEKNPIDFLEAKGYKEVKKDLIIKLPKYSLFELENGRKRMLASAGELQKGNELALPSKYVNFLYLASHYEKLKGSPEDNEQKQLFVEQHKHYLDEIIEQISEFSKRVILADANLDKVLSAYNKHRDKPIREQAENIIHLFTLTNLGAPAAFKYFDTTIDRKRYTSTKEVLDATLIHQSITGLYETRIDLSQLGGDGGGGGEAAAKGGLLGRDLLTKLKAQIQFSTEGPQVTWEDRPAMCLVLNLEEEYRLHEKPVPPSIDPSWLQLFPMVWAEKAGMGLANQVPPVVVELKSDASPVAVRQYPMSKEAREGIRPHIQRFLDLGILVPCQSPWNTPLLPVKKPGTNDYRPVQDLREVNKRVQDIHPTVPNPYNLLSSLPPSHTWYSVLDLKDAFFCLKLHPNSQPLFAFEWRDPEKGNTGQLTWTRLPQGFKNSPTLFNEALHRDLASFRALNPQVVMLQYVDDLLVAAPTYRDCKEGTRRLLQELSKLGYRVSAKKAQLCREEVTYLGYLLKGGKRWLTPARKATVMKIPTPTTPRQVREFLGTAGFCRLWIPGFASLAAPLYPLTRPKVPFTWTEAHQEAFGRIKEALLSAPALALPDLTKPFALYVDEKEGVARGVLTQTLGPWRRPVAYLSKKLDPVASGWPTCLKAIAAVALLLKDADKLTLGQNVLVIAPHNLESIVRQPPDRWMTNARMTHYQSLLLNERVSFAPPAILNPATLLPVESDDTPIHICSEILAEETGTRPDLRDQPLPGVPAWYTDGSSFIMDGRRQAGAAIVDNKRTVWASNLPEGTSAQKAELIALTQALRLAEGKSINIYTDSRYAFATAHVHGAIYKQRGWLTSAGKDIKNKEEILALLEAIHLPKRVAIIHCPGHQRGTDPVATGNRKADEAAKQAAQSTRILTETTKNAGKRTADGSEFEKRTADGSEFESPKKKAKVE

SEQ ID NO: 1630 - protein, 2124 aa, synthetic construct
MPAAKRVKLDGGDKKYSIGLDIGTNSVGWAVITDEYKVPSKKFKVLGNTDRHSIKKNLIGALLFDSGETAEATRLKRTARRRYTRRKNRICYLQEIFSNEMAKVDDSFFHRLEESFLVEEDKKHERHPIFGNIVDEVAYHEKYPTIYHLRKKLVDSTDKADLRLIYLALAHMIKFRGHFLIEGDLNPDNSDVDKLFIQLVQTYNQLFEENPINASGVDAKAILSARLSKSRRLENLIAQLPGEKKNGLFGNLIALSLGLTPNFKSNFDLAEDAKLQLSKDTYDDDLDNLLAQIGDQYADLFLAAKNLSDAILLSDILRVNTEITKAPLSASMIKRYDEHHQDLTLLKALVRQQLPEKYKEIFFDQSKNGYAGYIDGGASQEEFYKFIKPILEKMDGTEELLVKLNREDLLRKQRTFDNGSIPHQIHLGELHAILRRQEDFYPFLKDNREKIEKILTFRIPYYVGPLARGNSRFAWMTRKSEETITPWNFEEVVDKGASAQSFIERMTNFDKNLPNEKVLPKHSLLYEYFTVYNELTKVKYVTEGMRKPAFLSGEQKKAIVDLLFKTNRKVTVKQLKEDYFKKIECFDSVEISGVEDRFNASLGTYHDLLKIIKDKDFLDNEENEDILEDIVLTLTLFEDREMIEERLKTYAHLFDDKVMKQLKRRRYTGWGRLSRKLINGIRDKQSGKTILDFLKSDGFANRNFMQLIHDDSLTFKEDIQKAQVSGQGDSLHEHIANLAGSPAIKKGILQTVKVVDELVKVMGRHKPENIVIEMARENQTTQKGQKNSRERMKRIEEGIKELGSQILKEHPVENTQLQNEKLYLYYLQNGRDMYVDQELDINRLSDYDVDHIVPQSFLKDDSIDNKVLTRSDKARGKSDNVPSEEVVKKMKNYWRQLLNAKLITQRKFDNLTKAERGGLSELDKAGFIKRQLVETRQITKHVAQILDSRMNTKYDENDKLIREVKVITLKSKLVSDFRKDFQFYKVREINNYHHAHDAYLNAVVGTALIKKYPKLESEFVYGDYKVYDVRKMIAKSEQEIGKATAKYFFYSNIMNFFKTEITLANGEIRKRPLIETNGETGEIVWDKGRDFATVRKVLSMPQVNIVKKTEVQTGGFSKESILPKRNSDKLIARKKDWDPKKYGGFDSPTVAYSVLVVAKVEKGKSKKLKSVKELLGITIMERSSFEKNPIDFLEAKGYKEVKKDLIIKLPKYSLFELENGRKRMLASAGELQKGNELALPSKYVNFLYLASHYEKLKGSPEDNEQKQLFVEQHKHYLDEIIEQISEFSKRVILADANLDKVLSAYNKHRDKPIREQAENIIHLFTLTNLGAPAAFKYFDTTIDRKRYTSTKEVLDATLIHQSITGLYETRIDLSQLGGDGGEAAAKGSSGGLLGRDLLTKLKAQIQFSTEGPQVTWEDRPAMCLVLNLEEEYRLHEKPVPPSIDPSWLQLFPMVWAEKAGMGLANQVPPVVVELKSDASPVAVRQYPMSKEAREGIRPHIQRFLDLGILVPCQSPWNTPLLPVKKPGTNDYRPVQDLREVNKRVQDIHPTVPNPYNLLSSLPPSHTWYSVLDLKDAFFCLKLHPNSQPLFAFEWRDPEKGNTGQLTWTRLPQGFKNSPTLFNEALHRDLASFRALNPQVVMLQYVDDLLVAAPTYRDCKEGTRRLLQELSKLGYRVSAKKAQLCREEVTYLGYLLKGGKRWLTPARKATVMKIPTPTTPRQVREFLGTAGFCRLWIPGFASLAAPLYPLTRPKVPFTWTEAHQEAFGRIKEALLSAPALALPDLTKPFALYVDEKEGVARGVLTQTLGPWRRPVAYLSKKLDPVASGWPTCLKAIAAVALLLKDADKLTLGQNVLVIAPHNLESIVRQPPDRWMTNARMTHYQSLLLNERVSFAPPAILNPATLLPVESDDTPIHICSEILAEETGTRPDLRDQPLPGVPAWYTDGSSFIMDGRRQAGAAIVDNKRTVWASNLPEGTSAQKAELIALTQALRLAEGKSINIYTDSRYAFATAHVHGAIYKQRGWLTSAGKDIKNKEEILALLEAIHLPKRVAIIHCPGHQRGTDPVATGNRKADEAAKQAAQSTRILTETTKNAGKRTADGSEFEKRTADGSEFESPKKKAKVE

SEQ ID NO: 1631 - protein, 2119 aa, synthetic construct
MPAAKRVKLDGGDKKYSIGLDIGTNSVGWAVITDEYKVPSKKFKVLGNTDRHSIKKNLIGALLFDSGETAEATRLKRTARRRYTRRKNRICYLQEIFSNEMAKVDDSFFHRLEESFLVEEDKKHERHPIFGNIVDEVAYHEKYPTIYHLRKKLVDSTDKADLRLIYLALAHMIKFRGHFLIEGDLNPDNSDVDKLFIQLVQTYNQLFEENPINASGVDAKAILSARLSKSRRLENLIAQLPGEKKNGLFGNLIALSLGLTPNFKSNFDLAEDAKLQLSKDTYDDDLDNLLAQIGDQYADLFLAAKNLSDAILLSDILRVNTEITKAPLSASMIKRYDEHHQDLTLLKALVRQQLPEKYKEIFFDQSKNGYAGYIDGGASQEEFYKFIKPILEKMDGTEELLVKLNREDLLRKQRTFDNGSIPHQIHLGELHAILRRQEDFYPFLKDNREKIEKILTFRIPYYVGPLARGNSRFAWMTRKSEETITPWNFEEVVDKGASAQSFIERMTNFDKNLPNEKVLPKHSLLYEYFTVYNELTKVKYVTEGMRKPAFLSGEQKKAIVDLLFKTNRKVTVKQLKEDYFKKIECFDSVEISGVEDRFNASLGTYHDLLKIIKDKDFLDNEENEDILEDIVLTLTLFEDREMIEERLKTYAHLFDDKVMKQLKRRRYTGWGRLSRKLINGIRDKQSGKTILDFLKSDGFANRNFMQLIHDDSLTFKEDIQKAQVSGQGDSLHEHIANLAGSPAIKKGILQTVKVVDELVKVMGRHKPENIVIEMARENQTTQKGQKNSRERMKRIEEGIKELGSQILKEHPVENTQLQNEKLYLYYLQNGRDMYVDQELDINRLSDYDVDHIVPQSFLKDDSIDNKVLTRSDKARGKSDNVPSEEVVKKMKNYWRQLLNAKLITQRKFDNLTKAERGGLSELDKAGFIKRQLVETRQITKHVAQILDSRMNTKYDENDKLIREVKVITLKSKLVSDFRKDFQFYKVREINNYHHAHDAYLNAVVGTALIKKYPKLESEFVYGDYKVYDVRKMIAKSEQEIGKATAKYFFYSNIMNFFKTEITLANGEIRKRPLIETNGETGEIVWDKGRDFATVRKVLSMPQVNIVKKTEVQTGGFSKESILPKRNSDKLIARKKDWDPKKYGGFDSPTVAYSVLVVAKVEKGKSKKLKSVKELLGITIMERSSFEKNPIDFLEAKGYKEVKKDLIIKLPKYSLFELENGRKRMLASAGELQKGNELALPSKYVNFLYLASHYEKLKGSPEDNEQKQLFVEQHKHYLDEIIEQISEFSKRVILADANLDKVLSAYNKHRDKPIREQAENIIHLFTLTNLGAPAAFKYFDTTIDRKRYTSTKEVLDATLIHQSITGLYETRIDLSQLGGDGGPAPGGLLGRDLLTKLKAQIQFSTEGPQVTWEDRPAMCLVLNLEEEYRLHEKPVPPSIDPSWLQLFPMVWAEKAGMGLANQVPPVVVELKSDASPVAVRQYPMSKEAREGIRPHIQRFLDLGILVPCQSPWNTPLLPVKKPGTNDYRPVQDLREVNKRVQDIHPTVPNPYNLLSSLPPSHTWYSVLDLKDAFFCLKLHPNSQPLFAFEWRDPEKGNTGQLTWTRLPQGFKNSPTLFNEALHRDLASFRALNPQVVMLQYVDDLLVAAPTYRDCKEGTRRLLQELSKLGYRVSAKKAQLCREEVTYLGYLLKGGKRWLTPARKATVMKIPTPTTPRQVREFLGTAGFCRLWIPGFASLAAPLYPLTRPKVPFTWTEAHQEAFGRIKEALLSAPALALPDLTKPFALYVDEKEGVARGVLTQTLGPWRRPVAYLSKKLDPVASGWPTCLKAIAAVALLLKDADKLTLGQNVLVIAPHNLESIVRQPPDRWMTNARMTHYQSLLLNERVSFAPPAILNPATLLPVESDDTPIHICSEILAEETGTRPDLRDQPLPGVPAWYTDGSSFIMDGRRQAGAAIVDNKRTVWASNLPEGTSAQKAELIALTQALRLAEGKSINIYTDSRYAFATAHVHGAIYKQRGWLTSAGKDIKNKEEILALLEAIHLPKRVAIIHCPGHQRGTDPVATGNRKADEAAKQAAQSTRILTETTKNAGKRTADGSEFEKRTADGSEFESPKKKAKVE

SEQ ID NO: 1632 - protein, 2141 aa, synthetic construct
MPAAKRVKLDGGDKKYSIGLDIGTNSVGWAVITDEYKVPSKKFKVLGNTDRHSIKKNLIGALLFDSGETAEATRLKRTARRRYTRRKNRICYLQEIFSNEMAKVDDSFFHRLEESFLVEEDKKHERHPIFGNIVDEVAYHEKYPTIYHLRKKLVDSTDKADLRLIYLALAHMIKFRGHFLIEGDLNPDNSDVDKLFIQLVQTYNQLFEENPINASGVDAKAILSARLSKSRRLENLIAQLPGEKKNGLFGNLIALSLGLTPNFKSNFDLAEDAKLQLSKDTYDDDLDNLLAQIGDQYADLFLAAKNLSDAILLSDILRVNTEITKAPLSASMIKRYDEHHQDLTLLKALVRQQLPEKYKEIFFDQSKNGYAGYIDGGASQEEFYKFIKPILEKMDGTEELLVKLNREDLLRKQRTFDNGSIPHQIHLGELHAILRRQEDFYPFLKDNREKIEKILTFRIPYYVGPLARGNSRFAWMTRKSEETITPWNFEEVVDKGASAQSFIERMTNFDKNLPNEKVLPKHSLLYEYFTVYNELTKVKYVTEGMRKPAFLSGEQKKAIVDLLFKTNRKVTVKQLKEDYFKKIECFDSVEISGVEDRFNASLGTYHDLLKIIKDKDFLDNEENEDILEDIVLTLTLFEDREMIEERLKTYAHLFDDKVMKQLKRRRYTGWGRLSRKLINGIRDKQSGKTILDFLKSDGFANRNFMQLIHDDSLTFKEDIQKAQVSGQGDSLHEHIANLAGSPAIKKGILQTVKVVDELVKVMGRHKPENIVIEMARENQTTQKGQKNSRERMKRIEEGIKELGSQILKEHPVENTQLQNEKLYLYYLQNGRDMYVDQELDINRLSDYDVDHIVPQSFLKDDSIDNKVLTRSDKARGKSDNVPSEEVVKKMKNYWRQLLNAKLITQRKFDNLTKAERGGLSELDKAGFIKRQLVETRQITKHVAQILDSRMNTKYDENDKLIREVKVITLKSKLVSDFRKDFQFYKVREINNYHHAHDAYLNAVVGTALIKKYPKLESEFVYGDYKVYDVRKMIAKSEQEIGKATAKYFFYSNIMNFFKTEITLANGEIRKRPLIETNGETGEIVWDKGRDFATVRKVLSMPQVNIVKKTEVQTGGFSKESILPKRNSDKLIARKKDWDPKKYGGFDSPTVAYSVLVVAKVEKGKSKKLKSVKELLGITIMERSSFEKNPIDFLEAKGYKEVKKDLIIKLPKYSLFELENGRKRMLASAGELQKGNELALPSKYVNFLYLASHYEKLKGSPEDNEQKQLFVEQHKHYLDEIIEQISEFSKRVILADANLDKVLSAYNKHRDKPIREQAENIIHLFTLTNLGAPAAFKYFDTTIDRKRYTSTKEVLDATLIHQSITGLYETRIDLSQLGGDGGEAAAKEAAAKEAAAKEAAAKEAAAKGGLLGRDLLTKLKAQIQFSTEGPQVTWEDRPAMCLVLNLEEEYRLHEKPVPPSIDPSWLQLFPMVWAEKAGMGLANQVPPVVVELKSDASPVAVRQYPMSKEAREGIRPHIQRFLDLGILVPCQSPWNTPLLPVKKPGTNDYRPVQDLREVNKRVQDIHPTVPNPYNLLSSLPPSHTWYSVLDLKDAFFCLKLHPNSQPLFAFEWRDPEKGNTGQLTWTRLPQGFKNSPTLFNEALHRDLASFRALNPQVVMLQYVDDLLVAAPTYRDCKEGTRRLLQELSKLGYRVSAKKAQLCREEVTYLGYLLKGGKRWLTPARKATVMKIPTPTTPRQVREFLGTAGFCRLWIPGFASLAAPLYPLTRPKVPFTWTEAHQEAFGRIKEALLSAPALALPDLTKPFALYVDEKEGVARGVLTQTLGPWRRPVAYLSKKLDPVASGWPTCLKAIAAVALLLKDADKLTLGQNVLVIAPHNLESIVRQPPDRWMTNARMTHYQSLLLNERVSFAPPAILNPATLLPVESDDTPIHICSEILAEETGTRPDLRDQPLPGVPAWYTDGSSFIMDGRRQAGAAIVDNKRTVWASNLPEGTSAQKAELIALTQALRLAEGKSINIYTDSRYAFATAHVHGAIYKQRGWLTSAGKDIKNKEEILALLEAIHLPKRVAIIHCPGHQRGTDPVATGNRKADEAAKQAAQSTRILTETTKNAGKRTADGSEFEKRTADGSEFESPKKKAKVE

SEQ ID NO: 1633 - protein, 2122 aa, synthetic construct
MPAAKRVKLDGGDKKYSIGLDIGTNSVGWAVITDEYKVPSKKFKVLGNTDRHSIKKNLIGALLFDSGETAEATRLKRTARRRYTRRKNRICYLQEIFSNEMAKVDDSFFHRLEESFLVEEDKKHERHPIFGNIVDEVAYHEKYPTIYHLRKKLVDSTDKADLRLIYLALAHMIKFRGHFLIEGDLNPDNSDVDKLFIQLVQTYNQLFEENPINASGVDAKAILSARLSKSRRLENLIAQLPGEKKNGLFGNLIALSLGLTPNFKSNFDLAEDAKLQLSKDTYDDDLDNLLAQIGDQYADLFLAAKNLSDAILLSDILRVNTEITKAPLSASMIKRYDEHHQDLTLLKALVRQQLPEKYKEIFFDQSKNGYAGYIDGGASQEEFYKFIKPILEKMDGTEELLVKLNREDLLRKQRTFDNGSIPHQIHLGELHAILRRQEDFYPFLKDNREKIEKILTFRIPYYVGPLARGNSRFAWMTRKSEETITPWNFEEVVDKGASAQSFIERMTNFDKNLPNEKVLPKHSLLYEYFTVYNELTKVKYVTEGMRKPAFLSGEQKKAIVDLLFKTNRKVTVKQLKEDYFKKIECFDSVEISGVEDRFNASLGTYHDLLKIIKDKDFLDNEENEDILEDIVLTLTLFEDREMIEERLKTYAHLFDDKVMKQLKRRRYTGWGRLSRKLINGIRDKQSGKTILDFLKSDGFANRNFMQLIHDDSLTFKEDIQKAQVSGQGDSLHEHIANLAGSPAIKKGILQTVKVVDELVKVMGRHKPENIVIEMARENQTTQKGQKNSRERMKRIEEGIKELGSQILKEHPVENTQLQNEKLYLYYLQNGRDMYVDQELDINRLSDYDVDHIVPQSFLKDDSIDNKVLTRSDKARGKSDNVPSEEVVKKMKNYWRQLLNAKLITQRKFDNLTKAERGGLSELDKAGFIKRQLVETRQITKHVAQILDSRMNTKYDENDKLIREVKVITLKSKLVSDFRKDFQFYKVREINNYHHAHDAYLNAVVGTALIKKYPKLESEFVYGDYKVYDVRKMIAKSEQEIGKATAKYFFYSNIMNFFKTEITLANGEIRKRPLIETNGETGEIVWDKGRDFATVRKVLSMPQVNIVKKTEVQTGGFSKESILPKRNSDKLIARKKDWDPKKYGGFDSPTVAYSVLVVAKVEKGKSKKLKSVKELLGITIMERSSFEKNPIDFLEAKGYKEVKKDLIIKLPKYSLFELENGRKRMLASAGELQKGNELALPSKYVNFLYLASHYEKLKGSPEDNEQKQLFVEQHKHYLDEIIEQISEFSKRVILADANLDKVLSAYNKHRDKPIREQAENIIHLFTLTNLGAPAAFKYFDTTIDRKRYTSTKEVLDATLIHQSITGLYETRIDLSQLGGDGGGGGPAPGGLLGRDLLTKLKAQIQFSTEGPQVTWEDRPAMCLVLNLEEEYRLHEKPVPPSIDPSWLQLFPMVWAEKAGMGLANQVPPVVVELKSDASPVAVRQYPMSKEAREGIRPHIQRFLDLGILVPCQSPWNTPLLPVKKPGTNDYRPVQDLREVNKRVQDIHPTVPNPYNLLSSLPPSHTWYSVLDLKDAFFCLKLHPNSQPLFAFEWRDPEKGNTGQLTWTRLPQGFKNSPTLFNEALHRDLASFRALNPQVVMLQYVDDLLVAAPTYRDCKEGTRRLLQELSKLGYRVSAKKAQLCREEVTYLGYLLKGGKRWLTPARKATVMKIPTPTTPRQVREFLGTAGFCRLWIPGFASLAAPLYPLTRPKVPFTWTEAHQEAFGRIKEALLSAPALALPDLTKPFALYVDEKEGVARGVLTQTLGPWRRPVAYLSKKLDPVASGWPTCLKAIAAVALLLKDADKLTLGQNVLVIAPHNLESIVRQPPDRWMTNARMTHYQSLLLNERVSFAPPAILNPATLLPVESDDTPIHICSEILAEETGTRPDLRDQPLPGVPAWYTDGSSFIMDGRRQAGAAIVDNKRTVWASNLPEGTSAQKAELIALTQALRLAEGKSINIYTDSRYAFATAHVHGAIYKQRGWLTSAGKDIKNKEEILALLEAIHLPKRVAIIHCPGHQRGTDPVATGNRKADEAAKQAAQSTRILTETTKNAGKRTADGSEFEKRTADGSEFESPKKKAKVE

SEQ ID NO: 1634 - protein, 2127 aa, synthetic construct
MPAAKRVKLDGGDKKYSIGLDIGTNSVGWAVITDEYKVPSKKFKVLGNTDRHSIKKNLIGALLFDSGETAEATRLKRTARRRYTRRKNRICYLQEIFSNEMAKVDDSFFHRLEESFLVEEDKKHERHPIFGNIVDEVAYHEKYPTIYHLRKKLVDSTDKADLRLIYLALAHMIKFRGHFLIEGDLNPDNSDVDKLFIQLVQTYNQLFEENPINASGVDAKAILSARLSKSRRLENLIAQLPGEKKNGLFGNLIALSLGLTPNFKSNFDLAEDAKLQLSKDTYDDDLDNLLAQIGDQYADLFLAAKNLSDAILLSDILRVNTEITKAPLSASMIKRYDEHHQDLTLLKALVRQQLPEKYKEIFFDQSKNGYAGYIDGGASQEEFYKFIKPILEKMDGTEELLVKLNREDLLRKQRTFDNGSIPHQIHLGELHAILRRQEDFYPFLKDNREKIEKILTFRIPYYVGPLARGNSRFAWMTRKSEETITPWNFEEVVDKGASAQSFIERMTNFDKNLPNEKVLPKHSLLYEYFTVYNELTKVKYVTEGMRKPAFLSGEQKKAIVDLLFKTNRKVTVKQLKEDYFKKIECFDSVEISGVEDRFNASLGTYHDLLKIIKDKDFLDNEENEDILEDIVLTLTLFEDREMIEERLKTYAHLFDDKVMKQLKRRRYTGWGRLSRKLINGIRDKQSGKTILDFLKSDGFANRNFMQLIHDDSLTFKEDIQKAQVSGQGDSLHEHIANLAGSPAIKKGILQTVKVVDELVKVMGRHKPENIVIEMARENQTTQKGQKNSRERMKRIEEGIKELGSQILKEHPVENTQLQNEKLYLYYLQNGRDMYVDQELDINRLSDYDVDHIVPQSFLKDDSIDNKVLTRSDKARGKSDNVPSEEVVKKMKNYWRQLLNAKLITQRKFDNLTKAERGGLSELDKAGFIKRQLVETRQITKHVAQILDSRMNTKYDENDKLIREVKVITLKSKLVSDFRKDFQFYKVREINNYHHAHDAYLNAVVGTALIKKYPKLESEFVYGDYKVYDVRKMIAKSEQEIGKATAKYFFYSNIMNFFKTEITLANGEIRKRPLIETNGETGEIVWDKGRDFATVRKVLSMPQVNIVKKTEVQTGGFSKESILPKRNSDKLIARKKDWDPKKYGGFDSPTVAYSVLVVAKVEKGKSKKLKSVKELLGITIMERSSFEKNPIDFLEAKGYKEVKKDLIIKLPKYSLFELENGRKRMLASAGELQKGNELALPSKYVNFLYLASHYEKLKGSPEDNEQKQLFVEQHKHYLDEIIEQISEFSKRVILADANLDKVLSAYNKHRDKPIREQAENIIHLFTLTNLGAPAAFKYFDTTIDRKRYTSTKEVLDATLIHQSITGLYETRIDLSQLGGDGGGSSEAAAKGGGGGLLGRDLLTKLKAQIQFSTEGPQVTWEDRPAMCLVLNLEEEYRLHEKPVPPSIDPSWLQLFPMVWAEKAGMGLANQVPPVVVELKSDASPVAVRQYPMSKEAREGIRPHIQRFLDLGILVPCQSPWNTPLLPVKKPGTNDYRPVQDLREVNKRVQDIHPTVPNPYNLLSSLPPSHTWYSVLDLKDAFFCLKLHPNSQPLFAFEWRDPEKGNTGQLTWTRLPQGFKNSPTLFNEALHRDLASFRALNPQVVMLQYVDDLLVAAPTYRDCKEGTRRLLQELSKLGYRVSAKKAQLCREEVTYLGYLLKGGKRWLTPARKATVMKIPTPTTPRQVREFLGTAGFCRLWIPGFASLAAPLYPLTRPKVPFTWTEAHQEAFGRIKEALLSAPALALPDLTKPFALYVDEKEGVARGVLTQTLGPWRRPVAYLSKKLDPVASGWPTCLKAIAAVALLLKDADKLTLGQNVLVIAPHNLESIVRQPPDRWMTNARMTHYQSLLLNERVSFAPPAILNPATLLPVESDDTPIHICSEILAEETGTRPDLRDQPLPGVPAWYTDGSSFIMDGRRQAGAAIVDNKRTVWASNLPEGTSAQKAELIALTQALRLAEGKSINIYTDSRYAFATAHVHGAIYKQRGWLTSAGKDIKNKEEILALLEAIHLPKRVAIIHCPGHQRGTDPVATGNRKADEAAKQAAQSTRILTETTKNAGKRTADGSEFEKRTADGSEFESPKKKAKVE

SEQ ID NO: 1635 - protein, 2131 aa, synthetic construct
MPAAKRVKLDGGDKKYSIGLDIGTNSVGWAVITDEYKVPSKKFKVLGNTDRHSIKKNLIGALLFDSGETAEATRLKRTARRRYTRRKNRICYLQEIFSNEMAKVDDSFFHRLEESFLVEEDKKHERHPIFGNIVDEVAYHEKYPTIYHLRKKLVDSTDKADLRLIYLALAHMIKFRGHFLIEGDLNPDNSDVDKLFIQLVQTYNQLFEENPINASGVDAKAILSARLSKSRRLENLIAQLPGEKKNGLFGNLIALSLGLTPNFKSNFDLAEDAKLQLSKDTYDDDLDNLLAQIGDQYADLFLAAKNLSDAILLSDILRVNTEITKAPLSASMIKRYDEHHQDLTLLKALVRQQLPEKYKEIFFDQSKNGYAGYIDGGASQEEFYKFIKPILEKMDGTEELLVKLNREDLLRKQRTFDNGSIPHQIHLGELHAILRRQEDFYPFLKDNREKIEKILTFRIPYYVGPLARGNSRFAWMTRKSEETITPWNFEEVVDKGASAQSFIERMTNFDKNLPNEKVLPKHSLLYEYFTVYNELTKVKYVTEGMRKPAFLSGEQKKAIVDLLFKTNRKVTVKQLKEDYFKKIECFDSVEISGVEDRFNASLGTYHDLLKIIKDKDFLDNEENEDILEDIVLTLTLFEDREMIEERLKTYAHLFDDKVMKQLKRRRYTGWGRLSRKLINGIRDKQSGKTILDFLKSDGFANRNFMQLIHDDSLTFKEDIQKAQVSGQGDSLHEHIANLAGSPAIKKGILQTVKVVDELVKVMGRHKPENIVIEMARENQTTQKGQKNSRERMKRIEEGIKELGSQILKEHPVENTQLQNEKLYLYYLQNGRDMYVDQELDINRLSDYDVDHIVPQSFLKDDSIDNKVLTRSDKARGKSDNVPSEEVVKKMKNYWRQLLNAKLITQRKFDNLTKAERGGLSELDKAGFIKRQLVETRQITKHVAQILDSRMNTKYDENDKLIREVKVITLKSKLVSDFRKDFQFYKVREINNYHHAHDAYLNAVVGTALIKKYPKLESEFVYGDYKVYDVRKMIAKSEQEIGKATAKYFFYSNIMNFFKTEITLANGEIRKRPLIETNGETGEIVWDKGRDFATVRKVLSMPQVNIVKKTEVQTGGFSKESILPKRNSDKLIARKKDWDPKKYGGFDSPTVAYSVLVVAKVEKGKSKKLKSVKELLGITIMERSSFEKNPIDFLEAKGYKEVKKDLIIKLPKYSLFELENGRKRMLASAGELQKGNELALPSKYVNFLYLASHYEKLKGSPEDNEQKQLFVEQHKHYLDEIIEQISEFSKRVILADANLDKVLSAYNKHRDKPIREQAENIIHLFTLTNLGAPAAFKYFDTTIDRKRYTSTKEVLDATLIHQSITGLYETRIDLSQLGGDGGGGGGSEAAAKGGGGSGGLLGRDLLTKLKAQIQFSTEGPQVTWEDRPAMCLVLNLEEEYRLHEKPVPPSIDPSWLQLFPMVWAEKAGMGLANQVPPVVVELKSDASPVAVRQYPMSKEAREGIRPHIQRFLDLGILVPCQSPWNTPLLPVKKPGTNDYRPVQDLREVNKRVQDIHPTVPNPYNLLSSLPPSHTWYSVLDLKDAFFCLKLHPNSQPLFAFEWRDPEKGNTGQLTWTRLPQGFKNSPTLFNEALHRDLASFRALNPQVVMLQYVDDLLVAAPTYRDCKEGTRRLLQELSKLGYRVSAKKAQLCREEVTYLGYLLKGGKRWLTPARKATVMKIPTPTTPRQVREFLGTAGFCRLWIPGFASLAAPLYPLTRPKVPFTWTEAHQEAFGRIKEALLSAPALALPDLTKPFALYVDEKEGVARGVLTQTLGPWRRPVAYLSKKLDPVASGWPTCLKAIAAVALLLKDADKLTLGQNVLVIAPHNLESIVRQPPDRWMTNARMTHYQSLLLNERVSFAPPAILNPATLLPVESDDTPIHICSEILAEETGTRPDLRDQPLPGVPAWYTDGSSFIMDGRRQAGAAIVDNKRTVWASNLPEGTSAQKAELIALTQALRLAEGKSINIYTDSRYAFATAHVHGAIYKQRGWLTSAGKDIKNKEEILALLEAIHLPKRVAIIHCPGHQRGTDPVATGNRKADEAAKQAAQSTRILTETTKNAGKRTADGSEFEKRTADGSEFESPKKKAKVE

SEQ ID NO: 1636 - protein, 2122 aa, synthetic construct
MPAAKRVKLDGGDKKYSIGLDIGTNSVGWAVITDEYKVPSKKFKVLGNTDRHSIKKNLIGALLFDSGETAEATRLKRTARRRYTRRKNRICYLQEIFSNEMAKVDDSFFHRLEESFLVEEDKKHERHPIFGNIVDEVAYHEKYPTIYHLRKKLVDSTDKADLRLIYLALAHMIKFRGHFLIEGDLNPDNSDVDKLFIQLVQTYNQLFEENPINASGVDAKAILSARLSKSRRLENLIAQLPGEKKNGLFGNLIALSLGLTPNFKSNFDLAEDAKLQLSKDTYDDDLDNLLAQIGDQYADLFLAAKNLSDAILLSDILRVNTEITKAPLSASMIKRYDEHHQDLTLLKALVRQQLPEKYKEIFFDQSKNGYAGYIDGGASQEEFYKFIKPILEKMDGTEELLVKLNREDLLRKQRTFDNGSIPHQIHLGELHAILRRQEDFYPFLKDNREKIEKILTFRIPYYVGPLARGNSRFAWMTRKSEETITPWNFEEVVDKGASAQSFIERMTNFDKNLPNEKVLPKHSLLYEYFTVYNELTKVKYVTEGMRKPAFLSGEQKKAIVDLLFKTNRKVTVKQLKEDYFKKIECFDSVEISGVEDRFNASLGTYHDLLKIIKDKDFLDNEENEDILEDIVLTLTLFEDREMIEERLKTYAHLFDDKVMKQLKRRRYTGWGRLSRKLINGIRDKQSGKTILDFLKSDGFANRNFMQLIHDDSLTFKEDIQKAQVSGQGDSLHEHIANLAGSPAIKKGILQTVKVVDELVKVMGRHKPENIVIEMARENQTTQKGQKNSRERMKRIEEGIKELGSQILKEHPVENTQLQNEKLYLYYLQNGRDMYVDQELDINRLSDYDVDHIVPQSFLKDDSIDNKVLTRSDKARGKSDNVPSEEVVKKMKNYWRQLLNAKLITQRKFDNLTKAERGGLSELDKAGFIKRQLVETRQITKHVAQILDSRMNTKYDENDKLIREVKVITLKSKLVSDFRKDFQFYKVREINNYHHAHDAYLNAVVGTALIKKYPKLESEFVYGDYKVYDVRKMIAKSEQEIGKATAKYFFYSNIMNFFKTEITLANGEIRKRPLIETNGETGEIVWDKGRDFATVRKVLSMPQVNIVKKTEVQTGGFSKESILPKRNSDKLIARKKDWDPKKYGGFDSPTVAYSVLVVAKVEKGKSKKLKSVKELLGITIMERSSFEKNPIDFLEAKGYKEVKKDLIIKLPKYSLFELENGRKRMLASAGELQKGNELALPSKYVNFLYLASHYEKLKGSPEDNEQKQLFVEQHKHYLDEIIEQISEFSKRVILADANLDKVLSAYNKHRDKPIREQAENIIHLFTLTNLGAPAAFKYFDTTIDRKRYTSTKEVLDATLIHQSITGLYETRIDLSQLGGDGGPAPGGSGGLLGRDLLTKLKAQIQFSTEGPQVTWEDRPAMCLVLNLEEEYRLHEKPVPPSIDPSWLQLFPMVWAEKAGMGLANQVPPVVVELKSDASPVAVRQYPMSKEAREGIRPHIQRFLDLGILVPCQSPWNTPLLPVKKPGTNDYRPVQDLREVNKRVQDIHPTVPNPYNLLSSLPPSHTWYSVLDLKDAFFCLKLHPNSQPLFAFEWRDPEKGNTGQLTWTRLPQGFKNSPTLFNEALHRDLASFRALNPQVVMLQYVDDLLVAAPTYRDCKEGTRRLLQELSKLGYRVSAKKAQLCREEVTYLGYLLKGGKRWLTPARKATVMKIPTPTTPRQVREFLGTAGFCRLWIPGFASLAAPLYPLTRPKVPFTWTEAHQEAFGRIKEALLSAPALALPDLTKPFALYVDEKEGVARGVLTQTLGPWRRPVAYLSKKLDPVASGWPTCLKAIAAVALLLKDADKLTLGQNVLVIAPHNLESIVRQPPDRWMTNARMTHYQSLLLNERVSFAPPAILNPATLLPVESDDTPIHICSEILAEETGTRPDLRDQPLPGVPAWYTDGSSFIMDGRRQAGAAIVDNKRTVWASNLPEGTSAQKAELIALTQALRLAEGKSINIYTDSRYAFATAHVHGAIYKQRGWLTSAGKDIKNKEEILALLEAIHLPKRVAIIHCPGHQRGTDPVATGNRKADEAAKQAAQSTRILTETTKNAGKRTADGSEFEKRTADGSEFESPKKKAKVE

SEQ ID NO: 1637 - protein, 2122 aa, synthetic construct
MPAAKRVKLDGGDKKYSIGLDIGTNSVGWAVITDEYKVPSKKFKVLGNTDRHSIKKNLIGALLFDSGETAEATRLKRTARRRYTRRKNRICYLQEIFSNEMAKVDDSFFHRLEESFLVEEDKKHERHPIFGNIVDEVAYHEKYPTIYHLRKKLVDSTDKADLRLIYLALAHMIKFRGHFLIEGDLNPDNSDVDKLFIQLVQTYNQLFEENPINASGVDAKAILSARLSKSRRLENLIAQLPGEKKNGLFGNLIALSLGLTPNFKSNFDLAEDAKLQLSKDTYDDDLDNLLAQIGDQYADLFLAAKNLSDAILLSDILRVNTEITKAPLSASMIKRYDEHHQDLTLLKALVRQQLPEKYKEIFFDQSKNGYAGYIDGGASQEEFYKFIKPILEKMDGTEELLVKLNREDLLRKQRTFDNGSIPHQIHLGELHAILRRQEDFYPFLKDNREKIEKILTFRIPYYVGPLARGNSRFAWMTRKSEETITPWNFEEVVDKGASAQSFIERMTNFDKNLPNEKVLPKHSLLYEYFTVYNELTKVKYVTEGMRKPAFLSGEQKKAIVDLLFKTNRKVTVKQLKEDYFKKIECFDSVEISGVEDRFNASLGTYHDLLKIIKDKDFLDNEENEDILEDIVLTLTLFEDREMIEERLKTYAHLFDDKVMKQLKRRRYTGWGRLSRKLINGIRDKQSGKTILDFLKSDGFANRNFMQLIHDDSLTFKEDIQKAQVSGQGDSLHEHIANLAGSPAIKKGILQTVKVVDELVKVMGRHKPENIVIEMARENQTTQKGQKNSRERMKRIEEGIKELGSQILKEHPVENTQLQNEKLYLYYLQNGRDMYVDQELDINRLSDYDVDHIVPQSFLKDDSIDNKVLTRSDKARGKSDNVPSEEVVKKMKNYWRQLLNAKLITQRKFDNLTKAERGGLSELDKAGFIKRQLVETRQITKHVAQILDSRMNTKYDENDKLIREVKVITLKSKLVSDFRKDFQFYKVREINNYHHAHDAYLNAVVGTALIKKYPKLESEFVYGDYKVYDVRKMIAKSEQEIGKATAKYFFYSNIMNFFKTEITLANGEIRKRPLIETNGETGEIVWDKGRDFATVRKVLSMPQVNIVKKTEVQTGGFSKESILPKRNSDKLIARKKDWDPKKYGGFDSPTVAYSVLVVAKVEKGKSKKLKSVKELLGITIMERSSFEKNPIDFLEAKGYKEVKKDLIIKLPKYSLFELENGRKRMLASAGELQKGNELALPSKYVNFLYLASHYEKLKGSPEDNEQKQLFVEQHKHYLDEIIEQISEFSKRVILADANLDKVLSAYNKHRDKPIREQAENIIHLFTLTNLGAPAAFKYFDTTIDRKRYTSTKEVLDATLIHQSITGLYETRIDLSQLGGDGGGGSGSSGGLLGRDLLTKLKAQIQFSTEGPQVTWEDRPAMCLVLNLEEEYRLHEKPVPPSIDPSWLQLFPMVWAEKAGMGLANQVPPVVVELKSDASPVAVRQYPMSKEAREGIRPHIQRFLDLGILVPCQSPWNTPLLPVKKPGTNDYRPVQDLREVNKRVQDIHPTVPNPYNLLSSLPPSHTWYSVLDLKDAFFCLKLHPNSQPLFAFEWRDPEKGNTGQLTWTRLPQGFKNSPTLFNEALHRDLASFRALNPQVVMLQYVDDLLVAAPTYRDCKEGTRRLLQELSKLGYRVSAKKAQLCREEVTYLGYLLKGGKRWLTPARKATVMKIPTPTTPRQVREFLGTAGFCRLWIPGFASLAAPLYPLTRPKVPFTWTEAHQEAFGRIKEALLSAPALALPDLTKPFALYVDEKEGVARGVLTQTLGPWRRPVAYLSKKLDPVASGWPTCLKAIAAVALLLKDADKLTLGQNVLVIAPHNLESIVRQPPDRWMTNARMTHYQSLLLNERVSFAPPAILNPATLLPVESDDTPIHICSEILAEETGTRPDLRDQPLPGVPAWYTDGSSFIMDGRRQAGAAIVDNKRTVWASNLPEGTSAQKAELIALTQALRLAEGKSINIYTDSRYAFATAHVHGAIYKQRGWLTSAGKDIKNKEEILALLEAIHLPKRVAIIHCPGHQRGTDPVATGNRKADEAAKQAAQSTRILTETTKNAGKRTADGSEFEKRTADGSEFESPKKKAKVE

SEQ ID NO: 1638 - protein, 2131 aa, synthetic construct
MPAAKRVKLDGGDKKYSIGLDIGTNSVGWAVITDEYKVPSKKFKVLGNTDRHSIKKNLIGALLFDSGETAEATRLKRTARRRYTRRKNRICYLQEIFSNEMAKVDDSFFHRLEESFLVEEDKKHERHPIFGNIVDEVAYHEKYPTIYHLRKKLVDSTDKADLRLIYLALAHMIKFRGHFLIEGDLNPDNSDVDKLFIQLVQTYNQLFEENPINASGVDAKAILSARLSKSRRLENLIAQLPGEKKNGLFGNLIALSLGLTPNFKSNFDLAEDAKLQLSKDTYDDDLDNLLAQIGDQYADLFLAAKNLSDAILLSDILRVNTEITKAPLSASMIKRYDEHHQDLTLLKALVRQQLPEKYKEIFFDQSKNGYAGYIDGGASQEEFYKFIKPILEKMDGTEELLVKLNREDLLRKQRTFDNGSIPHQIHLGELHAILRRQEDFYPFLKDNREKIEKILTFRIPYYVGPLARGNSRFAWMTRKSEETITPWNFEEVVDKGASAQSFIERMTNFDKNLPNEKVLPKHSLLYEYFTVYNELTKVKYVTEGMRKPAFLSGEQKKAIVDLLFKTNRKVTVKQLKEDYFKKIECFDSVEISGVEDRFNASLGTYHDLLKIIKDKDFLDNEENEDILEDIVLTLTLFEDREMIEERLKTYAHLFDDKVMKQLKRRRYTGWGRLSRKLINGIRDKQSGKTILDFLKSDGFANRNFMQLIHDDSLTFKEDIQKAQVSGQGDSLHEHIANLAGSPAIKKGILQTVKVVDELVKVMGRHKPENIVIEMARENQTTQKGQKNSRERMKRIEEGIKELGSQILKEHPVENTQLQNEKLYLYYLQNGRDMYVDQELDINRLSDYDVDHIVPQSFLKDDSIDNKVLTRSDKARGKSDNVPSEEVVKKMKNYWRQLLNAKLITQRKFDNLTKAERGGLSELDKAGFIKRQLVETRQITKHVAQILDSRMNTKYDENDKLIREVKVITLKSKLVSDFRKDFQFYKVREINNYHHAHDAYLNAVVGTALIKKYPKLESEFVYGDYKVYDVRKMIAKSEQEIGKATAKYFFYSNIMNFFKTEITLANGEIRKRPLIETNGETGEIVWDKGRDFATVRKVLSMPQVNIVKKTEVQTGGFSKESILPKRNSDKLIARKKDWDPKKYGGFDSPTVAYSVLVVAKVEKGKSKKLKSVKELLGITIMERSSFEKNPIDFLEAKGYKEVKKDLIIKLPKYSLFELENGRKRMLASAGELQKGNELALPSKYVNFLYLASHYEKLKGSPEDNEQKQLFVEQHKHYLDEIIEQISEFSKRVILADANLDKVLSAYNKHRDKPIREQAENIIHLFTLTNLGAPAAFKYFDTTIDRKRYTSTKEVLDATLIHQSITGLYETRIDLSQLGGDGGEAAAKGGGGSEAAAKGGLLGRDLLTKLKAQIQFSTEGPQVTWEDRPAMCLVLNLEEEYRLHEKPVPPSIDPSWLQLFPMVWAEKAGMGLANQVPPVVVELKSDASPVAVRQYPMSKEAREGIRPHIQRFLDLGILVPCQSPWNTPLLPVKKPGTNDYRPVQDLREVNKRVQDIHPTVPNPYNLLSSLPPSHTWYSVLDLKDAFFCLKLHPNSQPLFAFEWRDPEKGNTGQLTWTRLPQGFKNSPTLFNEALHRDLASFRALNPQVVMLQYVDDLLVAAPTYRDCKEGTRRLLQELSKLGYRVSAKKAQLCREEVTYLGYLLKGGKRWLTPARKATVMKIPTPTTPRQVREFLGTAGFCRLWIPGFASLAAPLYPLTRPKVPFTWTEAHQEAFGRIKEALLSAPALALPDLTKPFALYVDEKEGVARGVLTQTLGPWRRPVAYLSKKLDPVASGWPTCLKAIAAVALLLKDADKLTLGQNVLVIAPHNLESIVRQPPDRWMTNARMTHYQSLLLNERVSFAPPAILNPATLLPVESDDTPIHICSEILAEETGTRPDLRDQPLPGVPAWYTDGSSFIMDGRRQAGAAIVDNKRTVWASNLPEGTSAQKAELIALTQALRLAEGKSINIYTDSRYAFATAHVHGAIYKQRGWLTSAGKDIKNKEEILALLEAIHLPKRVAIIHCPGHQRGTDPVATGNRKADEAAKQAAQSTRILTETTKNAGKRTADGSEFEKRTADGSEFESPKKKAKVE

SEQ ID NO: 1639 - protein, 2127 aa, synthetic construct
MPAAKRVKLDGGDKKYSIGLDIGTNSVGWAVITDEYKVPSKKFKVLGNTDRHSIKKNLIGALLFDSGETAEATRLKRTARRRYTRRKNRICYLQEIFSNEMAKVDDSFFHRLEESFLVEEDKKHERHPIFGNIVDEVAYHEKYPTIYHLRKKLVDSTDKADLRLIYLALAHMIKFRGHFLIEGDLNPDNSDVDKLFIQLVQTYNQLFEENPINASGVDAKAILSARLSKSRRLENLIAQLPGEKKNGLFGNLIALSLGLTPNFKSNFDLAEDAKLQLSKDTYDDDLDNLLAQIGDQYADLFLAAKNLSDAILLSDILRVNTEITKAPLSASMIKRYDEHHQDLTLLKALVRQQLPEKYKEIFFDQSKNGYAGYIDGGASQEEFYKFIKPILEKMDGTEELLVKLNREDLLRKQRTFDNGSIPHQIHLGELHAILRRQEDFYPFLKDNREKIEKILTFRIPYYVGPLARGNSRFAWMTRKSEETITPWNFEEVVDKGASAQSFIERMTNFDKNLPNEKVLPKHSLLYEYFTVYNELTKVKYVTEGMRKPAFLSGEQKKAIVDLLFKTNRKVTVKQLKEDYFKKIECFDSVEISGVEDRFNASLGTYHDLLKIIKDKDFLDNEENEDILEDIVLTLTLFEDREMIEERLKTYAHLFDDKVMKQLKRRRYTGWGRLSRKLINGIRDKQSGKTILDFLKSDGFANRNFMQLIHDDSLTFKEDIQKAQVSGQGDSLHEHIANLAGSPAIKKGILQTVKVVDELVKVMGRHKPENIVIEMARENQTTQKGQKNSRERMKRIEEGIKELGSQILKEHPVENTQLQNEKLYLYYLQNGRDMYVDQELDINRLSDYDVDHIVPQSFLKDDSIDNKVLTRSDKARGKSDNVPSEEVVKKMKNYWRQLLNAKLITQRKFDNLTKAERGGLSELDKAGFIKRQLVETRQITKHVAQILDSRMNTKYDENDKLIREVKVITLKSKLVSDFRKDFQFYKVREINNYHHAHDAYLNAVVGTALIKKYPKLESEFVYGDYKVYDVRKMIAKSEQEIGKATAKYFFYSNIMNFFKTEITLANGEIRKRPLIETNGETGEIVWDKGRDFATVRKVLSMPQVNIVKKTEVQTGGFSKESILPKRNSDKLIARKKDWDPKKYGGFDSPTVAYSVLVVAKVEKGKSKKLKSVKELLGITIMERSSFEKNPIDFLEAKGYKEVKKDLIIKLPKYSLFELENGRKRMLASAGELQKGNELALPSKYVNFLYLASHYEKLKGSPEDNEQKQLFVEQHKHYLDEIIEQISEFSKRVILADANLDKVLSAYNKHRDKPIREQAENIIHLFTLTNLGAPAAFKYFDTTIDRKRYTSTKEVLDATLIHQSITGLYETRIDLSQLGGDGGGGGGSSEAAAKGGLLGRDLLTKLKAQIQFSTEGPQVTWEDRPAMCLVLNLEEEYRLHEKPVPPSIDPSWLQLFPMVWAEKAGMGLANQVPPVVVELKSDASPVAVRQYPMSKEAREGIRPHIQRFLDLGILVPCQSPWNTPLLPVKKPGTNDYRPVQDLREVNKRVQDIHPTVPNPYNLLSSLPPSHTWYSVLDLKDAFFCLKLHPNSQPLFAFEWRDPEKGNTGQLTWTRLPQGFKNSPTLFNEALHRDLASFRALNPQVVMLQYVDDLLVAAPTYRDCKEGTRRLLQELSKLGYRVSAKKAQLCREEVTYLGYLLKGGKRWLTPARKATVMKIPTPTTPRQVREFLGTAGFCRLWIPGFASLAAPLYPLTRPKVPFTWTEAHQEAFGRIKEALLSAPALALPDLTKPFALYVDEKEGVARGVLTQTLGPWRRPVAYLSKKLDPVASGWPTCLKAIAAVALLLKDADKLTLGQNVLVIAPHNLESIVRQPPDRWMTNARMTHYQSLLLNERVSFAPPAILNPATLLPVESDDTPIHICSEILAEETGTRPDLRDQPLPGVPAWYTDGSSFIMDGRRQAGAAIVDNKRTVWASNLPEGTSAQKAELIALTQALRLAEGKSINIYTDSRYAFATAHVHGAIYKQRGWLTSAGKDIKNKEEILALLEAIHLPKRVAIIHCPGHQRGTDPVATGNRKADEAAKQAAQSTRILTETTKNAGKRTADGSEFEKRTADGSEFESPKKKAKVE

SEQ ID NO: 1640 - protein, 2127 aa, synthetic construct
MPAAKRVKLDGGDKKYSIGLDIGTNSVGWAVITDEYKVPSKKFKVLGNTDRHSIKKNLIGALLFDSGETAEATRLKRTARRRYTRRKNRICYLQEIFSNEMAKVDDSFFHRLEESFLVEEDKKHERHPIFGNIVDEVAYHEKYPTIYHLRKKLVDSTDKADLRLIYLALAHMIKFRGHFLIEGDLNPDNSDVDKLFIQLVQTYNQLFEENPINASGVDAKAILSARLSKSRRLENLIAQLPGEKKNGLFGNLIALSLGLTPNFKSNFDLAEDAKLQLSKDTYDDDLDNLLAQIGDQYADLFLAAKNLSDAILLSDILRVNTEITKAPLSASMIKRYDEHHQDLTLLKALVRQQLPEKYKEIFFDQSKNGYAGYIDGGASQEEFYKFIKPILEKMDGTEELLVKLNREDLLRKQRTFDNGSIPHQIHLGELHAILRRQEDFYPFLKDNREKIEKILTFRIPYYVGPLARGNSRFAWMTRKSEETITPWNFEEVVDKGASAQSFIERMTNFDKNLPNEKVLPKHSLLYEYFTVYNELTKVKYVTEGMRKPAFLSGEQKKAIVDLLFKTNRKVTVKQLKEDYFKKIECFDSVEISGVEDRFNASLGTYHDLLKIIKDKDFLDNEENEDILEDIVLTLTLFEDREMIEERLKTYAHLFDDKVMKQLKRRRYTGWGRLSRKLINGIRDKQSGKTILDFLKSDGFANRNFMQLIHDDSLTFKEDIQKAQVSGQGDSLHEHIANLAGSPAIKKGILQTVKVVDELVKVMGRHKPENIVIEMARENQTTQKGQKNSRERMKRIEEGIKELGSQILKEHPVENTQLQNEKLYLYYLQNGRDMYVDQELDINRLSDYDVDHIVPQSFLKDDSIDNKVLTRSDKARGKSDNVPSEEVVKKMKNYWRQLLNAKLITQRKFDNLTKAERGGLSELDKAGFIKRQLVETRQITKHVAQILDSRMNTKYDENDKLIREVKVITLKSKLVSDFRKDFQFYKVREINNYHHAHDAYLNAVVGTALIKKYPKLESEFVYGDYKVYDVRKMIAKSEQEIGKATAKYFFYSNIMNFFKTEITLANGEIRKRPLIETNGETGEIVWDKGRDFATVRKVLSMPQVNIVKKTEVQTGGFSKESILPKRNSDKLIARKKDWDPKKYGGFDSPTVAYSVLVVAKVEKGKSKKLKSVKELLGITIMERSSFEKNPIDFLEAKGYKEVKKDLIIKLPKYSLFELENGRKRMLASAGELQKGNELALPSKYVNFLYLASHYEKLKGSPEDNEQKQLFVEQHKHYLDEIIEQISEFSKRVILADANLDKVLSAYNKHRDKPIREQAENIIHLFTLTNLGAPAAFKYFDTTIDRKRYTSTKEVLDATLIHQSITGLYETRIDLSQLGGDGGPAPGGSEAAAKGGLLGRDLLTKLKAQIQFSTEGPQVTWEDRPAMCLVLNLEEEYRLHEKPVPPSIDPSWLQLFPMVWAEKAGMGLANQVPPVVVELKSDASPVAVRQYPMSKEAREGIRPHIQRFLDLGILVPCQSPWNTPLLPVKKPGTNDYRPVQDLREVNKRVQDIHPTVPNPYNLLSSLPPSHTWYSVLDLKDAFFCLKLHPNSQPLFAFEWRDPEKGNTGQLTWTRLPQGFKNSPTLFNEALHRDLASFRALNPQVVMLQYVDDLLVAAPTYRDCKEGTRRLLQELSKLGYRVSAKKAQLCREEVTYLGYLLKGGKRWLTPARKATVMKIPTPTTPRQVREFLGTAGFCRLWIPGFASLAAPLYPLTRPKVPFTWTEAHQEAFGRIKEALLSAPALALPDLTKPFALYVDEKEGVARGVLTQTLGPWRRPVAYLSKKLDPVASGWPTCLKAIAAVALLLKDADKLTLGQNVLVIAPHNLESIVRQPPDRWMTNARMTHYQSLLLNERVSFAPPAILNPATLLPVESDDTPIHICSEILAEETGTRPDLRDQPLPGVPAWYTDGSSFIMDGRRQAGAAIVDNKRTVWASNLPEGTSAQKAELIALTQALRLAEGKSINIYTDSRYAFATAHVHGAIYKQRGWLTSAGKDIKNKEEILALLEAIHLPKRVAIIHCPGHQRGTDPVATGNRKADEAAKQAAQSTRILTETTKNAGKRTADGSEFEKRTADGSEFESPKKKAKVE

SEQ ID NO: 1641 - protein, 2127 aa, synthetic construct
MPAAKRVKLDGGDKKYSIGLDIGTNSVGWAVITDEYKVPSKKFKVLGNTDRHSIKKNLIGALLFDSGETAEATRLKRTARRRYTRRKNRICYLQEIFSNEMAKVDDSFFHRLEESFLVEEDKKHERHPIFGNIVDEVAYHEKYPTIYHLRKKLVDSTDKADLRLIYLALAHMIKFRGHFLIEGDLNPDNSDVDKLFIQLVQTYNQLFEENPINASGVDAKAILSARLSKSRRLENLIAQLPGEKKNGLFGNLIALSLGLTPNFKSNFDLAEDAKLQLSKDTYDDDLDNLLAQIGDQYADLFLAAKNLSDAILLSDILRVNTEITKAPLSASMIKRYDEHHQDLTLLKALVRQQLPEKYKEIFFDQSKNGYAGYIDGGASQEEFYKFIKPILEKMDGTEELLVKLNREDLLRKQRTFDNGSIPHQIHLGELHAILRRQEDFYPFLKDNREKIEKILTFRIPYYVGPLARGNSRFAWMTRKSEETITPWNFEEVVDKGASAQSFIERMTNFDKNLPNEKVLPKHSLLYEYFTVYNELTKVKYVTEGMRKPAFLSGEQKKAIVDLLFKTNRKVTVKQLKEDYFKKIECFDSVEISGVEDRFNASLGTYHDLLKIIKDKDFLDNEENEDILEDIVLTLTLFEDREMIEERLKTYAHLFDDKVMKQLKRRRYTGWGRLSRKLINGIRDKQSGKTILDFLKSDGFANRNFMQLIHDDSLTFKEDIQKAQVSGQGDSLHEHIANLAGSPAIKKGILQTVKVVDELVKVMGRHKPENIVIEMARENQTTQKGQKNSRERMKRIEEGIKELGSQILKEHPVENTQLQNEKLYLYYLQNGRDMYVDQELDINRLSDYDVDHIVPQSFLKDDSIDNKVLTRSDKARGKSDNVPSEEVVKKMKNYWRQLLNAKLITQRKFDNLTKAERGGLSELDKAGFIKRQLVETRQITKHVAQILDSRMNTKYDENDKLIREVKVITLKSKLVSDFRKDFQFYKVREINNYHHAHDAYLNAVVGTALIKKYPKLESEFVYGDYKVYDVRKMIAKSEQEIGKATAKYFFYSNIMNFFKTEITLANGEIRKRPLIETNGETGEIVWDKGRDFATVRKVLSMPQVNIVKKTEVQTGGFSKESILPKRNSDKLIARKKDWDPKKYGGFDSPTVAYSVLVVAKVEKGKSKKLKSVKELLGITIMERSSFEKNPIDFLEAKGYKEVKKDLIIKLPKYSLFELENGRKRMLASAGELQKGNELALPSKYVNFLYLASHYEKLKGSPEDNEQKQLFVEQHKHYLDEIIEQISEFSKRVILADANLDKVLSAYNKHRDKPIREQAENIIHLFTLTNLGAPAAFKYFDTTIDRKRYTSTKEVLDATLIHQSITGLYETRIDLSQLGGDGGPAPEAAAKGGSGGLLGRDLLTKLKAQIQFSTEGPQVTWEDRPAMCLVLNLEEEYRLHEKPVPPSIDPSWLQLFPMVWAEKAGMGLANQVPPVVVELKSDASPVAVRQYPMSKEAREGIRPHIQRFLDLGILVPCQSPWNTPLLPVKKPGTNDYRPVQDLREVNKRVQDIHPTVPNPYNLLSSLPPSHTWYSVLDLKDAFFCLKLHPNSQPLFAFEWRDPEKGNTGQLTWTRLPQGFKNSPTLFNEALHRDLASFRALNPQVVMLQYVDDLLVAAPTYRDCKEGTRRLLQELSKLGYRVSAKKAQLCREEVTYLGYLLKGGKRWLTPARKATVMKIPTPTTPRQVREFLGTAGFCRLWIPGFASLAAPLYPLTRPKVPFTWTEAHQEAFGRIKEALLSAPALALPDLTKPFALYVDEKEGVARGVLTQTLGPWRRPVAYLSKKLDPVASGWPTCLKAIAAVALLLKDADKLTLGQNVLVIAPHNLESIVRQPPDRWMTNARMTHYQSLLLNERVSFAPPAILNPATLLPVESDDTPIHICSEILAEETGTRPDLRDQPLPGVPAWYTDGSSFIMDGRRQAGAAIVDNKRTVWASNLPEGTSAQKAELIALTQALRLAEGKSINIYTDSRYAFATAHVHGAIYKQRGWLTSAGKDIKNKEEILALLEAIHLPKRVAIIHCPGHQRGTDPVATGNRKADEAAKQAAQSTRILTETTKNAGKRTADGSEFEKRTADGSEFESPKKKAKVE

SEQ ID NO: 1642 - protein, 2122 aa, synthetic construct
MPAAKRVKLDGGDKKYSIGLDIGTNSVGWAVITDEYKVPSKKFKVLGNTDRHSIKKNLIGALLFDSGETAEATRLKRTARRRYTRRKNRICYLQEIFSNEMAKVDDSFFHRLEESFLVEEDKKHERHPIFGNIVDEVAYHEKYPTIYHLRKKLVDSTDKADLRLIYLALAHMIKFRGHFLIEGDLNPDNSDVDKLFIQLVQTYNQLFEENPINASGVDAKAILSARLSKSRRLENLIAQLPGEKKNGLFGNLIALSLGLTPNFKSNFDLAEDAKLQLSKDTYDDDLDNLLAQIGDQYADLFLAAKNLSDAILLSDILRVNTEITKAPLSASMIKRYDEHHQDLTLLKALVRQQLPEKYKEIFFDQSKNGYAGYIDGGASQEEFYKFIKPILEKMDGTEELLVKLNREDLLRKQRTFDNGSIPHQIHLGELHAILRRQEDFYPFLKDNREKIEKILTFRIPYYVGPLARGNSRFAWMTRKSEETITPWNFEEVVDKGASAQSFIERMTNFDKNLPNEKVLPKHSLLYEYFTVYNELTKVKYVTEGMRKPAFLSGEQKKAIVDLLFKTNRKVTVKQLKEDYFKKIECFDSVEISGVEDRFNASLGTYHDLLKIIKDKDFLDNEENEDILEDIVLTLTLFEDREMIEERLKTYAHLFDDKVMKQLKRRRYTGWGRLSRKLINGIRDKQSGKTILDFLKSDGFANRNFMQLIHDDSLTFKEDIQKAQVSGQGDSLHEHIANLAGSPAIKKGILQTVKVVDELVKVMGRHKPENIVIEMARENQTTQKGQKNSRERMKRIEEGIKELGSQILKEHPVENTQLQNEKLYLYYLQNGRDMYVDQELDINRLSDYDVDHIVPQSFLKDDSIDNKVLTRSDKARGKSDNVPSEEVVKKMKNYWRQLLNAKLITQRKFDNLTKAERGGLSELDKAGFIKRQLVETRQITKHVAQILDSRMNTKYDENDKLIREVKVITLKSKLVSDFRKDFQFYKVREINNYHHAHDAYLNAVVGTALIKKYPKLESEFVYGDYKVYDVRKMIAKSEQEIGKATAKYFFYSNIMNFFKTEITLANGEIRKRPLIETNGETGEIVWDKGRDFATVRKVLSMPQVNIVKKTEVQTGGFSKESILPKRNSDKLIARKKDWDPKKYGGFDSPTVAYSVLVVAKVEKGKSKKLKSVKELLGITIMERSSFEKNPIDFLEAKGYKEVKKDLIIKLPKYSLFELENGRKRMLASAGELQKGNELALPSKYVNFLYLASHYEKLKGSPEDNEQKQLFVEQHKHYLDEIIEQISEFSKRVILADANLDKVLSAYNKHRDKPIREQAENIIHLFTLTNLGAPAAFKYFDTTIDRKRYTSTKEVLDATLIHQSITGLYETRIDLSQLGGDGGGGGGGSGGLLGRDLLTKLKAQIQFSTEGPQVTWEDRPAMCLVLNLEEEYRLHEKPVPPSIDPSWLQLFPMVWAEKAGMGLANQVPPVVVELKSDASPVAVRQYPMSKEAREGIRPHIQRFLDLGILVPCQSPWNTPLLPVKKPGTNDYRPVQDLREVNKRVQDIHPTVPNPYNLLSSLPPSHTWYSVLDLKDAFFCLKLHPNSQPLFAFEWRDPEKGNTGQLTWTRLPQGFKNSPTLFNEALHRDLASFRALNPQVVMLQYVDDLLVAAPTYRDCKEGTRRLLQELSKLGYRVSAKKAQLCREEVTYLGYLLKGGKRWLTPARKATVMKIPTPTTPRQVREFLGTAGFCRLWIPGFASLAAPLYPLTRPKVPFTWTEAHQEAFGRIKEALLSAPALALPDLTKPFALYVDEKEGVARGVLTQTLGPWRRPVAYLSKKLDPVASGWPTCLKAIAAVALLLKDADKLTLGQNVLVIAPHNLESIVRQPPDRWMTNARMTHYQSLLLNERVSFAPPAILNPATLLPVESDDTPIHICSEILAEETGTRPDLRDQPLPGVPAWYTDGSSFIMDGRRQAGAAIVDNKRTVWASNLPEGTSAQKAELIALTQALRLAEGKSINIYTDSRYAFATAHVHGAIYKQRGWLTSAGKDIKNKEEILALLEAIHLPKRVAIIHCPGHQRGTDPVATGNRKADEAAKQAAQSTRILTETTKNAGKRTADGSEFEKRTADGSEFESPKKKAKVE

SEQ ID NO: 1643 - protein, 2121 aa, synthetic construct
MPAAKRVKLDGGDKKYSIGLDIGTNSVGWAVITDEYKVPSKKFKVLGNTDRHSIKKNLIGALLFDSGETAEATRLKRTARRRYTRRKNRICYLQEIFSNEMAKVDDSFFHRLEESFLVEEDKKHERHPIFGNIVDEVAYHEKYPTIYHLRKKLVDSTDKADLRLIYLALAHMIKFRGHFLIEGDLNPDNSDVDKLFIQLVQTYNQLFEENPINASGVDAKAILSARLSKSRRLENLIAQLPGEKKNGLFGNLIALSLGLTPNFKSNFDLAEDAKLQLSKDTYDDDLDNLLAQIGDQYADLFLAAKNLSDAILLSDILRVNTEITKAPLSASMIKRYDEHHQDLTLLKALVRQQLPEKYKEIFFDQSKNGYAGYIDGGASQEEFYKFIKPILEKMDGTEELLVKLNREDLLRKQRTFDNGSIPHQIHLGELHAILRRQEDFYPFLKDNREKIEKILTFRIPYYVGPLARGNSRFAWMTRKSEETITPWNFEEVVDKGASAQSFIERMTNFDKNLPNEKVLPKHSLLYEYFTVYNELTKVKYVTEGMRKPAFLSGEQKKAIVDLLFKTNRKVTVKQLKEDYFKKIECFDSVEISGVEDRFNASLGTYHDLLKIIKDKDFLDNEENEDILEDIVLTLTLFEDREMIEERLKTYAHLFDDKVMKQLKRRRYTGWGRLSRKLINGIRDKQSGKTILDFLKSDGFANRNFMQLIHDDSLTFKEDIQKAQVSGQGDSLHEHIANLAGSPAIKKGILQTVKVVDELVKVMGRHKPENIVIEMARENQTTQKGQKNSRERMKRIEEGIKELGSQILKEHPVENTQLQNEKLYLYYLQNGRDMYVDQELDINRLSDYDVDHIVPQSFLKDDSIDNKVLTRSDKARGKSDNVPSEEVVKKMKNYWRQLLNAKLITQRKFDNLTKAERGGLSELDKAGFIKRQLVETRQITKHVAQILDSRMNTKYDENDKLIREVKVITLKSKLVSDFRKDFQFYKVREINNYHHAHDAYLNAVVGTALIKKYPKLESEFVYGDYKVYDVRKMIAKSEQEIGKATAKYFFYSNIMNFFKTEITLANGEIRKRPLIETNGETGEIVWDKGRDFATVRKVLSMPQVNIVKKTEVQTGGFSKESILPKRNSDKLIARKKDWDPKKYGGFDSPTVAYSVLVVAKVEKGKSKKLKSVKELLGITIMERSSFEKNPIDFLEAKGYKEVKKDLIIKLPKYSLFELENGRKRMLASAGELQKGNELALPSKYVNFLYLASHYEKLKGSPEDNEQKQLFVEQHKHYLDEIIEQISEFSKRVILADANLDKVLSAYNKHRDKPIREQAENIIHLFTLTNLGAPAAFKYFDTTIDRKRYTSTKEVLDATLIHQSITGLYETRIDLSQLGGDGGGGGGGGGLLGRDLLTKLKAQIQFSTEGPQVTWEDRPAMCLVLNLEEEYRLHEKPVPPSIDPSWLQLFPMVWAEKAGMGLANQVPPVVVELKSDASPVAVRQYPMSKEAREGIRPHIQRFLDLGILVPCQSPWNTPLLPVKKPGTNDYRPVQDLREVNKRVQDIHPTVPNPYNLLSSLPPSHTWYSVLDLKDAFFCLKLHPNSQPLFAFEWRDPEKGNTGQLTWTRLPQGFKNSPTLFNEALHRDLASFRALNPQVVMLQYVDDLLVAAPTYRDCKEGTRRLLQELSKLGYRVSAKKAQLCREEVTYLGYLLKGGKRWLTPARKATVMKIPTPTTPRQVREFLGTAGFCRLWIPGFASLAAPLYPLTRPKVPFTWTEAHQEAFGRIKEALLSAPALALPDLTKPFALYVDEKEGVARGVLTQTLGPWRRPVAYLSKKLDPVASGWPTCLKAIAAVALLLKDADKLTLGQNVLVIAPHNLESIVRQPPDRWMTNARMTHYQSLLLNERVSFAPPAILNPATLLPVESDDTPIHICSEILAEETGTRPDLRDQPLPGVPAWYTDGSSFIMDGRRQAGAAIVDNKRTVWASNLPEGTSAQKAELIALTQALRLAEGKSINIYTDSRYAFATAHVHGAIYKQRGWLTSAGKDIKNKEEILALLEAIHLPKRVAIIHCPGHQRGTDPVATGNRKADEAAKQAAQSTRILTETTKNAGKRTADGSEFEKRTADGSEFESPKKKAKVE

SEQ ID NO: 1644 - protein, 2127 aa, synthetic construct
MPAAKRVKLDGGDKKYSIGLDIGTNSVGWAVITDEYKVPSKKFKVLGNTDRHSIKKNLIGALLFDSGETAEATRLKRTARRRYTRRKNRICYLQEIFSNEMAKVDDSFFHRLEESFLVEEDKKHERHPIFGNIVDEVAYHEKYPTIYHLRKKLVDSTDKADLRLIYLALAHMIKFRGHFLIEGDLNPDNSDVDKLFIQLVQTYNQLFEENPINASGVDAKAILSARLSKSRRLENLIAQLPGEKKNGLFGNLIALSLGLTPNFKSNFDLAEDAKLQLSKDTYDDDLDNLLAQIGDQYADLFLAAKNLSDAILLSDILRVNTEITKAPLSASMIKRYDEHHQDLTLLKALVRQQLPEKYKEIFFDQSKNGYAGYIDGGASQEEFYKFIKPILEKMDGTEELLVKLNREDLLRKQRTFDNGSIPHQIHLGELHAILRRQEDFYPFLKDNREKIEKILTFRIPYYVGPLARGNSRFAWMTRKSEETITPWNFEEVVDKGASAQSFIERMTNFDKNLPNEKVLPKHSLLYEYFTVYNELTKVKYVTEGMRKPAFLSGEQKKAIVDLLFKTNRKVTVKQLKEDYFKKIECFDSVEISGVEDRFNASLGTYHDLLKIIKDKDFLDNEENEDILEDIVLTLTLFEDREMIEERLKTYAHLFDDKVMKQLKRRRYTGWGRLSRKLINGIRDKQSGKTILDFLKSDGFANRNFMQLIHDDSLTFKEDIQKAQVSGQGDSLHEHIANLAGSPAIKKGILQTVKVVDELVKVMGRHKPENIVIEMARENQTTQKGQKNSRERMKRIEEGIKELGSQILKEHPVENTQLQNEKLYLYYLQNGRDMYVDQELDINRLSDYDVDHIVPQSFLKDDSIDNKVLTRSDKARGKSDNVPSEEVVKKMKNYWRQLLNAKLITQRKFDNLTKAERGGLSELDKAGFIKRQLVETRQITKHVAQILDSRMNTKYDENDKLIREVKVITLKSKLVSDFRKDFQFYKVREINNYHHAHDAYLNAVVGTALIKKYPKLESEFVYGDYKVYDVRKMIAKSEQEIGKATAKYFFYSNIMNFFKTEITLANGEIRKRPLIETNGETGEIVWDKGRDFATVRKVLSMPQVNIVKKTEVQTGGFSKESILPKRNSDKLIARKKDWDPKKYGGFDSPTVAYSVLVVAKVEKGKSKKLKSVKELLGITIMERSSFEKNPIDFLEAKGYKEVKKDLIIKLPKYSLFELENGRKRMLASAGELQKGNELALPSKYVNFLYLASHYEKLKGSPEDNEQKQLFVEQHKHYLDEIIEQISEFSKRVILADANLDKVLSAYNKHRDKPIREQAENIIHLFTLTNLGAPAAFKYFDTTIDRKRYTSTKEVLDATLIHQSITGLYETRIDLSQLGGDGGGGSGSSEAAAKGGLLGRDLLTKLKAQIQFSTEGPQVTWEDRPAMCLVLNLEEEYRLHEKPVPPSIDPSWLQLFPMVWAEKAGMGLANQVPPVVVELKSDASPVAVRQYPMSKEAREGIRPHIQRFLDLGILVPCQSPWNTPLLPVKKPGTNDYRPVQDLREVNKRVQDIHPTVPNPYNLLSSLPPSHTWYSVLDLKDAFFCLKLHPNSQPLFAFEWRDPEKGNTGQLTWTRLPQGFKNSPTLFNEALHRDLASFRALNPQVVMLQYVDDLLVAAPTYRDCKEGTRRLLQELSKLGYRVSAKKAQLCREEVTYLGYLLKGGKRWLTPARKATVMKIPTPTTPRQVREFLGTAGFCRLWIPGFASLAAPLYPLTRPKVPFTWTEAHQEAFGRIKEALLSAPALALPDLTKPFALYVDEKEGVARGVLTQTLGPWRRPVAYLSKKLDPVASGWPTCLKAIAAVALLLKDADKLTLGQNVLVIAPHNLESIVRQPPDRWMTNARMTHYQSLLLNERVSFAPPAILNPATLLPVESDDTPIHICSEILAEETGTRPDLRDQPLPGVPAWYTDGSSFIMDGRRQAGAAIVDNKRTVWASNLPEGTSAQKAELIALTQALRLAEGKSINIYTDSRYAFATAHVHGAIYKQRGWLTSAGKDIKNKEEILALLEAIHLPKRVAIIHCPGHQRGTDPVATGNRKADEAAKQAAQSTRILTETTKNAGKRTADGSEFEKRTADGSEFESPKKKAKVE

SEQ ID NO: 1645 - protein, 2127 aa, synthetic construct
MPAAKRVKLDGGDKKYSIGLDIGTNSVGWAVITDEYKVPSKKFKVLGNTDRHSIKKNLIGALLFDSGETAEATRLKRTARRRYTRRKNRICYLQEIFSNEMAKVDDSFFHRLEESFLVEEDKKHERHPIFGNIVDEVAYHEKYPTIYHLRKKLVDSTDKADLRLIYLALAHMIKFRGHFLIEGDLNPDNSDVDKLFIQLVQTYNQLFEENPINASGVDAKAILSARLSKSRRLENLIAQLPGEKKNGLFGNLIALSLGLTPNFKSNFDLAEDAKLQLSKDTYDDDLDNLLAQIGDQYADLFLAAKNLSDAILLSDILRVNTEITKAPLSASMIKRYDEHHQDLTLLKALVRQQLPEKYKEIFFDQSKNGYAGYIDGGASQEEFYKFIKPILEKMDGTEELLVKLNREDLLRKQRTFDNGSIPHQIHLGELHAILRRQEDFYPFLKDNREKIEKILTFRIPYYVGPLARGNSRFAWMTRKSEETITPWNFEEVVDKGASAQSFIERMTNFDKNLPNEKVLPKHSLLYEYFTVYNELTKVKYVTEGMRKPAFLSGEQKKAIVDLLFKTNRKVTVKQLKEDYFKKIECFDSVEISGVEDRFNASLGTYHDLLKIIKDKDFLDNEENEDILEDIVLTLTLFEDREMIEERLKTYAHLFDDKVMKQLKRRRYTGWGRLSRKLINGIRDKQSGKTILDFLKSDGFANRNFMQLIHDDSLTFKEDIQKAQVSGQGDSLHEHIANLAGSPAIKKGILQTVKVVDELVKVMGRHKPENIVIEMARENQTTQKGQKNSRERMKRIEEGIKELGSQILKEHPVENTQLQNEKLYLYYLQNGRDMYVDQELDINRLSDYDVDHIVPQSFLKDDSIDNKVLTRSDKARGKSDNVPSEEVVKKMKNYWRQLLNAKLITQRKFDNLTKAERGGLSELDKAGFIKRQLVETRQITKHVAQILDSRMNTKYDENDKLIREVKVITLKSKLVSDFRKDFQFYKVREINNYHHAHDAYLNAVVGTALIKKYPKLESEFVYGDYKVYDVRKMIAKSEQEIGKATAKYFFYSNIMNFFKTEITLANGEIRKRPLIETNGETGEIVWDKGRDFATVRKVLSMPQVNIVKKTEVQTGGFSKESILPKRNSDKLIARKKDWDPKKYGGFDSPTVAYSVLVVAKVEKGKSKKLKSVKELLGITIMERSSFEKNPIDFLEAKGYKEVKKDLIIKLPKYSLFELENGRKRMLASAGELQKGNELALPSKYVNFLYLASHYEKLKGSPEDNEQKQLFVEQHKHYLDEIIEQISEFSKRVILADANLDKVLSAYNKHRDKPIREQAENIIHLFTLTNLGAPAAFKYFDTTIDRKRYTSTKEVLDATLIHQSITGLYETRIDLSQLGGDGGEAAAKGGSGSSGGLLGRDLLTKLKAQIQFSTEGPQVTWEDRPAMCLVLNLEEEYRLHEKPVPPSIDPSWLQLFPMVWAEKAGMGLANQVPPVVVELKSDASPVAVRQYPMSKEAREGIRPHIQRFLDLGILVPCQSPWNTPLLPVKKPGTNDYRPVQDLREVNKRVQDIHPTVPNPYNLLSSLPPSHTWYSVLDLKDAFFCLKLHPNSQPLFAFEWRDPEKGNTGQLTWTRLPQGFKNSPTLFNEALHRDLASFRALNPQVVMLQYVDDLLVAAPTYRDCKEGTRRLLQELSKLGYRVSAKKAQLCREEVTYLGYLLKGGKRWLTPARKATVMKIPTPTTPRQVREFLGTAGFCRLWIPGFASLAAPLYPLTRPKVPFTWTEAHQEAFGRIKEALLSAPALALPDLTKPFALYVDEKEGVARGVLTQTLGPWRRPVAYLSKKLDPVASGWPTCLKAIAAVALLLKDADKLTLGQNVLVIAPHNLESIVRQPPDRWMTNARMTHYQSLLLNERVSFAPPAILNPATLLPVESDDTPIHICSEILAEETGTRPDLRDQPLPGVPAWYTDGSSFIMDGRRQAGAAIVDNKRTVWASNLPEGTSAQKAELIALTQALRLAEGKSINIYTDSRYAFATAHVHGAIYKQRGWLTSAGKDIKNKEEILALLEAIHLPKRVAIIHCPGHQRGTDPVATGNRKADEAAKQAAQSTRILTETTKNAGKRTADGSEFEKRTADGSEFESPKKKAKVE

SEQ ID NO: 1646 - protein, 2127 aa, synthetic construct
MPAAKRVKLDGGDKKYSIGLDIGTNSVGWAVITDEYKVPSKKFKVLGNTDRHSIKKNLIGALLFDSGETAEATRLKRTARRRYTRRKNRICYLQEIFSNEMAKVDDSFFHRLEESFLVEEDKKHERHPIFGNIVDEVAYHEKYPTIYHLRKKLVDSTDKADLRLIYLALAHMIKFRGHFLIEGDLNPDNSDVDKLFIQLVQTYNQLFEENPINASGVDAKAILSARLSKSRRLENLIAQLPGEKKNGLFGNLIALSLGLTPNFKSNFDLAEDAKLQLSKDTYDDDLDNLLAQIGDQYADLFLAAKNLSDAILLSDILRVNTEITKAPLSASMIKRYDEHHQDLTLLKALVRQQLPEKYKEIFFDQSKNGYAGYIDGGASQEEFYKFIKPILEKMDGTEELLVKLNREDLLRKQRTFDNGSIPHQIHLGELHAILRRQEDFYPFLKDNREKIEKILTFRIPYYVGPLARGNSRFAWMTRKSEETITPWNFEEVVDKGASAQSFIERMTNFDKNLPNEKVLPKHSLLYEYFTVYNELTKVKYVTEGMRKPAFLSGEQKKAIVDLLFKTNRKVTVKQLKEDYFKKIECFDSVEISGVEDRFNASLGTYHDLLKIIKDKDFLDNEENEDILEDIVLTLTLFEDREMIEERLKTYAHLFDDKVMKQLKRRRYTGWGRLSRKLINGIRDKQSGKTILDFLKSDGFANRNFMQLIHDDSLTFKEDIQKAQVSGQGDSLHEHIANLAGSPAIKKGILQTVKVVDELVKVMGRHKPENIVIEMARENQTTQKGQKNSRERMKRIEEGIKELGSQILKEHPVENTQLQNEKLYLYYLQNGRDMYVDQELDINRLSDYDVDHIVPQSFLKDDSIDNKVLTRSDKARGKSDNVPSEEVVKKMKNYWRQLLNAKLITQRKFDNLTKAERGGLSELDKAGFIKRQLVETRQITKHVAQILDSRMNTKYDENDKLIREVKVITLKSKLVSDFRKDFQFYKVREINNYHHAHDAYLNAVVGTALIKKYPKLESEFVYGDYKVYDVRKMIAKSEQEIGKATAKYFFYSNIMNFFKTEITLANGEIRKRPLIETNGETGEIVWDKGRDFATVRKVLSMPQVNIVKKTEVQTGGFSKESILPKRNSDKLIARKKDWDPKKYGGFDSPTVAYSVLVVAKVEKGKSKKLKSVKELLGITIMERSSFEKNPIDFLEAKGYKEVKKDLIIKLPKYSLFELENGRKRMLASAGELQKGNELALPSKYVNFLYLASHYEKLKGSPEDNEQKQLFVEQHKHYLDEIIEQISEFSKRVILADANLDKVLSAYNKHRDKPIREQAENIIHLFTLTNLGAPAAFKYFDTTIDRKRYTSTKEVLDATLIHQSITGLYETRIDLSQLGGDGGEAAAKGGGGGSGGLLGRDLLTKLKAQIQFSTEGPQVTWEDRPAMCLVLNLEEEYRLHEKPVPPSIDPSWLQLFPMVWAEKAGMGLANQVPPVVVELKSDASPVAVRQYPMSKEAREGIRPHIQRFLDLGILVPCQSPWNTPLLPVKKPGTNDYRPVQDLREVNKRVQDIHPTVPNPYNLLSSLPPSHTWYSVLDLKDAFFCLKLHPNSQPLFAFEWRDPEKGNTGQLTWTRLPQGFKNSPTLFNEALHRDLASFRALNPQVVMLQYVDDLLVAAPTYRDCKEGTRRLLQELSKLGYRVSAKKAQLCREEVTYLGYLLKGGKRWLTPARKATVMKIPTPTTPRQVREFLGTAGFCRLWIPGFASLAAPLYPLTRPKVPFTWTEAHQEAFGRIKEALLSAPALALPDLTKPFALYVDEKEGVARGVLTQTLGPWRRPVAYLSKKLDPVASGWPTCLKAIAAVALLLKDADKLTLGQNVLVIAPHNLESIVRQPPDRWMTNARMTHYQSLLLNERVSFAPPAILNPATLLPVESDDTPIHICSEILAEETGTRPDLRDQPLPGVPAWYTDGSSFIMDGRRQAGAAIVDNKRTVWASNLPEGTSAQKAELIALTQALRLAEGKSINIYTDSRYAFATAHVHGAIYKQRGWLTSAGKDIKNKEEILALLEAIHLPKRVAIIHCPGHQRGTDPVATGNRKADEAAKQAAQSTRILTETTKNAGKRTADGSEFEKRTADGSEFESPKKKAKVE

SEQ ID NO: 1647 - protein, 2127 aa, synthetic construct
MPAAKRVKLDGGDKKYSIGLDIGTNSVGWAVITDEYKVPSKKFKVLGNTDRHSIKKNLIGALLFDSGETAEATRLKRTARRRYTRRKNRICYLQEIFSNEMAKVDDSFFHRLEESFLVEEDKKHERHPIFGNIVDEVAYHEKYPTIYHLRKKLVDSTDKADLRLIYLALAHMIKFRGHFLIEGDLNPDNSDVDKLFIQLVQTYNQLFEENPINASGVDAKAILSARLSKSRRLENLIAQLPGEKKNGLFGNLIALSLGLTPNFKSNFDLAEDAKLQLSKDTYDDDLDNLLAQIGDQYADLFLAAKNLSDAILLSDILRVNTEITKAPLSASMIKRYDEHHQDLTLLKALVRQQLPEKYKEIFFDQSKNGYAGYIDGGASQEEFYKFIKPILEKMDGTEELLVKLNREDLLRKQRTFDNGSIPHQIHLGELHAILRRQEDFYPFLKDNREKIEKILTFRIPYYVGPLARGNSRFAWMTRKSEETITPWNFEEVVDKGASAQSFIERMTNFDKNLPNEKVLPKHSLLYEYFTVYNELTKVKYVTEGMRKPAFLSGEQKKAIVDLLFKTNRKVTVKQLKEDYFKKIECFDSVEISGVEDRFNASLGTYHDLLKIIKDKDFLDNEENEDILEDIVLTLTLFEDREMIEERLKTYAHLFDDKVMKQLKRRRYTGWGRLSRKLINGIRDKQSGKTILDFLKSDGFANRNFMQLIHDDSLTFKEDIQKAQVSGQGDSLHEHIANLAGSPAIKKGILQTVKVVDELVKVMGRHKPENIVIEMARENQTTQKGQKNSRERMKRIEEGIKELGSQILKEHPVENTQLQNEKLYLYYLQNGRDMYVDQELDINRLSDYDVDHIVPQSFLKDDSIDNKVLTRSDKARGKSDNVPSEEVVKKMKNYWRQLLNAKLITQRKFDNLTKAERGGLSELDKAGFIKRQLVETRQITKHVAQILDSRMNTKYDENDKLIREVKVITLKSKLVSDFRKDFQFYKVREINNYHHAHDAYLNAVVGTALIKKYPKLESEFVYGDYKVYDVRKMIAKSEQEIGKATAKYFFYSNIMNFFKTEITLANGEIRKRPLIETNGETGEIVWDKGRDFATVRKVLSMPQVNIVKKTEVQTGGFSKESILPKRNSDKLIARKKDWDPKKYGGFDSPTVAYSVLVVAKVEKGKSKKLKSVKELLGITIMERSSFEKNPIDFLEAKGYKEVKKDLIIKLPKYSLFELENGRKRMLASAGELQKGNELALPSKYVNFLYLASHYEKLKGSPEDNEQKQLFVEQHKHYLDEIIEQISEFSKRVILADANLDKVLSAYNKHRDKPIREQAENIIHLFTLTNLGAPAAFKYFDTTIDRKRYTSTKEVLDATLIHQSITGLYETRIDLSQLGGDGGGGSEAAAKGGGGGLLGRDLLTKLKAQIQFSTEGPQVTWEDRPAMCLVLNLEEEYRLHEKPVPPSIDPSWLQLFPMVWAEKAGMGLANQVPPVVVELKSDASPVAVRQYPMSKEAREGIRPHIQRFLDLGILVPCQSPWNTPLLPVKKPGTNDYRPVQDLREVNKRVQDIHPTVPNPYNLLSSLPPSHTWYSVLDLKDAFFCLKLHPNSQPLFAFEWRDPEKGNTGQLTWTRLPQGFKNSPTLFNEALHRDLASFRALNPQVVMLQYVDDLLVAAPTYRDCKEGTRRLLQELSKLGYRVSAKKAQLCREEVTYLGYLLKGGKRWLTPARKATVMKIPTPTTPRQVREFLGTAGFCRLWIPGFASLAAPLYPLTRPKVPFTWTEAHQEAFGRIKEALLSAPALALPDLTKPFALYVDEKEGVARGVLTQTLGPWRRPVAYLSKKLDPVASGWPTCLKAIAAVALLLKDADKLTLGQNVLVIAPHNLESIVRQPPDRWMTNARMTHYQSLLLNERVSFAPPAILNPATLLPVESDDTPIHICSEILAEETGTRPDLRDQPLPGVPAWYTDGSSFIMDGRRQAGAAIVDNKRTVWASNLPEGTSAQKAELIALTQALRLAEGKSINIYTDSRYAFATAHVHGAIYKQRGWLTSAGKDIKNKEEILALLEAIHLPKRVAIIHCPGHQRGTDPVATGNRKADEAAKQAAQSTRILTETTKNAGKRTADGSEFEKRTADGSEFESPKKKAKVE

SEQ ID NO: 1648 - protein, 2125 aa, synthetic construct
MPAAKRVKLDGGDKKYSIGLDIGTNSVGWAVITDEYKVPSKKFKVLGNTDRHSIKKNLIGALLFDSGETAEATRLKRTARRRYTRRKNRICYLQEIFSNEMAKVDDSFFHRLEESFLVEEDKKHERHPIFGNIVDEVAYHEKYPTIYHLRKKLVDSTDKADLRLIYLALAHMIKFRGHFLIEGDLNPDNSDVDKLFIQLVQTYNQLFEENPINASGVDAKAILSARLSKSRRLENLIAQLPGEKKNGLFGNLIALSLGLTPNFKSNFDLAEDAKLQLSKDTYDDDLDNLLAQIGDQYADLFLAAKNLSDAILLSDILRVNTEITKAPLSASMIKRYDEHHQDLTLLKALVRQQLPEKYKEIFFDQSKNGYAGYIDGGASQEEFYKFIKPILEKMDGTEELLVKLNREDLLRKQRTFDNGSIPHQIHLGELHAILRRQEDFYPFLKDNREKIEKILTFRIPYYVGPLARGNSRFAWMTRKSEETITPWNFEEVVDKGASAQSFIERMTNFDKNLPNEKVLPKHSLLYEYFTVYNELTKVKYVTEGMRKPAFLSGEQKKAIVDLLFKTNRKVTVKQLKEDYFKKIECFDSVEISGVEDRFNASLGTYHDLLKIIKDKDFLDNEENEDILEDIVLTLTLFEDREMIEERLKTYAHLFDDKVMKQLKRRRYTGWGRLSRKLINGIRDKQSGKTILDFLKSDGFANRNFMQLIHDDSLTFKEDIQKAQVSGQGDSLHEHIANLAGSPAIKKGILQTVKVVDELVKVMGRHKPENIVIEMARENQTTQKGQKNSRERMKRIEEGIKELGSQILKEHPVENTQLQNEKLYLYYLQNGRDMYVDQELDINRLSDYDVDHIVPQSFLKDDSIDNKVLTRSDKARGKSDNVPSEEVVKKMKNYWRQLLNAKLITQRKFDNLTKAERGGLSELDKAGFIKRQLVETRQITKHVAQILDSRMNTKYDENDKLIREVKVITLKSKLVSDFRKDFQFYKVREINNYHHAHDAYLNAVVGTALIKKYPKLESEFVYGDYKVYDVRKMIAKSEQEIGKATAKYFFYSNIMNFFKTEITLANGEIRKRPLIETNGETGEIVWDKGRDFATVRKVLSMPQVNIVKKTEVQTGGFSKESILPKRNSDKLIARKKDWDPKKYGGFDSPTVAYSVLVVAKVEKGKSKKLKSVKELLGITIMERSSFEKNPIDFLEAKGYKEVKKDLIIKLPKYSLFELENGRKRMLASAGELQKGNELALPSKYVNFLYLASHYEKLKGSPEDNEQKQLFVEQHKHYLDEIIEQISEFSKRVILADANLDKVLSAYNKHRDKPIREQAENIIHLFTLTNLGAPAAFKYFDTTIDRKRYTSTKEVLDATLIHQSITGLYETRIDLSQLGGDGGGGSPAPGSSGGLLGRDLLTKLKAQIQFSTEGPQVTWEDRPAMCLVLNLEEEYRLHEKPVPPSIDPSWLQLFPMVWAEKAGMGLANQVPPVVVELKSDASPVAVRQYPMSKEAREGIRPHIQRFLDLGILVPCQSPWNTPLLPVKKPGTNDYRPVQDLREVNKRVQDIHPTVPNPYNLLSSLPPSHTWYSVLDLKDAFFCLKLHPNSQPLFAFEWRDPEKGNTGQLTWTRLPQGFKNSPTLFNEALHRDLASFRALNPQVVMLQYVDDLLVAAPTYRDCKEGTRRLLQELSKLGYRVSAKKAQLCREEVTYLGYLLKGGKRWLTPARKATVMKIPTPTTPRQVREFLGTAGFCRLWIPGFASLAAPLYPLTRPKVPFTWTEAHQEAFGRIKEALLSAPALALPDLTKPFALYVDEKEGVARGVLTQTLGPWRRPVAYLSKKLDPVASGWPTCLKAIAAVALLLKDADKLTLGQNVLVIAPHNLESIVRQPPDRWMTNARMTHYQSLLLNERVSFAPPAILNPATLLPVESDDTPIHICSEILAEETGTRPDLRDQPLPGVPAWYTDGSSFIMDGRRQAGAAIVDNKRTVWASNLPEGTSAQKAELIALTQALRLAEGKSINIYTDSRYAFATAHVHGAIYKQRGWLTSAGKDIKNKEEILALLEAIHLPKRVAIIHCPGHQRGTDPVATGNRKADEAAKQAAQSTRILTETTKNAGKRTADGSEFEKRTADGSEFESPKKKAKVE

SEQ ID NO: 1649 - protein, 2149 aa, synthetic construct
MPAAKRVKLDGGDKKYSIGLDIGTNSVGWAVITDEYKVPSKKFKVLGNTDRHSIKKNLIGALLFDSGETAEATRLKRTARRRYTRRKNRICYLQEIFSNEMAKVDDSFFHRLEESFLVEEDKKHERHPIFGNIVDEVAYHEKYPTIYHLRKKLVDSTDKADLRLIYLALAHMIKFRGHFLIEGDLNPDNSDVDKLFIQLVQTYNQLFEENPINASGVDAKAILSARLSKSRRLENLIAQLPGEKKNGLFGNLIALSLGLTPNFKSNFDLAEDAKLQLSKDTYDDDLDNLLAQIGDQYADLFLAAKNLSDAILLSDILRVNTEITKAPLSASMIKRYDEHHQDLTLLKALVRQQLPEKYKEIFFDQSKNGYAGYIDGGASQEEFYKFIKPILEKMDGTEELLVKLNREDLLRKQRTFDNGSIPHQIHLGELHAILRRQEDFYPFLKDNREKIEKILTFRIPYYVGPLARGNSRFAWMTRKSEETITPWNFEEVVDKGASAQSFIERMTNFDKNLPNEKVLPKHSLLYEYFTVYNELTKVKYVTEGMRKPAFLSGEQKKAIVDLLFKTNRKVTVKQLKEDYFKKIECFDSVEISGVEDRFNASLGTYHDLLKIIKDKDFLDNEENEDILEDIVLTLTLFEDREMIEERLKTYAHLFDDKVMKQLKRRRYTGWGRLSRKLINGIRDKQSGKTILDFLKSDGFANRNFMQLIHDDSLTFKEDIQKAQVSGQGDSLHEHIANLAGSPAIKKGILQTVKVVDELVKVMGRHKPENIVIEMARENQTTQKGQKNSRERMKRIEEGIKELGSQILKEHPVENTQLQNEKLYLYYLQNGRDMYVDQELDINRLSDYDVDHIVPQSFLKDDSIDNKVLTRSDKARGKSDNVPSEEVVKKMKNYWRQLLNAKLITQRKFDNLTKAERGGLSELDKAGFIKRQLVETRQITKHVAQILDSRMNTKYDENDKLIREVKVITLKSKLVSDFRKDFQFYKVREINNYHHAHDAYLNAVVGTALIKKYPKLESEFVYGDYKVYDVRKMIAKSEQEIGKATAKYFFYSNIMNFFKTEITLANGEIRKRPLIETNGETGEIVWDKGRDFATVRKVLSMPQVNIVKKTEVQTGGFSKESILPKRNSDKLIARKKDWDPKKYGGFDSPTVAYSVLVVAKVEKGKSKKLKSVKELLGITIMERSSFEKNPIDFLEAKGYKEVKKDLIIKLPKYSLFELENGRKRMLASAGELQKGNELALPSKYVNFLYLASHYEKLKGSPEDNEQKQLFVEQHKHYLDEIIEQISEFSKRVILADANLDKVLSAYNKHRDKPIREQAENIIHLFTLTNLGAPAAFKYFDTTIDRKRYTSTKEVLDATLIHQSITGLYETRIDLSQLGGDGGSGGSSGGSSGSETPGTSESATPESSGGSSGGSSGGLLGRDLLTKLKAQIQFSTEGPQVTWEDRPAMCLVLNLEEEYRLHEKPVPPSIDPSWLQLFPMVWAEKAGMGLANQVPPVVVELKSDASPVAVRQYPMSKEAREGIRPHIQRFLDLGILVPCQSPWNTPLLPVKKPGTNDYRPVQDLREVNKRVQDIHPTVPNPYNLLSSLPPSHTWYSVLDLKDAFFCLKLHPNSQPLFAFEWRDPEKGNTGQLTWTRLPQGFKNSPTLFNEALHRDLASFRALNPQVVMLQYVDDLLVAAPTYRDCKEGTRRLLQELSKLGYRVSAKKAQLCREEVTYLGYLLKGGKRWLTPARKATVMKIPTPTTPRQVREFLGTAGFCRLWIPGFASLAAPLYPLTRPKVPFTWTEAHQEAFGRIKEALLSAPALALPDLTKPFALYVDEKEGVARGVLTQTLGPWRRPVAYLSKKLDPVASGWPTCLKAIAAVALLLKDADKLTLGQNVLVIAPHNLESIVRQPPDRWMTNARMTHYQSLLLNERVSFAPPAILNPATLLPVESDDTPIHICSEILAEETGTRPDLRDQPLPGVPAWYTDGSSFIMDGRRQAGAAIVDNKRTVWASNLPEGTSAQKAELIALTQALRLAEGKSINIYTDSRYAFATAHVHGAIYKQRGWLTSAGKDIKNKEEILALLEAIHLPKRVAIIHCPGHQRGTDPVATGNRKADEAAKQAAQSTRILTETTKNAGKRTADGSEFEKRTADGSEFESPKKKAKVE

SEQ ID NO: 1650 - protein, 2121 aa, synthetic construct
MPAAKRVKLDGGDKKYSIGLDIGTNSVGWAVITDEYKVPSKKFKVLGNTDRHSIKKNLIGALLFDSGETAEATRLKRTARRRYTRRKNRICYLQEIFSNEMAKVDDSFFHRLEESFLVEEDKKHERHPIFGNIVDEVAYHEKYPTIYHLRKKLVDSTDKADLRLIYLALAHMIKFRGHFLIEGDLNPDNSDVDKLFIQLVQTYNQLFEENPINASGVDAKAILSARLSKSRRLENLIAQLPGEKKNGLFGNLIALSLGLTPNFKSNFDLAEDAKLQLSKDTYDDDLDNLLAQIGDQYADLFLAAKNLSDAILLSDILRVNTEITKAPLSASMIKRYDEHHQDLTLLKALVRQQLPEKYKEIFFDQSKNGYAGYIDGGASQEEFYKFIKPILEKMDGTEELLVKLNREDLLRKQRTFDNGSIPHQIHLGELHAILRRQEDFYPFLKDNREKIEKILTFRIPYYVGPLARGNSRFAWMTRKSEETITPWNFEEVVDKGASAQSFIERMTNFDKNLPNEKVLPKHSLLYEYFTVYNELTKVKYVTEGMRKPAFLSGEQKKAIVDLLFKTNRKVTVKQLKEDYFKKIECFDSVEISGVEDRFNASLGTYHDLLKIIKDKDFLDNEENEDILEDIVLTLTLFEDREMIEERLKTYAHLFDDKVMKQLKRRRYTGWGRLSRKLINGIRDKQSGKTILDFLKSDGFANRNFMQLIHDDSLTFKEDIQKAQVSGQGDSLHEHIANLAGSPAIKKGILQTVKVVDELVKVMGRHKPENIVIEMARENQTTQKGQKNSRERMKRIEEGIKELGSQILKEHPVENTQLQNEKLYLYYLQNGRDMYVDQELDINRLSDYDVDHIVPQSFLKDDSIDNKVLTRSDKARGKSDNVPSEEVVKKMKNYWRQLLNAKLITQRKFDNLTKAERGGLSELDKAGFIKRQLVETRQITKHVAQILDSRMNTKYDENDKLIREVKVITLKSKLVSDFRKDFQFYKVREINNYHHAHDAYLNAVVGTALIKKYPKLESEFVYGDYKVYDVRKMIAKSEQEIGKATAKYFFYSNIMNFFKTEITLANGEIRKRPLIETNGETGEIVWDKGRDFATVRKVLSMPQVNIVKKTEVQTGGFSKESILPKRNSDKLIARKKDWDPKKYGGFDSPTVAYSVLVVAKVEKGKSKKLKSVKELLGITIMERSSFEKNPIDFLEAKGYKEVKKDLIIKLPKYSLFELENGRKRMLASAGELQKGNELALPSKYVNFLYLASHYEKLKGSPEDNEQKQLFVEQHKHYLDEIIEQISEFSKRVILADANLDKVLSAYNKHRDKPIREQAENIIHLFTLTNLGAPAAFKYFDTTIDRKRYTSTKEVLDATLIHQSITGLYETRIDLSQLGGDGGGGGGSGGLLGRDLLTKLKAQIQFSTEGPQVTWEDRPAMCLVLNLEEEYRLHEKPVPPSIDPSWLQLFPMVWAEKAGMGLANQVPPVVVELKSDASPVAVRQYPMSKEAREGIRPHIQRFLDLGILVPCQSPWNTPLLPVKKPGTNDYRPVQDLREVNKRVQDIHPTVPNPYNLLSSLPPSHTWYSVLDLKDAFFCLKLHPNSQPLFAFEWRDPEKGNTGQLTWTRLPQGFKNSPTLFNEALHRDLASFRALNPQVVMLQYVDDLLVAAPTYRDCKEGTRRLLQELSKLGYRVSAKKAQLCREEVTYLGYLLKGGKRWLTPARKATVMKIPTPTTPRQVREFLGTAGFCRLWIPGFASLAAPLYPLTRPKVPFTWTEAHQEAFGRIKEALLSAPALALPDLTKPFALYVDEKEGVARGVLTQTLGPWRRPVAYLSKKLDPVASGWPTCLKAIAAVALLLKDADKLTLGQNVLVIAPHNLESIVRQPPDRWMTNARMTHYQSLLLNERVSFAPPAILNPATLLPVESDDTPIHICSEILAEETGTRPDLRDQPLPGVPAWYTDGSSFIMDGRRQAGAAIVDNKRTVWASNLPEGTSAQKAELIALTQALRLAEGKSINIYTDSRYAFATAHVHGAIYKQRGWLTSAGKDIKNKEEILALLEAIHLPKRVAIIHCPGHQRGTDPVATGNRKADEAAKQAAQSTRILTETTKNAGKRTADGSEFEKRTADGSEFESPKKKAKVE

SEQ ID NO: 1651 - protein, 2125 aa, synthetic construct
MPAAKRVKLDGGDKKYSIGLDIGTNSVGWAVITDEYKVPSKKFKVLGNTDRHSIKKNLIGALLFDSGETAEATRLKRTARRRYTRRKNRICYLQEIFSNEMAKVDDSFFHRLEESFLVEEDKKHERHPIFGNIVDEVAYHEKYPTIYHLRKKLVDSTDKADLRLIYLALAHMIKFRGHFLIEGDLNPDNSDVDKLFIQLVQTYNQLFEENPINASGVDAKAILSARLSKSRRLENLIAQLPGEKKNGLFGNLIALSLGLTPNFKSNFDLAEDAKLQLSKDTYDDDLDNLLAQIGDQYADLFLAAKNLSDAILLSDILRVNTEITKAPLSASMIKRYDEHHQDLTLLKALVRQQLPEKYKEIFFDQSKNGYAGYIDGGASQEEFYKFIKPILEKMDGTEELLVKLNREDLLRKQRTFDNGSIPHQIHLGELHAILRRQEDFYPFLKDNREKIEKILTFRIPYYVGPLARGNSRFAWMTRKSEETITPWNFEEVVDKGASAQSFIERMTNFDKNLPNEKVLPKHSLLYEYFTVYNELTKVKYVTEGMRKPAFLSGEQKKAIVDLLFKTNRKVTVKQLKEDYFKKIECFDSVEISGVEDRFNASLGTYHDLLKIIKDKDFLDNEENEDILEDIVLTLTLFEDREMIEERLKTYAHLFDDKVMKQLKRRRYTGWGRLSRKLINGIRDKQSGKTILDFLKSDGFANRNFMQLIHDDSLTFKEDIQKAQVSGQGDSLHEHIANLAGSPAIKKGILQTVKVVDELVKVMGRHKPENIVIEMARENQTTQKGQKNSRERMKRIEEGIKELGSQILKEHPVENTQLQNEKLYLYYLQNGRDMYVDQELDINRLSDYDVDHIVPQSFLKDDSIDNKVLTRSDKARGKSDNVPSEEVVKKMKNYWRQLLNAKLITQRKFDNLTKAERGGLSELDKAGFIKRQLVETRQITKHVAQILDSRMNTKYDENDKLIREVKVITLKSKLVSDFRKDFQFYKVREINNYHHAHDAYLNAVVGTALIKKYPKLESEFVYGDYKVYDVRKMIAKSEQEIGKATAKYFFYSNIMNFFKTEITLANGEIRKRPLIETNGETGEIVWDKGRDFATVRKVLSMPQVNIVKKTEVQTGGFSKESILPKRNSDKLIARKKDWDPKKYGGFDSPTVAYSVLVVAKVEKGKSKKLKSVKELLGITIMERSSFEKNPIDFLEAKGYKEVKKDLIIKLPKYSLFELENGRKRMLASAGELQKGNELALPSKYVNFLYLASHYEKLKGSPEDNEQKQLFVEQHKHYLDEIIEQISEFSKRVILADANLDKVLSAYNKHRDKPIREQAENIIHLFTLTNLGAPAAFKYFDTTIDRKRYTSTKEVLDATLIHQSITGLYETRIDLSQLGGDGGPAPGSSGGSGGLLGRDLLTKLKAQIQFSTEGPQVTWEDRPAMCLVLNLEEEYRLHEKPVPPSIDPSWLQLFPMVWAEKAGMGLANQVPPVVVELKSDASPVAVRQYPMSKEAREGIRPHIQRFLDLGILVPCQSPWNTPLLPVKKPGTNDYRPVQDLREVNKRVQDIHPTVPNPYNLLSSLPPSHTWYSVLDLKDAFFCLKLHPNSQPLFAFEWRDPEKGNTGQLTWTRLPQGFKNSPTLFNEALHRDLASFRALNPQVVMLQYVDDLLVAAPTYRDCKEGTRRLLQELSKLGYRVSAKKAQLCREEVTYLGYLLKGGKRWLTPARKATVMKIPTPTTPRQVREFLGTAGFCRLWIPGFASLAAPLYPLTRPKVPFTWTEAHQEAFGRIKEALLSAPALALPDLTKPFALYVDEKEGVARGVLTQTLGPWRRPVAYLSKKLDPVASGWPTCLKAIAAVALLLKDADKLTLGQNVLVIAPHNLESIVRQPPDRWMTNARMTHYQSLLLNERVSFAPPAILNPATLLPVESDDTPIHICSEILAEETGTRPDLRDQPLPGVPAWYTDGSSFIMDGRRQAGAAIVDNKRTVWASNLPEGTSAQKAELIALTQALRLAEGKSINIYTDSRYAFATAHVHGAIYKQRGWLTSAGKDIKNKEEILALLEAIHLPKRVAIIHCPGHQRGTDPVATGNRKADEAAKQAAQSTRILTETTKNAGKRTADGSEFEKRTADGSEFESPKKKAKVE

SEQ ID NO: 1652 - protein, 2125 aa, synthetic construct
MPAAKRVKLDGGDKKYSIGLDIGTNSVGWAVITDEYKVPSKKFKVLGNTDRHSIKKNLIGALLFDSGETAEATRLKRTARRRYTRRKNRICYLQEIFSNEMAKVDDSFFHRLEESFLVEEDKKHERHPIFGNIVDEVAYHEKYPTIYHLRKKLVDSTDKADLRLIYLALAHMIKFRGHFLIEGDLNPDNSDVDKLFIQLVQTYNQLFEENPINASGVDAKAILSARLSKSRRLENLIAQLPGEKKNGLFGNLIALSLGLTPNFKSNFDLAEDAKLQLSKDTYDDDLDNLLAQIGDQYADLFLAAKNLSDAILLSDILRVNTEITKAPLSASMIKRYDEHHQDLTLLKALVRQQLPEKYKEIFFDQSKNGYAGYIDGGASQEEFYKFIKPILEKMDGTEELLVKLNREDLLRKQRTFDNGSIPHQIHLGELHAILRRQEDFYPFLKDNREKIEKILTFRIPYYVGPLARGNSRFAWMTRKSEETITPWNFEEVVDKGASAQSFIERMTNFDKNLPNEKVLPKHSLLYEYFTVYNELTKVKYVTEGMRKPAFLSGEQKKAIVDLLFKTNRKVTVKQLKEDYFKKIECFDSVEISGVEDRFNASLGTYHDLLKIIKDKDFLDNEENEDILEDIVLTLTLFEDREMIEERLKTYAHLFDDKVMKQLKRRRYTGWGRLSRKLINGIRDKQSGKTILDFLKSDGFANRNFMQLIHDDSLTFKEDIQKAQVSGQGDSLHEHIANLAGSPAIKKGILQTVKVVDELVKVMGRHKPENIVIEMARENQTTQKGQKNSRERMKRIEEGIKELGSQILKEHPVENTQLQNEKLYLYYLQNGRDMYVDQELDINRLSDYDVDHIVPQSFLKDDSIDNKVLTRSDKARGKSDNVPSEEVVKKMKNYWRQLLNAKLITQRKFDNLTKAERGGLSELDKAGFIKRQLVETRQITKHVAQILDSRMNTKYDENDKLIREVKVITLKSKLVSDFRKDFQFYKVREINNYHHAHDAYLNAVVGTALIKKYPKLESEFVYGDYKVYDVRKMIAKSEQEIGKATAKYFFYSNIMNFFKTEITLANGEIRKRPLIETNGETGEIVWDKGRDFATVRKVLSMPQVNIVKKTEVQTGGFSKESILPKRNSDKLIARKKDWDPKKYGGFDSPTVAYSVLVVAKVEKGKSKKLKSVKELLGITIMERSSFEKNPIDFLEAKGYKEVKKDLIIKLPKYSLFELENGRKRMLASAGELQKGNELALPSKYVNFLYLASHYEKLKGSPEDNEQKQLFVEQHKHYLDEIIEQISEFSKRVILADANLDKVLSAYNKHRDKPIREQAENIIHLFTLTNLGAPAAFKYFDTTIDRKRYTSTKEVLDATLIHQSITGLYETRIDLSQLGGDGGPAPGGSGGGGGLLGRDLLTKLKAQIQFSTEGPQVTWEDRPAMCLVLNLEEEYRLHEKPVPPSIDPSWLQLFPMVWAEKAGMGLANQVPPVVVELKSDASPVAVRQYPMSKEAREGIRPHIQRFLDLGILVPCQSPWNTPLLPVKKPGTNDYRPVQDLREVNKRVQDIHPTVPNPYNLLSSLPPSHTWYSVLDLKDAFFCLKLHPNSQPLFAFEWRDPEKGNTGQLTWTRLPQGFKNSPTLFNEALHRDLASFRALNPQVVMLQYVDDLLVAAPTYRDCKEGTRRLLQELSKLGYRVSAKKAQLCREEVTYLGYLLKGGKRWLTPARKATVMKIPTPTTPRQVREFLGTAGFCRLWIPGFASLAAPLYPLTRPKVPFTWTEAHQEAFGRIKEALLSAPALALPDLTKPFALYVDEKEGVARGVLTQTLGPWRRPVAYLSKKLDPVASGWPTCLKAIAAVALLLKDADKLTLGQNVLVIAPHNLESIVRQPPDRWMTNARMTHYQSLLLNERVSFAPPAILNPATLLPVESDDTPIHICSEILAEETGTRPDLRDQPLPGVPAWYTDGSSFIMDGRRQAGAAIVDNKRTVWASNLPEGTSAQKAELIALTQALRLAEGKSINIYTDSRYAFATAHVHGAIYKQRGWLTSAGKDIKNKEEILALLEAIHLPKRVAIIHCPGHQRGTDPVATGNRKADEAAKQAAQSTRILTETTKNAGKRTADGSEFEKRTADGSEFESPKKKAKVE

SEQ ID NO: 1653 - protein, 2125 aa, synthetic construct
MPAAKRVKLDGGDKKYSIGLDIGTNSVGWAVITDEYKVPSKKFKVLGNTDRHSIKKNLIGALLFDSGETAEATRLKRTARRRYTRRKNRICYLQEIFSNEMAKVDDSFFHRLEESFLVEEDKKHERHPIFGNIVDEVAYHEKYPTIYHLRKKLVDSTDKADLRLIYLALAHMIKFRGHFLIEGDLNPDNSDVDKLFIQLVQTYNQLFEENPINASGVDAKAILSARLSKSRRLENLIAQLPGEKKNGLFGNLIALSLGLTPNFKSNFDLAEDAKLQLSKDTYDDDLDNLLAQIGDQYADLFLAAKNLSDAILLSDILRVNTEITKAPLSASMIKRYDEHHQDLTLLKALVRQQLPEKYKEIFFDQSKNGYAGYIDGGASQEEFYKFIKPILEKMDGTEELLVKLNREDLLRKQRTFDNGSIPHQIHLGELHAILRRQEDFYPFLKDNREKIEKILTFRIPYYVGPLARGNSRFAWMTRKSEETITPWNFEEVVDKGASAQSFIERMTNFDKNLPNEKVLPKHSLLYEYFTVYNELTKVKYVTEGMRKPAFLSGEQKKAIVDLLFKTNRKVTVKQLKEDYFKKIECFDSVEISGVEDRFNASLGTYHDLLKIIKDKDFLDNEENEDILEDIVLTLTLFEDREMIEERLKTYAHLFDDKVMKQLKRRRYTGWGRLSRKLINGIRDKQSGKTILDFLKSDGFANRNFMQLIHDDSLTFKEDIQKAQVSGQGDSLHEHIANLAGSPAIKKGILQTVKVVDELVKVMGRHKPENIVIEMARENQTTQKGQKNSRERMKRIEEGIKELGSQILKEHPVENTQLQNEKLYLYYLQNGRDMYVDQELDINRLSDYDVDHIVPQSFLKDDSIDNKVLTRSDKARGKSDNVPSEEVVKKMKNYWRQLLNAKLITQRKFDNLTKAERGGLSELDKAGFIKRQLVETRQITKHVAQILDSRMNTKYDENDKLIREVKVITLKSKLVSDFRKDFQFYKVREINNYHHAHDAYLNAVVGTALIKKYPKLESEFVYGDYKVYDVRKMIAKSEQEIGKATAKYFFYSNIMNFFKTEITLANGEIRKRPLIETNGETGEIVWDKGRDFATVRKVLSMPQVNIVKKTEVQTGGFSKESILPKRNSDKLIARKKDWDPKKYGGFDSPTVAYSVLVVAKVEKGKSKKLKSVKELLGITIMERSSFEKNPIDFLEAKGYKEVKKDLIIKLPKYSLFELENGRKRMLASAGELQKGNELALPSKYVNFLYLASHYEKLKGSPEDNEQKQLFVEQHKHYLDEIIEQISEFSKRVILADANLDKVLSAYNKHRDKPIREQAENIIHLFTLTNLGAPAAFKYFDTTIDRKRYTSTKEVLDATLIHQSITGLYETRIDLSQLGGDGGGGGGGSPAPGGLLGRDLLTKLKAQIQFSTEGPQVTWEDRPAMCLVLNLEEEYRLHEKPVPPSIDPSWLQLFPMVWAEKAGMGLANQVPPVVVELKSDASPVAVRQYPMSKEAREGIRPHIQRFLDLGILVPCQSPWNTPLLPVKKPGTNDYRPVQDLREVNKRVQDIHPTVPNPYNLLSSLPPSHTWYSVLDLKDAFFCLKLHPNSQPLFAFEWRDPEKGNTGQLTWTRLPQGFKNSPTLFNEALHRDLASFRALNPQVVMLQYVDDLLVAAPTYRDCKEGTRRLLQELSKLGYRVSAKKAQLCREEVTYLGYLLKGGKRWLTPARKATVMKIPTPTTPRQVREFLGTAGFCRLWIPGFASLAAPLYPLTRPKVPFTWTEAHQEAFGRIKEALLSAPALALPDLTKPFALYVDEKEGVARGVLTQTLGPWRRPVAYLSKKLDPVASGWPTCLKAIAAVALLLKDADKLTLGQNVLVIAPHNLESIVRQPPDRWMTNARMTHYQSLLLNERVSFAPPAILNPATLLPVESDDTPIHICSEILAEETGTRPDLRDQPLPGVPAWYTDGSSFIMDGRRQAGAAIVDNKRTVWASNLPEGTSAQKAELIALTQALRLAEGKSINIYTDSRYAFATAHVHGAIYKQRGWLTSAGKDIKNKEEILALLEAIHLPKRVAIIHCPGHQRGTDPVATGNRKADEAAKQAAQSTRILTETTKNAGKRTADGSEFEKRTADGSEFESPKKKAKVE

SEQ ID NO: 1654 - protein, 2127 aa, synthetic construct
MPAAKRVKLDGGDKKYSIGLDIGTNSVGWAVITDEYKVPSKKFKVLGNTDRHSIKKNLIGALLFDSGETAEATRLKRTARRRYTRRKNRICYLQEIFSNEMAKVDDSFFHRLEESFLVEEDKKHERHPIFGNIVDEVAYHEKYPTIYHLRKKLVDSTDKADLRLIYLALAHMIKFRGHFLIEGDLNPDNSDVDKLFIQLVQTYNQLFEENPINASGVDAKAILSARLSKSRRLENLIAQLPGEKKNGLFGNLIALSLGLTPNFKSNFDLAEDAKLQLSKDTYDDDLDNLLAQIGDQYADLFLAAKNLSDAILLSDILRVNTEITKAPLSASMIKRYDEHHQDLTLLKALVRQQLPEKYKEIFFDQSKNGYAGYIDGGASQEEFYKFIKPILEKMDGTEELLVKLNREDLLRKQRTFDNGSIPHQIHLGELHAILRRQEDFYPFLKDNREKIEKILTFRIPYYVGPLARGNSRFAWMTRKSEETITPWNFEEVVDKGASAQSFIERMTNFDKNLPNEKVLPKHSLLYEYFTVYNELTKVKYVTEGMRKPAFLSGEQKKAIVDLLFKTNRKVTVKQLKEDYFKKIECFDSVEISGVEDRFNASLGTYHDLLKIIKDKDFLDNEENEDILEDIVLTLTLFEDREMIEERLKTYAHLFDDKVMKQLKRRRYTGWGRLSRKLINGIRDKQSGKTILDFLKSDGFANRNFMQLIHDDSLTFKEDIQKAQVSGQGDSLHEHIANLAGSPAIKKGILQTVKVVDELVKVMGRHKPENIVIEMARENQTTQKGQKNSRERMKRIEEGIKELGSQILKEHPVENTQLQNEKLYLYYLQNGRDMYVDQELDINRLSDYDVDHIVPQSFLKDDSIDNKVLTRSDKARGKSDNVPSEEVVKKMKNYWRQLLNAKLITQRKFDNLTKAERGGLSELDKAGFIKRQLVETRQITKHVAQILDSRMNTKYDENDKLIREVKVITLKSKLVSDFRKDFQFYKVREINNYHHAHDAYLNAVVGTALIKKYPKLESEFVYGDYKVYDVRKMIAKSEQEIGKATAKYFFYSNIMNFFKTEITLANGEIRKRPLIETNGETGEIVWDKGRDFATVRKVLSMPQVNIVKKTEVQTGGFSKESILPKRNSDKLIARKKDWDPKKYGGFDSPTVAYSVLVVAKVEKGKSKKLKSVKELLGITIMERSSFEKNPIDFLEAKGYKEVKKDLIIKLPKYSLFELENGRKRMLASAGELQKGNELALPSKYVNFLYLASHYEKLKGSPEDNEQKQLFVEQHKHYLDEIIEQISEFSKRVILADANLDKVLSAYNKHRDKPIREQAENIIHLFTLTNLGAPAAFKYFDTTIDRKRYTSTKEVLDATLIHQSITGLYETRIDLSQLGGDGGGGSEAAAKPAPGGLLGRDLLTKLKAQIQFSTEGPQVTWEDRPAMCLVLNLEEEYRLHEKPVPPSIDPSWLQLFPMVWAEKAGMGLANQVPPVVVELKSDASPVAVRQYPMSKEAREGIRPHIQRFLDLGILVPCQSPWNTPLLPVKKPGTNDYRPVQDLREVNKRVQDIHPTVPNPYNLLSSLPPSHTWYSVLDLKDAFFCLKLHPNSQPLFAFEWRDPEKGNTGQLTWTRLPQGFKNSPTLFNEALHRDLASFRALNPQVVMLQYVDDLLVAAPTYRDCKEGTRRLLQELSKLGYRVSAKKAQLCREEVTYLGYLLKGGKRWLTPARKATVMKIPTPTTPRQVREFLGTAGFCRLWIPGFASLAAPLYPLTRPKVPFTWTEAHQEAFGRIKEALLSAPALALPDLTKPFALYVDEKEGVARGVLTQTLGPWRRPVAYLSKKLDPVASGWPTCLKAIAAVALLLKDADKLTLGQNVLVIAPHNLESIVRQPPDRWMTNARMTHYQSLLLNERVSFAPPAILNPATLLPVESDDTPIHICSEILAEETGTRPDLRDQPLPGVPAWYTDGSSFIMDGRRQAGAAIVDNKRTVWASNLPEGTSAQKAELIALTQALRLAEGKSINIYTDSRYAFATAHVHGAIYKQRGWLTSAGKDIKNKEEILALLEAIHLPKRVAIIHCPGHQRGTDPVATGNRKADEAAKQAAQSTRILTETTKNAGKRTADGSEFEKRTADGSEFESPKKKAKVE

SEQ ID NO: 1655 - protein, 2125 aa, synthetic construct
MPAAKRVKLDGGDKKYSIGLDIGTNSVGWAVITDEYKVPSKKFKVLGNTDRHSIKKNLIGALLFDSGETAEATRLKRTARRRYTRRKNRICYLQEIFSNEMAKVDDSFFHRLEESFLVEEDKKHERHPIFGNIVDEVAYHEKYPTIYHLRKKLVDSTDKADLRLIYLALAHMIKFRGHFLIEGDLNPDNSDVDKLFIQLVQTYNQLFEENPINASGVDAKAILSARLSKSRRLENLIAQLPGEKKNGLFGNLIALSLGLTPNFKSNFDLAEDAKLQLSKDTYDDDLDNLLAQIGDQYADLFLAAKNLSDAILLSDILRVNTEITKAPLSASMIKRYDEHHQDLTLLKALVRQQLPEKYKEIFFDQSKNGYAGYIDGGASQEEFYKFIKPILEKMDGTEELLVKLNREDLLRKQRTFDNGSIPHQIHLGELHAILRRQEDFYPFLKDNREKIEKILTFRIPYYVGPLARGNSRFAWMTRKSEETITPWNFEEVVDKGASAQSFIERMTNFDKNLPNEKVLPKHSLLYEYFTVYNELTKVKYVTEGMRKPAFLSGEQKKAIVDLLFKTNRKVTVKQLKEDYFKKIECFDSVEISGVEDRFNASLGTYHDLLKIIKDKDFLDNEENEDILEDIVLTLTLFEDREMIEERLKTYAHLFDDKVMKQLKRRRYTGWGRLSRKLINGIRDKQSGKTILDFLKSDGFANRNFMQLIHDDSLTFKEDIQKAQVSGQGDSLHEHIANLAGSPAIKKGILQTVKVVDELVKVMGRHKPENIVIEMARENQTTQKGQKNSRERMKRIEEGIKELGSQILKEHPVENTQLQNEKLYLYYLQNGRDMYVDQELDINRLSDYDVDHIVPQSFLKDDSIDNKVLTRSDKARGKSDNVPSEEVVKKMKNYWRQLLNAKLITQRKFDNLTKAERGGLSELDKAGFIKRQLVETRQITKHVAQILDSRMNTKYDENDKLIREVKVITLKSKLVSDFRKDFQFYKVREINNYHHAHDAYLNAVVGTALIKKYPKLESEFVYGDYKVYDVRKMIAKSEQEIGKATAKYFFYSNIMNFFKTEITLANGEIRKRPLIETNGETGEIVWDKGRDFATVRKVLSMPQVNIVKKTEVQTGGFSKESILPKRNSDKLIARKKDWDPKKYGGFDSPTVAYSVLVVAKVEKGKSKKLKSVKELLGITIMERSSFEKNPIDFLEAKGYKEVKKDLIIKLPKYSLFELENGRKRMLASAGELQKGNELALPSKYVNFLYLASHYEKLKGSPEDNEQKQLFVEQHKHYLDEIIEQISEFSKRVILADANLDKVLSAYNKHRDKPIREQAENIIHLFTLTNLGAPAAFKYFDTTIDRKRYTSTKEVLDATLIHQSITGLYETRIDLSQLGGDGGGGSGGSGGSGGLLGRDLLTKLKAQIQFSTEGPQVTWEDRPAMCLVLNLEEEYRLHEKPVPPSIDPSWLQLFPMVWAEKAGMGLANQVPPVVVELKSDASPVAVRQYPMSKEAREGIRPHIQRFLDLGILVPCQSPWNTPLLPVKKPGTNDYRPVQDLREVNKRVQDIHPTVPNPYNLLSSLPPSHTWYSVLDLKDAFFCLKLHPNSQPLFAFEWRDPEKGNTGQLTWTRLPQGFKNSPTLFNEALHRDLASFRALNPQVVMLQYVDDLLVAAPTYRDCKEGTRRLLQELSKLGYRVSAKKAQLCREEVTYLGYLLKGGKRWLTPARKATVMKIPTPTTPRQVREFLGTAGFCRLWIPGFASLAAPLYPLTRPKVPFTWTEAHQEAFGRIKEALLSAPALALPDLTKPFALYVDEKEGVARGVLTQTLGPWRRPVAYLSKKLDPVASGWPTCLKAIAAVALLLKDADKLTLGQNVLVIAPHNLESIVRQPPDRWMTNARMTHYQSLLLNERVSFAPPAILNPATLLPVESDDTPIHICSEILAEETGTRPDLRDQPLPGVPAWYTDGSSFIMDGRRQAGAAIVDNKRTVWASNLPEGTSAQKAELIALTQALRLAEGKSINIYTDSRYAFATAHVHGAIYKQRGWLTSAGKDIKNKEEILALLEAIHLPKRVAIIHCPGHQRGTDPVATGNRKADEAAKQAAQSTRILTETTKNAGKRTADGSEFEKRTADGSEFESPKKKAKVE

SEQ ID NO: 1656 - protein, 2127 aa, synthetic construct
MPAAKRVKLDGGDKKYSIGLDIGTNSVGWAVITDEYKVPSKKFKVLGNTDRHSIKKNLIGALLFDSGETAEATRLKRTARRRYTRRKNRICYLQEIFSNEMAKVDDSFFHRLEESFLVEEDKKHERHPIFGNIVDEVAYHEKYPTIYHLRKKLVDSTDKADLRLIYLALAHMIKFRGHFLIEGDLNPDNSDVDKLFIQLVQTYNQLFEENPINASGVDAKAILSARLSKSRRLENLIAQLPGEKKNGLFGNLIALSLGLTPNFKSNFDLAEDAKLQLSKDTYDDDLDNLLAQIGDQYADLFLAAKNLSDAILLSDILRVNTEITKAPLSASMIKRYDEHHQDLTLLKALVRQQLPEKYKEIFFDQSKNGYAGYIDGGASQEEFYKFIKPILEKMDGTEELLVKLNREDLLRKQRTFDNGSIPHQIHLGELHAILRRQEDFYPFLKDNREKIEKILTFRIPYYVGPLARGNSRFAWMTRKSEETITPWNFEEVVDKGASAQSFIERMTNFDKNLPNEKVLPKHSLLYEYFTVYNELTKVKYVTEGMRKPAFLSGEQKKAIVDLLFKTNRKVTVKQLKEDYFKKIECFDSVEISGVEDRFNASLGTYHDLLKIIKDKDFLDNEENEDILEDIVLTLTLFEDREMIEERLKTYAHLFDDKVMKQLKRRRYTGWGRLSRKLINGIRDKQSGKTILDFLKSDGFANRNFMQLIHDDSLTFKEDIQKAQVSGQGDSLHEHIANLAGSPAIKKGILQTVKVVDELVKVMGRHKPENIVIEMARENQTTQKGQKNSRERMKRIEEGIKELGSQILKEHPVENTQLQNEKLYLYYLQNGRDMYVDQELDINRLSDYDVDHIVPQSFLKDDSIDNKVLTRSDKARGKSDNVPSEEVVKKMKNYWRQLLNAKLITQRKFDNLTKAERGGLSELDKAGFIKRQLVETRQITKHVAQILDSRMNTKYDENDKLIREVKVITLKSKLVSDFRKDFQFYKVREINNYHHAHDAYLNAVVGTALIKKYPKLESEFVYGDYKVYDVRKMIAKSEQEIGKATAKYFFYSNIMNFFKTEITLANGEIRKRPLIETNGETGEIVWDKGRDFATVRKVLSMPQVNIVKKTEVQTGGFSKESILPKRNSDKLIARKKDWDPKKYGGFDSPTVAYSVLVVAKVEKGKSKKLKSVKELLGITIMERSSFEKNPIDFLEAKGYKEVKKDLIIKLPKYSLFELENGRKRMLASAGELQKGNELALPSKYVNFLYLASHYEKLKGSPEDNEQKQLFVEQHKHYLDEIIEQISEFSKRVILADANLDKVLSAYNKHRDKPIREQAENIIHLFTLTNLGAPAAFKYFDTTIDRKRYTSTKEVLDATLIHQSITGLYETRIDLSQLGGDGGPAPEAAAKGSSGGLLGRDLLTKLKAQIQFSTEGPQVTWEDRPAMCLVLNLEEEYRLHEKPVPPSIDPSWLQLFPMVWAEKAGMGLANQVPPVVVELKSDASPVAVRQYPMSKEAREGIRPHIQRFLDLGILVPCQSPWNTPLLPVKKPGTNDYRPVQDLREVNKRVQDIHPTVPNPYNLLSSLPPSHTWYSVLDLKDAFFCLKLHPNSQPLFAFEWRDPEKGNTGQLTWTRLPQGFKNSPTLFNEALHRDLASFRALNPQVVMLQYVDDLLVAAPTYRDCKEGTRRLLQELSKLGYRVSAKKAQLCREEVTYLGYLLKGGKRWLTPARKATVMKIPTPTTPRQVREFLGTAGFCRLWIPGFASLAAPLYPLTRPKVPFTWTEAHQEAFGRIKEALLSAPALALPDLTKPFALYVDEKEGVARGVLTQTLGPWRRPVAYLSKKLDPVASGWPTCLKAIAAVALLLKDADKLTLGQNVLVIAPHNLESIVRQPPDRWMTNARMTHYQSLLLNERVSFAPPAILNPATLLPVESDDTPIHICSEILAEETGTRPDLRDQPLPGVPAWYTDGSSFIMDGRRQAGAAIVDNKRTVWASNLPEGTSAQKAELIALTQALRLAEGKSINIYTDSRYAFATAHVHGAIYKQRGWLTSAGKDIKNKEEILALLEAIHLPKRVAIIHCPGHQRGTDPVATGNRKADEAAKQAAQSTRILTETTKNAGKRTADGSEFEKRTADGSEFESPKKKAKVE

SEQ ID NO: 1657 - protein, 2122 aa, synthetic construct
MPAAKRVKLDGGDKKYSIGLDIGTNSVGWAVITDEYKVPSKKFKVLGNTDRHSIKKNLIGALLFDSGETAEATRLKRTARRRYTRRKNRICYLQEIFSNEMAKVDDSFFHRLEESFLVEEDKKHERHPIFGNIVDEVAYHEKYPTIYHLRKKLVDSTDKADLRLIYLALAHMIKFRGHFLIEGDLNPDNSDVDKLFIQLVQTYNQLFEENPINASGVDAKAILSARLSKSRRLENLIAQLPGEKKNGLFGNLIALSLGLTPNFKSNFDLAEDAKLQLSKDTYDDDLDNLLAQIGDQYADLFLAAKNLSDAILLSDILRVNTEITKAPLSASMIKRYDEHHQDLTLLKALVRQQLPEKYKEIFFDQSKNGYAGYIDGGASQEEFYKFIKPILEKMDGTEELLVKLNREDLLRKQRTFDNGSIPHQIHLGELHAILRRQEDFYPFLKDNREKIEKILTFRIPYYVGPLARGNSRFAWMTRKSEETITPWNFEEVVDKGASAQSFIERMTNFDKNLPNEKVLPKHSLLYEYFTVYNELTKVKYVTEGMRKPAFLSGEQKKAIVDLLFKTNRKVTVKQLKEDYFKKIECFDSVEISGVEDRFNASLGTYHDLLKIIKDKDFLDNEENEDILEDIVLTLTLFEDREMIEERLKTYAHLFDDKVMKQLKRRRYTGWGRLSRKLINGIRDKQSGKTILDFLKSDGFANRNFMQLIHDDSLTFKEDIQKAQVSGQGDSLHEHIANLAGSPAIKKGILQTVKVVDELVKVMGRHKPENIVIEMARENQTTQKGQKNSRERMKRIEEGIKELGSQILKEHPVENTQLQNEKLYLYYLQNGRDMYVDQELDINRLSDYDVDHIVPQSFLKDDSIDNKVLTRSDKARGKSDNVPSEEVVKKMKNYWRQLLNAKLITQRKFDNLTKAERGGLSELDKAGFIKRQLVETRQITKHVAQILDSRMNTKYDENDKLIREVKVITLKSKLVSDFRKDFQFYKVREINNYHHAHDAYLNAVVGTALIKKYPKLESEFVYGDYKVYDVRKMIAKSEQEIGKATAKYFFYSNIMNFFKTEITLANGEIRKRPLIETNGETGEIVWDKGRDFATVRKVLSMPQVNIVKKTEVQTGGFSKESILPKRNSDKLIARKKDWDPKKYGGFDSPTVAYSVLVVAKVEKGKSKKLKSVKELLGITIMERSSFEKNPIDFLEAKGYKEVKKDLIIKLPKYSLFELENGRKRMLASAGELQKGNELALPSKYVNFLYLASHYEKLKGSPEDNEQKQLFVEQHKHYLDEIIEQISEFSKRVILADANLDKVLSAYNKHRDKPIREQAENIIHLFTLTNLGAPAAFKYFDTTIDRKRYTSTKEVLDATLIHQSITGLYETRIDLSQLGGDGGGGGGSSGGLLGRDLLTKLKAQIQFSTEGPQVTWEDRPAMCLVLNLEEEYRLHEKPVPPSIDPSWLQLFPMVWAEKAGMGLANQVPPVVVELKSDASPVAVRQYPMSKEAREGIRPHIQRFLDLGILVPCQSPWNTPLLPVKKPGTNDYRPVQDLREVNKRVQDIHPTVPNPYNLLSSLPPSHTWYSVLDLKDAFFCLKLHPNSQPLFAFEWRDPEKGNTGQLTWTRLPQGFKNSPTLFNEALHRDLASFRALNPQVVMLQYVDDLLVAAPTYRDCKEGTRRLLQELSKLGYRVSAKKAQLCREEVTYLGYLLKGGKRWLTPARKATVMKIPTPTTPRQVREFLGTAGFCRLWIPGFASLAAPLYPLTRPKVPFTWTEAHQEAFGRIKEALLSAPALALPDLTKPFALYVDEKEGVARGVLTQTLGPWRRPVAYLSKKLDPVASGWPTCLKAIAAVALLLKDADKLTLGQNVLVIAPHNLESIVRQPPDRWMTNARMTHYQSLLLNERVSFAPPAILNPATLLPVESDDTPIHICSEILAEETGTRPDLRDQPLPGVPAWYTDGSSFIMDGRRQAGAAIVDNKRTVWASNLPEGTSAQKAELIALTQALRLAEGKSINIYTDSRYAFATAHVHGAIYKQRGWLTSAGKDIKNKEEILALLEAIHLPKRVAIIHCPGHQRGTDPVATGNRKADEAAKQAAQSTRILTETTKNAGKRTADGSEFEKRTADGSEFESPKKKAKVE

SEQ ID NO: 1658 - protein, 2125 aa, synthetic construct
MPAAKRVKLDGGDKKYSIGLDIGTNSVGWAVITDEYKVPSKKFKVLGNTDRHSIKKNLIGALLFDSGETAEATRLKRTARRRYTRRKNRICYLQEIFSNEMAKVDDSFFHRLEESFLVEEDKKHERHPIFGNIVDEVAYHEKYPTIYHLRKKLVDSTDKADLRLIYLALAHMIKFRGHFLIEGDLNPDNSDVDKLFIQLVQTYNQLFEENPINASGVDAKAILSARLSKSRRLENLIAQLPGEKKNGLFGNLIALSLGLTPNFKSNFDLAEDAKLQLSKDTYDDDLDNLLAQIGDQYADLFLAAKNLSDAILLSDILRVNTEITKAPLSASMIKRYDEHHQDLTLLKALVRQQLPEKYKEIFFDQSKNGYAGYIDGGASQEEFYKFIKPILEKMDGTEELLVKLNREDLLRKQRTFDNGSIPHQIHLGELHAILRRQEDFYPFLKDNREKIEKILTFRIPYYVGPLARGNSRFAWMTRKSEETITPWNFEEVVDKGASAQSFIERMTNFDKNLPNEKVLPKHSLLYEYFTVYNELTKVKYVTEGMRKPAFLSGEQKKAIVDLLFKTNRKVTVKQLKEDYFKKIECFDSVEISGVEDRFNASLGTYHDLLKIIKDKDFLDNEENEDILEDIVLTLTLFEDREMIEERLKTYAHLFDDKVMKQLKRRRYTGWGRLSRKLINGIRDKQSGKTILDFLKSDGFANRNFMQLIHDDSLTFKEDIQKAQVSGQGDSLHEHIANLAGSPAIKKGILQTVKVVDELVKVMGRHKPENIVIEMARENQTTQKGQKNSRERMKRIEEGIKELGSQILKEHPVENTQLQNEKLYLYYLQNGRDMYVDQELDINRLSDYDVDHIVPQSFLKDDSIDNKVLTRSDKARGKSDNVPSEEVVKKMKNYWRQLLNAKLITQRKFDNLTKAERGGLSELDKAGFIKRQLVETRQITKHVAQILDSRMNTKYDENDKLIREVKVITLKSKLVSDFRKDFQFYKVREINNYHHAHDAYLNAVVGTALIKKYPKLESEFVYGDYKVYDVRKMIAKSEQEIGKATAKYFFYSNIMNFFKTEITLANGEIRKRPLIETNGETGEIVWDKGRDFATVRKVLSMPQVNIVKKTEVQTGGFSKESILPKRNSDKLIARKKDWDPKKYGGFDSPTVAYSVLVVAKVEKGKSKKLKSVKELLGITIMERSSFEKNPIDFLEAKGYKEVKKDLIIKLPKYSLFELENGRKRMLASAGELQKGNELALPSKYVNFLYLASHYEKLKGSPEDNEQKQLFVEQHKHYLDEIIEQISEFSKRVILADANLDKVLSAYNKHRDKPIREQAENIIHLFTLTNLGAPAAFKYFDTTIDRKRYTSTKEVLDATLIHQSITGLYETRIDLSQLGGDGGPAPGGSGSSGGLLGRDLLTKLKAQIQFSTEGPQVTWEDRPAMCLVLNLEEEYRLHEKPVPPSIDPSWLQLFPMVWAEKAGMGLANQVPPVVVELKSDASPVAVRQYPMSKEAREGIRPHIQRFLDLGILVPCQSPWNTPLLPVKKPGTNDYRPVQDLREVNKRVQDIHPTVPNPYNLLSSLPPSHTWYSVLDLKDAFFCLKLHPNSQPLFAFEWRDPEKGNTGQLTWTRLPQGFKNSPTLFNEALHRDLASFRALNPQVVMLQYVDDLLVAAPTYRDCKEGTRRLLQELSKLGYRVSAKKAQLCREEVTYLGYLLKGGKRWLTPARKATVMKIPTPTTPRQVREFLGTAGFCRLWIPGFASLAAPLYPLTRPKVPFTWTEAHQEAFGRIKEALLSAPALALPDLTKPFALYVDEKEGVARGVLTQTLGPWRRPVAYLSKKLDPVASGWPTCLKAIAAVALLLKDADKLTLGQNVLVIAPHNLESIVRQPPDRWMTNARMTHYQSLLLNERVSFAPPAILNPATLLPVESDDTPIHICSEILAEETGTRPDLRDQPLPGVPAWYTDGSSFIMDGRRQAGAAIVDNKRTVWASNLPEGTSAQKAELIALTQALRLAEGKSINIYTDSRYAFATAHVHGAIYKQRGWLTSAGKDIKNKEEILALLEAIHLPKRVAIIHCPGHQRGTDPVATGNRKADEAAKQAAQSTRILTETTKNAGKRTADGSEFEKRTADGSEFESPKKKAKVE

SEQ ID NO: 1659 - protein, 2127 aa, synthetic construct
MPAAKRVKLDGGDKKYSIGLDIGTNSVGWAVITDEYKVPSKKFKVLGNTDRHSIKKNLIGALLFDSGETAEATRLKRTARRRYTRRKNRICYLQEIFSNEMAKVDDSFFHRLEESFLVEEDKKHERHPIFGNIVDEVAYHEKYPTIYHLRKKLVDSTDKADLRLIYLALAHMIKFRGHFLIEGDLNPDNSDVDKLFIQLVQTYNQLFEENPINASGVDAKAILSARLSKSRRLENLIAQLPGEKKNGLFGNLIALSLGLTPNFKSNFDLAEDAKLQLSKDTYDDDLDNLLAQIGDQYADLFLAAKNLSDAILLSDILRVNTEITKAPLSASMIKRYDEHHQDLTLLKALVRQQLPEKYKEIFFDQSKNGYAGYIDGGASQEEFYKFIKPILEKMDGTEELLVKLNREDLLRKQRTFDNGSIPHQIHLGELHAILRRQEDFYPFLKDNREKIEKILTFRIPYYVGPLARGNSRFAWMTRKSEETITPWNFEEVVDKGASAQSFIERMTNFDKNLPNEKVLPKHSLLYEYFTVYNELTKVKYVTEGMRKPAFLSGEQKKAIVDLLFKTNRKVTVKQLKEDYFKKIECFDSVEISGVEDRFNASLGTYHDLLKIIKDKDFLDNEENEDILEDIVLTLTLFEDREMIEERLKTYAHLFDDKVMKQLKRRRYTGWGRLSRKLINGIRDKQSGKTILDFLKSDGFANRNFMQLIHDDSLTFKEDIQKAQVSGQGDSLHEHIANLAGSPAIKKGILQTVKVVDELVKVMGRHKPENIVIEMARENQTTQKGQKNSRERMKRIEEGIKELGSQILKEHPVENTQLQNEKLYLYYLQNGRDMYVDQELDINRLSDYDVDHIVPQSFLKDDSIDNKVLTRSDKARGKSDNVPSEEVVKKMKNYWRQLLNAKLITQRKFDNLTKAERGGLSELDKAGFIKRQLVETRQITKHVAQILDSRMNTKYDENDKLIREVKVITLKSKLVSDFRKDFQFYKVREINNYHHAHDAYLNAVVGTALIKKYPKLESEFVYGDYKVYDVRKMIAKSEQEIGKATAKYFFYSNIMNFFKTEITLANGEIRKRPLIETNGETGEIVWDKGRDFATVRKVLSMPQVNIVKKTEVQTGGFSKESILPKRNSDKLIARKKDWDPKKYGGFDSPTVAYSVLVVAKVEKGKSKKLKSVKELLGITIMERSSFEKNPIDFLEAKGYKEVKKDLIIKLPKYSLFELENGRKRMLASAGELQKGNELALPSKYVNFLYLASHYEKLKGSPEDNEQKQLFVEQHKHYLDEIIEQISEFSKRVILADANLDKVLSAYNKHRDKPIREQAENIIHLFTLTNLGAPAAFKYFDTTIDRKRYTSTKEVLDATLIHQSITGLYETRIDLSQLGGDGGGGSGGGEAAAKGGLLGRDLLTKLKAQIQFSTEGPQVTWEDRPAMCLVLNLEEEYRLHEKPVPPSIDPSWLQLFPMVWAEKAGMGLANQVPPVVVELKSDASPVAVRQYPMSKEAREGIRPHIQRFLDLGILVPCQSPWNTPLLPVKKPGTNDYRPVQDLREVNKRVQDIHPTVPNPYNLLSSLPPSHTWYSVLDLKDAFFCLKLHPNSQPLFAFEWRDPEKGNTGQLTWTRLPQGFKNSPTLFNEALHRDLASFRALNPQVVMLQYVDDLLVAAPTYRDCKEGTRRLLQELSKLGYRVSAKKAQLCREEVTYLGYLLKGGKRWLTPARKATVMKIPTPTTPRQVREFLGTAGFCRLWIPGFASLAAPLYPLTRPKVPFTWTEAHQEAFGRIKEALLSAPALALPDLTKPFALYVDEKEGVARGVLTQTLGPWRRPVAYLSKKLDPVASGWPTCLKAIAAVALLLKDADKLTLGQNVLVIAPHNLESIVRQPPDRWMTNARMTHYQSLLLNERVSFAPPAILNPATLLPVESDDTPIHICSEILAEETGTRPDLRDQPLPGVPAWYTDGSSFIMDGRRQAGAAIVDNKRTVWASNLPEGTSAQKAELIALTQALRLAEGKSINIYTDSRYAFATAHVHGAIYKQRGWLTSAGKDIKNKEEILALLEAIHLPKRVAIIHCPGHQRGTDPVATGNRKADEAAKQAAQSTRILTETTKNAGKRTADGSEFEKRTADGSEFESPKKKAKVE

SEQ ID NO: 1660 - protein, 2132 aa, synthetic construct
MPAAKRVKLDGGDKKYSIGLDIGTNSVGWAVITDEYKVPSKKFKVLGNTDRHSIKKNLIGALLFDSGETAEATRLKRTARRRYTRRKNRICYLQEIFSNEMAKVDDSFFHRLEESFLVEEDKKHERHPIFGNIVDEVAYHEKYPTIYHLRKKLVDSTDKADLRLIYLALAHMIKFRGHFLIEGDLNPDNSDVDKLFIQLVQTYNQLFEENPINASGVDAKAILSARLSKSRRLENLIAQLPGEKKNGLFGNLIALSLGLTPNFKSNFDLAEDAKLQLSKDTYDDDLDNLLAQIGDQYADLFLAAKNLSDAILLSDILRVNTEITKAPLSASMIKRYDEHHQDLTLLKALVRQQLPEKYKEIFFDQSKNGYAGYIDGGASQEEFYKFIKPILEKMDGTEELLVKLNREDLLRKQRTFDNGSIPHQIHLGELHAILRRQEDFYPFLKDNREKIEKILTFRIPYYVGPLARGNSRFAWMTRKSEETITPWNFEEVVDKGASAQSFIERMTNFDKNLPNEKVLPKHSLLYEYFTVYNELTKVKYVTEGMRKPAFLSGEQKKAIVDLLFKTNRKVTVKQLKEDYFKKIECFDSVEISGVEDRFNASLGTYHDLLKIIKDKDFLDNEENEDILEDIVLTLTLFEDREMIEERLKTYAHLFDDKVMKQLKRRRYTGWGRLSRKLINGIRDKQSGKTILDFLKSDGFANRNFMQLIHDDSLTFKEDIQKAQVSGQGDSLHEHIANLAGSPAIKKGILQTVKVVDELVKVMGRHKPENIVIEMARENQTTQKGQKNSRERMKRIEEGIKELGSQILKEHPVENTQLQNEKLYLYYLQNGRDMYVDQELDINRLSDYDVDHIVPQSFLKDDSIDNKVLTRSDKARGKSDNVPSEEVVKKMKNYWRQLLNAKLITQRKFDNLTKAERGGLSELDKAGFIKRQLVETRQITKHVAQILDSRMNTKYDENDKLIREVKVITLKSKLVSDFRKDFQFYKVREINNYHHAHDAYLNAVVGTALIKKYPKLESEFVYGDYKVYDVRKMIAKSEQEIGKATAKYFFYSNIMNFFKTEITLANGEIRKRPLIETNGETGEIVWDKGRDFATVRKVLSMPQVNIVKKTEVQTGGFSKESILPKRNSDKLIARKKDWDPKKYGGFDSPTVAYSVLVVAKVEKGKSKKLKSVKELLGITIMERSSFEKNPIDFLEAKGYKEVKKDLIIKLPKYSLFELENGRKRMLASAGELQKGNELALPSKYVNFLYLASHYEKLKGSPEDNEQKQLFVEQHKHYLDEIIEQISEFSKRVILADANLDKVLSAYNKHRDKPIREQAENIIHLFTLTNLGAPAAFKYFDTTIDRKRYTSTKEVLDATLIHQSITGLYETRIDLSQLGGDGGSGSETPGTSESATPESGGLLGRDLLTKLKAQIQFSTEGPQVTWEDRPAMCLVLNLEEEYRLHEKPVPPSIDPSWLQLFPMVWAEKAGMGLANQVPPVVVELKSDASPVAVRQYPMSKEAREGIRPHIQRFLDLGILVPCQSPWNTPLLPVKKPGTNDYRPVQDLREVNKRVQDIHPTVPNPYNLLSSLPPSHTWYSVLDLKDAFFCLKLHPNSQPLFAFEWRDPEKGNTGQLTWTRLPQGFKNSPTLFNEALHRDLASFRALNPQVVMLQYVDDLLVAAPTYRDCKEGTRRLLQELSKLGYRVSAKKAQLCREEVTYLGYLLKGGKRWLTPARKATVMKIPTPTTPRQVREFLGTAGFCRLWIPGFASLAAPLYPLTRPKVPFTWTEAHQEAFGRIKEALLSAPALALPDLTKPFALYVDEKEGVARGVLTQTLGPWRRPVAYLSKKLDPVASGWPTCLKAIAAVALLLKDADKLTLGQNVLVIAPHNLESIVRQPPDRWMTNARMTHYQSLLLNERVSFAPPAILNPATLLPVESDDTPIHICSEILAEETGTRPDLRDQPLPGVPAWYTDGSSFIMDGRRQAGAAIVDNKRTVWASNLPEGTSAQKAELIALTQALRLAEGKSINIYTDSRYAFATAHVHGAIYKQRGWLTSAGKDIKNKEEILALLEAIHLPKRVAIIHCPGHQRGTDPVATGNRKADEAAKQAAQSTRILTETTKNAGKRTADGSEFEKRTADGSEFESPKKKAKVE

SEQ ID NO: 1661 - protein, 2125 aa, synthetic construct
MPAAKRVKLDGGDKKYSIGLDIGTNSVGWAVITDEYKVPSKKFKVLGNTDRHSIKKNLIGALLFDSGETAEATRLKRTARRRYTRRKNRICYLQEIFSNEMAKVDDSFFHRLEESFLVEEDKKHERHPIFGNIVDEVAYHEKYPTIYHLRKKLVDSTDKADLRLIYLALAHMIKFRGHFLIEGDLNPDNSDVDKLFIQLVQTYNQLFEENPINASGVDAKAILSARLSKSRRLENLIAQLPGEKKNGLFGNLIALSLGLTPNFKSNFDLAEDAKLQLSKDTYDDDLDNLLAQIGDQYADLFLAAKNLSDAILLSDILRVNTEITKAPLSASMIKRYDEHHQDLTLLKALVRQQLPEKYKEIFFDQSKNGYAGYIDGGASQEEFYKFIKPILEKMDGTEELLVKLNREDLLRKQRTFDNGSIPHQIHLGELHAILRRQEDFYPFLKDNREKIEKILTFRIPYYVGPLARGNSRFAWMTRKSEETITPWNFEEVVDKGASAQSFIERMTNFDKNLPNEKVLPKHSLLYEYFTVYNELTKVKYVTEGMRKPAFLSGEQKKAIVDLLFKTNRKVTVKQLKEDYFKKIECFDSVEISGVEDRFNASLGTYHDLLKIIKDKDFLDNEENEDILEDIVLTLTLFEDREMIEERLKTYAHLFDDKVMKQLKRRRYTGWGRLSRKLINGIRDKQSGKTILDFLKSDGFANRNFMQLIHDDSLTFKEDIQKAQVSGQGDSLHEHIANLAGSPAIKKGILQTVKVVDELVKVMGRHKPENIVIEMARENQTTQKGQKNSRERMKRIEEGIKELGSQILKEHPVENTQLQNEKLYLYYLQNGRDMYVDQELDINRLSDYDVDHIVPQSFLKDDSIDNKVLTRSDKARGKSDNVPSEEVVKKMKNYWRQLLNAKLITQRKFDNLTKAERGGLSELDKAGFIKRQLVETRQITKHVAQILDSRMNTKYDENDKLIREVKVITLKSKLVSDFRKDFQFYKVREINNYHHAHDAYLNAVVGTALIKKYPKLESEFVYGDYKVYDVRKMIAKSEQEIGKATAKYFFYSNIMNFFKTEITLANGEIRKRPLIETNGETGEIVWDKGRDFATVRKVLSMPQVNIVKKTEVQTGGFSKESILPKRNSDKLIARKKDWDPKKYGGFDSPTVAYSVLVVAKVEKGKSKKLKSVKELLGITIMERSSFEKNPIDFLEAKGYKEVKKDLIIKLPKYSLFELENGRKRMLASAGELQKGNELALPSKYVNFLYLASHYEKLKGSPEDNEQKQLFVEQHKHYLDEIIEQISEFSKRVILADANLDKVLSAYNKHRDKPIREQAENIIHLFTLTNLGAPAAFKYFDTTIDRKRYTSTKEVLDATLIHQSITGLYETRIDLSQLGGDGGGSSGGSPAPGGLLGRDLLTKLKAQIQFSTEGPQVTWEDRPAMCLVLNLEEEYRLHEKPVPPSIDPSWLQLFPMVWAEKAGMGLANQVPPVVVELKSDASPVAVRQYPMSKEAREGIRPHIQRFLDLGILVPCQSPWNTPLLPVKKPGTNDYRPVQDLREVNKRVQDIHPTVPNPYNLLSSLPPSHTWYSVLDLKDAFFCLKLHPNSQPLFAFEWRDPEKGNTGQLTWTRLPQGFKNSPTLFNEALHRDLASFRALNPQVVMLQYVDDLLVAAPTYRDCKEGTRRLLQELSKLGYRVSAKKAQLCREEVTYLGYLLKGGKRWLTPARKATVMKIPTPTTPRQVREFLGTAGFCRLWIPGFASLAAPLYPLTRPKVPFTWTEAHQEAFGRIKEALLSAPALALPDLTKPFALYVDEKEGVARGVLTQTLGPWRRPVAYLSKKLDPVASGWPTCLKAIAAVALLLKDADKLTLGQNVLVIAPHNLESIVRQPPDRWMTNARMTHYQSLLLNERVSFAPPAILNPATLLPVESDDTPIHICSEILAEETGTRPDLRDQPLPGVPAWYTDGSSFIMDGRRQAGAAIVDNKRTVWASNLPEGTSAQKAELIALTQALRLAEGKSINIYTDSRYAFATAHVHGAIYKQRGWLTSAGKDIKNKEEILALLEAIHLPKRVAIIHCPGHQRGTDPVATGNRKADEAAKQAAQSTRILTETTKNAGKRTADGSEFEKRTADGSEFESPKKKAKVE

SEQ ID NO: 1662 - protein, 2146 aa, synthetic construct
MPAAKRVKLDGGDKKYSIGLDIGTNSVGWAVITDEYKVPSKKFKVLGNTDRHSIKKNLIGALLFDSGETAEATRLKRTARRRYTRRKNRICYLQEIFSNEMAKVDDSFFHRLEESFLVEEDKKHERHPIFGNIVDEVAYHEKYPTIYHLRKKLVDSTDKADLRLIYLALAHMIKFRGHFLIEGDLNPDNSDVDKLFIQLVQTYNQLFEENPINASGVDAKAILSARLSKSRRLENLIAQLPGEKKNGLFGNLIALSLGLTPNFKSNFDLAEDAKLQLSKDTYDDDLDNLLAQIGDQYADLFLAAKNLSDAILLSDILRVNTEITKAPLSASMIKRYDEHHQDLTLLKALVRQQLPEKYKEIFFDQSKNGYAGYIDGGASQEEFYKFIKPILEKMDGTEELLVKLNREDLLRKQRTFDNGSIPHQIHLGELHAILRRQEDFYPFLKDNREKIEKILTFRIPYYVGPLARGNSRFAWMTRKSEETITPWNFEEVVDKGASAQSFIERMTNFDKNLPNEKVLPKHSLLYEYFTVYNELTKVKYVTEGMRKPAFLSGEQKKAIVDLLFKTNRKVTVKQLKEDYFKKIECFDSVEISGVEDRFNASLGTYHDLLKIIKDKDFLDNEENEDILEDIVLTLTLFEDREMIEERLKTYAHLFDDKVMKQLKRRRYTGWGRLSRKLINGIRDKQSGKTILDFLKSDGFANRNFMQLIHDDSLTFKEDIQKAQVSGQGDSLHEHIANLAGSPAIKKGILQTVKVVDELVKVMGRHKPENIVIEMARENQTTQKGQKNSRERMKRIEEGIKELGSQILKEHPVENTQLQNEKLYLYYLQNGRDMYVDQELDINRLSDYDVDHIVPQSFLKDDSIDNKVLTRSDKARGKSDNVPSEEVVKKMKNYWRQLLNAKLITQRKFDNLTKAERGGLSELDKAGFIKRQLVETRQITKHVAQILDSRMNTKYDENDKLIREVKVITLKSKLVSDFRKDFQFYKVREINNYHHAHDAYLNAVVGTALIKKYPKLESEFVYGDYKVYDVRKMIAKSEQEIGKATAKYFFYSNIMNFFKTEITLANGEIRKRPLIETNGETGEIVWDKGRDFATVRKVLSMPQVNIVKKTEVQTGGFSKESILPKRNSDKLIARKKDWDPKKYGGFDSPTVAYSVLVVAKVEKGKSKKLKSVKELLGITIMERSSFEKNPIDFLEAKGYKEVKKDLIIKLPKYSLFELENGRKRMLASAGELQKGNELALPSKYVNFLYLASHYEKLKGSPEDNEQKQLFVEQHKHYLDEIIEQISEFSKRVILADANLDKVLSAYNKHRDKPIREQAENIIHLFTLTNLGAPAAFKYFDTTIDRKRYTSTKEVLDATLIHQSITGLYETRIDLSQLGGDGGGGGGSGGGGSGGGGSGGGGSGGGGSGGGGSGGLLGRDLLTKLKAQIQFSTEGPQVTWEDRPAMCLVLNLEEEYRLHEKPVPPSIDPSWLQLFPMVWAEKAGMGLANQVPPVVVELKSDASPVAVRQYPMSKEAREGIRPHIQRFLDLGILVPCQSPWNTPLLPVKKPGTNDYRPVQDLREVNKRVQDIHPTVPNPYNLLSSLPPSHTWYSVLDLKDAFFCLKLHPNSQPLFAFEWRDPEKGNTGQLTWTRLPQGFKNSPTLFNEALHRDLASFRALNPQVVMLQYVDDLLVAAPTYRDCKEGTRRLLQELSKLGYRVSAKKAQLCREEVTYLGYLLKGGKRWLTPARKATVMKIPTPTTPRQVREFLGKAGFCRLFIPGFASLAAPLYPLTRPKVPFTWTEAHQEAFGRIKEALLSAPALALPDLTKPFALYVDEKEGVARGVLTQTLGPWRRPVAYLSKKLDPVASGWPTCLKAIAAVALLLKDADKLTLGQNVLVIAPHNLESIVRQPPDRWMTNARMTHYQSLLLNERVSFAPPAILNPATLLPVESDDTPIHICSEILAEETGTRPDLRDQPLPGVPAWYTDGSSFIMDGRRQAGAAIVDNKRTVWASNLPEGTSAQKAELIALTQALRLAEGKSINIYTDSRYAFATAHVHGAIYKQRGWLTSAGKDIKNKEEILALLEAIHLPKRVAIIHCPGHQRGTDPVATGNRKADEAAKQAAQSTRILTETTKNAGKRTADGSEFEKRTADGSEFESPKKKAKVE

SEQ ID NO: 1663 - protein, 2127 aa, synthetic construct
MPAAKRVKLDGGDKKYSIGLDIGTNSVGWAVITDEYKVPSKKFKVLGNTDRHSIKKNLIGALLFDSGETAEATRLKRTARRRYTRRKNRICYLQEIFSNEMAKVDDSFFHRLEESFLVEEDKKHERHPIFGNIVDEVAYHEKYPTIYHLRKKLVDSTDKADLRLIYLALAHMIKFRGHFLIEGDLNPDNSDVDKLFIQLVQTYNQLFEENPINASGVDAKAILSARLSKSRRLENLIAQLPGEKKNGLFGNLIALSLGLTPNFKSNFDLAEDAKLQLSKDTYDDDLDNLLAQIGDQYADLFLAAKNLSDAILLSDILRVNTEITKAPLSASMIKRYDEHHQDLTLLKALVRQQLPEKYKEIFFDQSKNGYAGYIDGGASQEEFYKFIKPILEKMDGTEELLVKLNREDLLRKQRTFDNGSIPHQIHLGELHAILRRQEDFYPFLKDNREKIEKILTFRIPYYVGPLARGNSRFAWMTRKSEETITPWNFEEVVDKGASAQSFIERMTNFDKNLPNEKVLPKHSLLYEYFTVYNELTKVKYVTEGMRKPAFLSGEQKKAIVDLLFKTNRKVTVKQLKEDYFKKIECFDSVEISGVEDRFNASLGTYHDLLKIIKDKDFLDNEENEDILEDIVLTLTLFEDREMIEERLKTYAHLFDDKVMKQLKRRRYTGWGRLSRKLINGIRDKQSGKTILDFLKSDGFANRNFMQLIHDDSLTFKEDIQKAQVSGQGDSLHEHIANLAGSPAIKKGILQTVKVVDELVKVMGRHKPENIVIEMARENQTTQKGQKNSRERMKRIEEGIKELGSQILKEHPVENTQLQNEKLYLYYLQNGRDMYVDQELDINRLSDYDVDHIVPQSFLKDDSIDNKVLTRSDKARGKSDNVPSEEVVKKMKNYWRQLLNAKLITQRKFDNLTKAERGGLSELDKAGFIKRQLVETRQITKHVAQILDSRMNTKYDENDKLIREVKVITLKSKLVSDFRKDFQFYKVREINNYHHAHDAYLNAVVGTALIKKYPKLESEFVYGDYKVYDVRKMIAKSEQEIGKATAKYFFYSNIMNFFKTEITLANGEIRKRPLIETNGETGEIVWDKGRDFATVRKVLSMPQVNIVKKTEVQTGGFSKESILPKRNSDKLIARKKDWDPKKYGGFDSPTVAYSVLVVAKVEKGKSKKLKSVKELLGITIMERSSFEKNPIDFLEAKGYKEVKKDLIIKLPKYSLFELENGRKRMLASAGELQKGNELALPSKYVNFLYLASHYEKLKGSPEDNEQKQLFVEQHKHYLDEIIEQISEFSKRVILADANLDKVLSAYNKHRDKPIREQAENIIHLFTLTNLGAPAAFKYFDTTIDRKRYTSTKEVLDATLIHQSITGLYETRIDLSQLGGDGGPAPEAAAKGGGGGLLGRDLLTKLKAQIQFSTEGPQVTWEDRPAMCLVLNLEEEYRLHEKPVPPSIDPSWLQLFPMVWAEKAGMGLANQVPPVVVELKSDASPVAVRQYPMSKEAREGIRPHIQRFLDLGILVPCQSPWNTPLLPVKKPGTNDYRPVQDLREVNKRVQDIHPTVPNPYNLLSSLPPSHTWYSVLDLKDAFFCLKLHPNSQPLFAFEWRDPEKGNTGQLTWTRLPQGFKNSPTLFNEALHRDLASFRALNPQVVMLQYVDDLLVAAPTYRDCKEGTRRLLQELSKLGYRVSAKKAQLCREEVTYLGYLLKGGKRWLTPARKATVMKIPTPTTPRQVREFLGKAGFCRLFIPGFASLAAPLYPLTRPKVPFTWTEAHQEAFGRIKEALLSAPALALPDLTKPFALYVDEKEGVARGVLTQTLGPWRRPVAYLSKKLDPVASGWPTCLKAIAAVALLLKDADKLTLGQNVLVIAPHNLESIVRQPPDRWMTNARMTHYQSLLLNERVSFAPPAILNPATLLPVESDDTPIHICSEILAEETGTRPDLRDQPLPGVPAWYTDGSSFIMDGRRQAGAAIVDNKRTVWASNLPEGTSAQKAELIALTQALRLAEGKSINIYTDSRYAFATAHVHGAIYKQRGWLTSAGKDIKNKEEILALLEAIHLPKRVAIIHCPGHQRGTDPVATGNRKADEAAKQAAQSTRILTETTKNAGKRTADGSEFEKRTADGSEFESPKKKAKVE

SEQ ID NO: 1664 - protein, 2127 aa, synthetic construct
MPAAKRVKLDGGDKKYSIGLDIGTNSVGWAVITDEYKVPSKKFKVLGNTDRHSIKKNLIGALLFDSGETAEATRLKRTARRRYTRRKNRICYLQEIFSNEMAKVDDSFFHRLEESFLVEEDKKHERHPIFGNIVDEVAYHEKYPTIYHLRKKLVDSTDKADLRLIYLALAHMIKFRGHFLIEGDLNPDNSDVDKLFIQLVQTYNQLFEENPINASGVDAKAILSARLSKSRRLENLIAQLPGEKKNGLFGNLIALSLGLTPNFKSNFDLAEDAKLQLSKDTYDDDLDNLLAQIGDQYADLFLAAKNLSDAILLSDILRVNTEITKAPLSASMIKRYDEHHQDLTLLKALVRQQLPEKYKEIFFDQSKNGYAGYIDGGASQEEFYKFIKPILEKMDGTEELLVKLNREDLLRKQRTFDNGSIPHQIHLGELHAILRRQEDFYPFLKDNREKIEKILTFRIPYYVGPLARGNSRFAWMTRKSEETITPWNFEEVVDKGASAQSFIERMTNFDKNLPNEKVLPKHSLLYEYFTVYNELTKVKYVTEGMRKPAFLSGEQKKAIVDLLFKTNRKVTVKQLKEDYFKKIECFDSVEISGVEDRFNASLGTYHDLLKIIKDKDFLDNEENEDILEDIVLTLTLFEDREMIEERLKTYAHLFDDKVMKQLKRRRYTGWGRLSRKLINGIRDKQSGKTILDFLKSDGFANRNFMQLIHDDSLTFKEDIQKAQVSGQGDSLHEHIANLAGSPAIKKGILQTVKVVDELVKVMGRHKPENIVIEMARENQTTQKGQKNSRERMKRIEEGIKELGSQILKEHPVENTQLQNEKLYLYYLQNGRDMYVDQELDINRLSDYDVDHIVPQSFLKDDSIDNKVLTRSDKARGKSDNVPSEEVVKKMKNYWRQLLNAKLITQRKFDNLTKAERGGLSELDKAGFIKRQLVETRQITKHVAQILDSRMNTKYDENDKLIREVKVITLKSKLVSDFRKDFQFYKVREINNYHHAHDAYLNAVVGTALIKKYPKLESEFVYGDYKVYDVRKMIAKSEQEIGKATAKYFFYSNIMNFFKTEITLANGEIRKRPLIETNGETGEIVWDKGRDFATVRKVLSMPQVNIVKKTEVQTGGFSKESILPKRNSDKLIARKKDWDPKKYGGFDSPTVAYSVLVVAKVEKGKSKKLKSVKELLGITIMERSSFEKNPIDFLEAKGYKEVKKDLIIKLPKYSLFELENGRKRMLASAGELQKGNELALPSKYVNFLYLASHYEKLKGSPEDNEQKQLFVEQHKHYLDEIIEQISEFSKRVILADANLDKVLSAYNKHRDKPIREQAENIIHLFTLTNLGAPAAFKYFDTTIDRKRYTSTKEVLDATLIHQSITGLYETRIDLSQLGGDGGEAAAKGSSPAPGGLLGRDLLTKLKAQIQFSTEGPQVTWEDRPAMCLVLNLEEEYRLHEKPVPPSIDPSWLQLFPMVWAEKAGMGLANQVPPVVVELKSDASPVAVRQYPMSKEAREGIRPHIQRFLDLGILVPCQSPWNTPLLPVKKPGTNDYRPVQDLREVNKRVQDIHPTVPNPYNLLSSLPPSHTWYSVLDLKDAFFCLKLHPNSQPLFAFEWRDPEKGNTGQLTWTRLPQGFKNSPTLFNEALHRDLASFRALNPQVVMLQYVDDLLVAAPTYRDCKEGTRRLLQELSKLGYRVSAKKAQLCREEVTYLGYLLKGGKRWLTPARKATVMKIPTPTTPRQVREFLGKAGFCRLFIPGFASLAAPLYPLTRPKVPFTWTEAHQEAFGRIKEALLSAPALALPDLTKPFALYVDEKEGVARGVLTQTLGPWRRPVAYLSKKLDPVASGWPTCLKAIAAVALLLKDADKLTLGQNVLVIAPHNLESIVRQPPDRWMTNARMTHYQSLLLNERVSFAPPAILNPATLLPVESDDTPIHICSEILAEETGTRPDLRDQPLPGVPAWYTDGSSFIMDGRRQAGAAIVDNKRTVWASNLPEGTSAQKAELIALTQALRLAEGKSINIYTDSRYAFATAHVHGAIYKQRGWLTSAGKDIKNKEEILALLEAIHLPKRVAIIHCPGHQRGTDPVATGNRKADEAAKQAAQSTRILTETTKNAGKRTADGSEFEKRTADGSEFESPKKKAKVE

SEQ ID NO: 1665 - protein, 2131 aa, synthetic construct
MPAAKRVKLDGGDKKYSIGLDIGTNSVGWAVITDEYKVPSKKFKVLGNTDRHSIKKNLIGALLFDSGETAEATRLKRTARRRYTRRKNRICYLQEIFSNEMAKVDDSFFHRLEESFLVEEDKKHERHPIFGNIVDEVAYHEKYPTIYHLRKKLVDSTDKADLRLIYLALAHMIKFRGHFLIEGDLNPDNSDVDKLFIQLVQTYNQLFEENPINASGVDAKAILSARLSKSRRLENLIAQLPGEKKNGLFGNLIALSLGLTPNFKSNFDLAEDAKLQLSKDTYDDDLDNLLAQIGDQYADLFLAAKNLSDAILLSDILRVNTEITKAPLSASMIKRYDEHHQDLTLLKALVRQQLPEKYKEIFFDQSKNGYAGYIDGGASQEEFYKFIKPILEKMDGTEELLVKLNREDLLRKQRTFDNGSIPHQIHLGELHAILRRQEDFYPFLKDNREKIEKILTFRIPYYVGPLARGNSRFAWMTRKSEETITPWNFEEVVDKGASAQSFIERMTNFDKNLPNEKVLPKHSLLYEYFTVYNELTKVKYVTEGMRKPAFLSGEQKKAIVDLLFKTNRKVTVKQLKEDYFKKIECFDSVEISGVEDRFNASLGTYHDLLKIIKDKDFLDNEENEDILEDIVLTLTLFEDREMIEERLKTYAHLFDDKVMKQLKRRRYTGWGRLSRKLINGIRDKQSGKTILDFLKSDGFANRNFMQLIHDDSLTFKEDIQKAQVSGQGDSLHEHIANLAGSPAIKKGILQTVKVVDELVKVMGRHKPENIVIEMARENQTTQKGQKNSRERMKRIEEGIKELGSQILKEHPVENTQLQNEKLYLYYLQNGRDMYVDQELDINRLSDYDVDHIVPQSFLKDDSIDNKVLTRSDKARGKSDNVPSEEVVKKMKNYWRQLLNAKLITQRKFDNLTKAERGGLSELDKAGFIKRQLVETRQITKHVAQILDSRMNTKYDENDKLIREVKVITLKSKLVSDFRKDFQFYKVREINNYHHAHDAYLNAVVGTALIKKYPKLESEFVYGDYKVYDVRKMIAKSEQEIGKATAKYFFYSNIMNFFKTEITLANGEIRKRPLIETNGETGEIVWDKGRDFATVRKVLSMPQVNIVKKTEVQTGGFSKESILPKRNSDKLIARKKDWDPKKYGGFDSPTVAYSVLVVAKVEKGKSKKLKSVKELLGITIMERSSFEKNPIDFLEAKGYKEVKKDLIIKLPKYSLFELENGRKRMLASAGELQKGNELALPSKYVNFLYLASHYEKLKGSPEDNEQKQLFVEQHKHYLDEIIEQISEFSKRVILADANLDKVLSAYNKHRDKPIREQAENIIHLFTLTNLGAPAAFKYFDTTIDRKRYTSTKEVLDATLIHQSITGLYETRIDLSQLGGDGGGGSGGSGGSGGSGGSGGLLGRDLLTKLKAQIQFSTEGPQVTWEDRPAMCLVLNLEEEYRLHEKPVPPSIDPSWLQLFPMVWAEKAGMGLANQVPPVVVELKSDASPVAVRQYPMSKEAREGIRPHIQRFLDLGILVPCQSPWNTPLLPVKKPGTNDYRPVQDLREVNKRVQDIHPTVPNPYNLLSSLPPSHTWYSVLDLKDAFFCLKLHPNSQPLFAFEWRDPEKGNTGQLTWTRLPQGFKNSPTLFNEALHRDLASFRALNPQVVMLQYVDDLLVAAPTYRDCKEGTRRLLQELSKLGYRVSAKKAQLCREEVTYLGYLLKGGKRWLTPARKATVMKIPTPTTPRQVREFLGKAGFCRLFIPGFASLAAPLYPLTRPKVPFTWTEAHQEAFGRIKEALLSAPALALPDLTKPFALYVDEKEGVARGVLTQTLGPWRRPVAYLSKKLDPVASGWPTCLKAIAAVALLLKDADKLTLGQNVLVIAPHNLESIVRQPPDRWMTNARMTHYQSLLLNERVSFAPPAILNPATLLPVESDDTPIHICSEILAEETGTRPDLRDQPLPGVPAWYTDGSSFIMDGRRQAGAAIVDNKRTVWASNLPEGTSAQKAELIALTQALRLAEGKSINIYTDSRYAFATAHVHGAIYKQRGWLTSAGKDIKNKEEILALLEAIHLPKRVAIIHCPGHQRGTDPVATGNRKADEAAKQAAQSTRILTETTKNAGKRTADGSEFEKRTADGSEFESPKKKAKVE

SEQ ID NO: 1666 - protein, 2127 aa, synthetic construct
MPAAKRVKLDGGDKKYSIGLDIGTNSVGWAVITDEYKVPSKKFKVLGNTDRHSIKKNLIGALLFDSGETAEATRLKRTARRRYTRRKNRICYLQEIFSNEMAKVDDSFFHRLEESFLVEEDKKHERHPIFGNIVDEVAYHEKYPTIYHLRKKLVDSTDKADLRLIYLALAHMIKFRGHFLIEGDLNPDNSDVDKLFIQLVQTYNQLFEENPINASGVDAKAILSARLSKSRRLENLIAQLPGEKKNGLFGNLIALSLGLTPNFKSNFDLAEDAKLQLSKDTYDDDLDNLLAQIGDQYADLFLAAKNLSDAILLSDILRVNTEITKAPLSASMIKRYDEHHQDLTLLKALVRQQLPEKYKEIFFDQSKNGYAGYIDGGASQEEFYKFIKPILEKMDGTEELLVKLNREDLLRKQRTFDNGSIPHQIHLGELHAILRRQEDFYPFLKDNREKIEKILTFRIPYYVGPLARGNSRFAWMTRKSEETITPWNFEEVVDKGASAQSFIERMTNFDKNLPNEKVLPKHSLLYEYFTVYNELTKVKYVTEGMRKPAFLSGEQKKAIVDLLFKTNRKVTVKQLKEDYFKKIECFDSVEISGVEDRFNASLGTYHDLLKIIKDKDFLDNEENEDILEDIVLTLTLFEDREMIEERLKTYAHLFDDKVMKQLKRRRYTGWGRLSRKLINGIRDKQSGKTILDFLKSDGFANRNFMQLIHDDSLTFKEDIQKAQVSGQGDSLHEHIANLAGSPAIKKGILQTVKVVDELVKVMGRHKPENIVIEMARENQTTQKGQKNSRERMKRIEEGIKELGSQILKEHPVENTQLQNEKLYLYYLQNGRDMYVDQELDINRLSDYDVDHIVPQSFLKDDSIDNKVLTRSDKARGKSDNVPSEEVVKKMKNYWRQLLNAKLITQRKFDNLTKAERGGLSELDKAGFIKRQLVETRQITKHVAQILDSRMNTKYDENDKLIREVKVITLKSKLVSDFRKDFQFYKVREINNYHHAHDAYLNAVVGTALIKKYPKLESEFVYGDYKVYDVRKMIAKSEQEIGKATAKYFFYSNIMNFFKTEITLANGEIRKRPLIETNGETGEIVWDKGRDFATVRKVLSMPQVNIVKKTEVQTGGFSKESILPKRNSDKLIARKKDWDPKKYGGFDSPTVAYSVLVVAKVEKGKSKKLKSVKELLGITIMERSSFEKNPIDFLEAKGYKEVKKDLIIKLPKYSLFELENGRKRMLASAGELQKGNELALPSKYVNFLYLASHYEKLKGSPEDNEQKQLFVEQHKHYLDEIIEQISEFSKRVILADANLDKVLSAYNKHRDKPIREQAENIIHLFTLTNLGAPAAFKYFDTTIDRKRYTSTKEVLDATLIHQSITGLYETRIDLSQLGGDGGGGSPAPEAAAKGGLLGRDLLTKLKAQIQFSTEGPQVTWEDRPAMCLVLNLEEEYRLHEKPVPPSIDPSWLQLFPMVWAEKAGMGLANQVPPVVVELKSDASPVAVRQYPMSKEAREGIRPHIQRFLDLGILVPCQSPWNTPLLPVKKPGTNDYRPVQDLREVNKRVQDIHPTVPNPYNLLSSLPPSHTWYSVLDLKDAFFCLKLHPNSQPLFAFEWRDPEKGNTGQLTWTRLPQGFKNSPTLFNEALHRDLASFRALNPQVVMLQYVDDLLVAAPTYRDCKEGTRRLLQELSKLGYRVSAKKAQLCREEVTYLGYLLKGGKRWLTPARKATVMKIPTPTTPRQVREFLGKAGFCRLFIPGFASLAAPLYPLTRPKVPFTWTEAHQEAFGRIKEALLSAPALALPDLTKPFALYVDEKEGVARGVLTQTLGPWRRPVAYLSKKLDPVASGWPTCLKAIAAVALLLKDADKLTLGQNVLVIAPHNLESIVRQPPDRWMTNARMTHYQSLLLNERVSFAPPAILNPATLLPVESDDTPIHICSEILAEETGTRPDLRDQPLPGVPAWYTDGSSFIMDGRRQAGAAIVDNKRTVWASNLPEGTSAQKAELIALTQALRLAEGKSINIYTDSRYAFATAHVHGAIYKQRGWLTSAGKDIKNKEEILALLEAIHLPKRVAIIHCPGHQRGTDPVATGNRKADEAAKQAAQSTRILTETTKNAGKRTADGSEFEKRTADGSEFESPKKKAKVE

SEQ ID NO: 1667 - protein, 2134 aa, synthetic construct
MPAAKRVKLDGGDKKYSIGLDIGTNSVGWAVITDEYKVPSKKFKVLGNTDRHSIKKNLIGALLFDSGETAEATRLKRTARRRYTRRKNRICYLQEIFSNEMAKVDDSFFHRLEESFLVEEDKKHERHPIFGNIVDEVAYHEKYPTIYHLRKKLVDSTDKADLRLIYLALAHMIKFRGHFLIEGDLNPDNSDVDKLFIQLVQTYNQLFEENPINASGVDAKAILSARLSKSRRLENLIAQLPGEKKNGLFGNLIALSLGLTPNFKSNFDLAEDAKLQLSKDTYDDDLDNLLAQIGDQYADLFLAAKNLSDAILLSDILRVNTEITKAPLSASMIKRYDEHHQDLTLLKALVRQQLPEKYKEIFFDQSKNGYAGYIDGGASQEEFYKFIKPILEKMDGTEELLVKLNREDLLRKQRTFDNGSIPHQIHLGELHAILRRQEDFYPFLKDNREKIEKILTFRIPYYVGPLARGNSRFAWMTRKSEETITPWNFEEVVDKGASAQSFIERMTNFDKNLPNEKVLPKHSLLYEYFTVYNELTKVKYVTEGMRKPAFLSGEQKKAIVDLLFKTNRKVTVKQLKEDYFKKIECFDSVEISGVEDRFNASLGTYHDLLKIIKDKDFLDNEENEDILEDIVLTLTLFEDREMIEERLKTYAHLFDDKVMKQLKRRRYTGWGRLSRKLINGIRDKQSGKTILDFLKSDGFANRNFMQLIHDDSLTFKEDIQKAQVSGQGDSLHEHIANLAGSPAIKKGILQTVKVVDELVKVMGRHKPENIVIEMARENQTTQKGQKNSRERMKRIEEGIKELGSQILKEHPVENTQLQNEKLYLYYLQNGRDMYVDQELDINRLSDYDVDHIVPQSFLKDDSIDNKVLTRSDKARGKSDNVPSEEVVKKMKNYWRQLLNAKLITQRKFDNLTKAERGGLSELDKAGFIKRQLVETRQITKHVAQILDSRMNTKYDENDKLIREVKVITLKSKLVSDFRKDFQFYKVREINNYHHAHDAYLNAVVGTALIKKYPKLESEFVYGDYKVYDVRKMIAKSEQEIGKATAKYFFYSNIMNFFKTEITLANGEIRKRPLIETNGETGEIVWDKGRDFATVRKVLSMPQVNIVKKTEVQTGGFSKESILPKRNSDKLIARKKDWDPKKYGGFDSPTVAYSVLVVAKVEKGKSKKLKSVKELLGITIMERSSFEKNPIDFLEAKGYKEVKKDLIIKLPKYSLFELENGRKRMLASAGELQKGNELALPSKYVNFLYLASHYEKLKGSPEDNEQKQLFVEQHKHYLDEIIEQISEFSKRVILADANLDKVLSAYNKHRDKPIREQAENIIHLFTLTNLGAPAAFKYFDTTIDRKRYTSTKEVLDATLIHQSITGLYETRIDLSQLGGDGGGSSGSSGSSGSSGSSGSSGGLLGRDLLTKLKAQIQFSTEGPQVTWEDRPAMCLVLNLEEEYRLHEKPVPPSIDPSWLQLFPMVWAEKAGMGLANQVPPVVVELKSDASPVAVRQYPMSKEAREGIRPHIQRFLDLGILVPCQSPWNTPLLPVKKPGTNDYRPVQDLREVNKRVQDIHPTVPNPYNLLSSLPPSHTWYSVLDLKDAFFCLKLHPNSQPLFAFEWRDPEKGNTGQLTWTRLPQGFKNSPTLFNEALHRDLASFRALNPQVVMLQYVDDLLVAAPTYRDCKEGTRRLLQELSKLGYRVSAKKAQLCREEVTYLGYLLKGGKRWLTPARKATVMKIPTPTTPRQVREFLGKAGFCRLFIPGFASLAAPLYPLTRPKVPFTWTEAHQEAFGRIKEALLSAPALALPDLTKPFALYVDEKEGVARGVLTQTLGPWRRPVAYLSKKLDPVASGWPTCLKAIAAVALLLKDADKLTLGQNVLVIAPHNLESIVRQPPDRWMTNARMTHYQSLLLNERVSFAPPAILNPATLLPVESDDTPIHICSEILAEETGTRPDLRDQPLPGVPAWYTDGSSFIMDGRRQAGAAIVDNKRTVWASNLPEGTSAQKAELIALTQALRLAEGKSINIYTDSRYAFATAHVHGAIYKQRGWLTSAGKDIKNKEEILALLEAIHLPKRVAIIHCPGHQRGTDPVATGNRKADEAAKQAAQSTRILTETTKNAGKRTADGSEFEKRTADGSEFESPKKKAKVE

SEQ ID NO: 1668 - protein, 2122 aa, synthetic construct
MPAAKRVKLDGGDKKYSIGLDIGTNSVGWAVITDEYKVPSKKFKVLGNTDRHSIKKNLIGALLFDSGETAEATRLKRTARRRYTRRKNRICYLQEIFSNEMAKVDDSFFHRLEESFLVEEDKKHERHPIFGNIVDEVAYHEKYPTIYHLRKKLVDSTDKADLRLIYLALAHMIKFRGHFLIEGDLNPDNSDVDKLFIQLVQTYNQLFEENPINASGVDAKAILSARLSKSRRLENLIAQLPGEKKNGLFGNLIALSLGLTPNFKSNFDLAEDAKLQLSKDTYDDDLDNLLAQIGDQYADLFLAAKNLSDAILLSDILRVNTEITKAPLSASMIKRYDEHHQDLTLLKALVRQQLPEKYKEIFFDQSKNGYAGYIDGGASQEEFYKFIKPILEKMDGTEELLVKLNREDLLRKQRTFDNGSIPHQIHLGELHAILRRQEDFYPFLKDNREKIEKILTFRIPYYVGPLARGNSRFAWMTRKSEETITPWNFEEVVDKGASAQSFIERMTNFDKNLPNEKVLPKHSLLYEYFTVYNELTKVKYVTEGMRKPAFLSGEQKKAIVDLLFKTNRKVTVKQLKEDYFKKIECFDSVEISGVEDRFNASLGTYHDLLKIIKDKDFLDNEENEDILEDIVLTLTLFEDREMIEERLKTYAHLFDDKVMKQLKRRRYTGWGRLSRKLINGIRDKQSGKTILDFLKSDGFANRNFMQLIHDDSLTFKEDIQKAQVSGQGDSLHEHIANLAGSPAIKKGILQTVKVVDELVKVMGRHKPENIVIEMARENQTTQKGQKNSRERMKRIEEGIKELGSQILKEHPVENTQLQNEKLYLYYLQNGRDMYVDQELDINRLSDYDVDHIVPQSFLKDDSIDNKVLTRSDKARGKSDNVPSEEVVKKMKNYWRQLLNAKLITQRKFDNLTKAERGGLSELDKAGFIKRQLVETRQITKHVAQILDSRMNTKYDENDKLIREVKVITLKSKLVSDFRKDFQFYKVREINNYHHAHDAYLNAVVGTALIKKYPKLESEFVYGDYKVYDVRKMIAKSEQEIGKATAKYFFYSNIMNFFKTEITLANGEIRKRPLIETNGETGEIVWDKGRDFATVRKVLSMPQVNIVKKTEVQTGGFSKESILPKRNSDKLIARKKDWDPKKYGGFDSPTVAYSVLVVAKVEKGKSKKLKSVKELLGITIMERSSFEKNPIDFLEAKGYKEVKKDLIIKLPKYSLFELENGRKRMLASAGELQKGNELALPSKYVNFLYLASHYEKLKGSPEDNEQKQLFVEQHKHYLDEIIEQISEFSKRVILADANLDKVLSAYNKHRDKPIREQAENIIHLFTLTNLGAPAAFKYFDTTIDRKRYTSTKEVLDATLIHQSITGLYETRIDLSQLGGDGGGGSGGGGGLLGRDLLTKLKAQIQFSTEGPQVTWEDRPAMCLVLNLEEEYRLHEKPVPPSIDPSWLQLFPMVWAEKAGMGLANQVPPVVVELKSDASPVAVRQYPMSKEAREGIRPHIQRFLDLGILVPCQSPWNTPLLPVKKPGTNDYRPVQDLREVNKRVQDIHPTVPNPYNLLSSLPPSHTWYSVLDLKDAFFCLKLHPNSQPLFAFEWRDPEKGNTGQLTWTRLPQGFKNSPTLFNEALHRDLASFRALNPQVVMLQYVDDLLVAAPTYRDCKEGTRRLLQELSKLGYRVSAKKAQLCREEVTYLGYLLKGGKRWLTPARKATVMKIPTPTTPRQVREFLGKAGFCRLFIPGFASLAAPLYPLTRPKVPFTWTEAHQEAFGRIKEALLSAPALALPDLTKPFALYVDEKEGVARGVLTQTLGPWRRPVAYLSKKLDPVASGWPTCLKAIAAVALLLKDADKLTLGQNVLVIAPHNLESIVRQPPDRWMTNARMTHYQSLLLNERVSFAPPAILNPATLLPVESDDTPIHICSEILAEETGTRPDLRDQPLPGVPAWYTDGSSFIMDGRRQAGAAIVDNKRTVWASNLPEGTSAQKAELIALTQALRLAEGKSINIYTDSRYAFATAHVHGAIYKQRGWLTSAGKDIKNKEEILALLEAIHLPKRVAIIHCPGHQRGTDPVATGNRKADEAAKQAAQSTRILTETTKNAGKRTADGSEFEKRTADGSEFESPKKKAKVE

SEQ ID NO: 1669 - protein, 2124 aa, synthetic construct
MPAAKRVKLDGGDKKYSIGLDIGTNSVGWAVITDEYKVPSKKFKVLGNTDRHSIKKNLIGALLFDSGETAEATRLKRTARRRYTRRKNRICYLQEIFSNEMAKVDDSFFHRLEESFLVEEDKKHERHPIFGNIVDEVAYHEKYPTIYHLRKKLVDSTDKADLRLIYLALAHMIKFRGHFLIEGDLNPDNSDVDKLFIQLVQTYNQLFEENPINASGVDAKAILSARLSKSRRLENLIAQLPGEKKNGLFGNLIALSLGLTPNFKSNFDLAEDAKLQLSKDTYDDDLDNLLAQIGDQYADLFLAAKNLSDAILLSDILRVNTEITKAPLSASMIKRYDEHHQDLTLLKALVRQQLPEKYKEIFFDQSKNGYAGYIDGGASQEEFYKFIKPILEKMDGTEELLVKLNREDLLRKQRTFDNGSIPHQIHLGELHAILRRQEDFYPFLKDNREKIEKILTFRIPYYVGPLARGNSRFAWMTRKSEETITPWNFEEVVDKGASAQSFIERMTNFDKNLPNEKVLPKHSLLYEYFTVYNELTKVKYVTEGMRKPAFLSGEQKKAIVDLLFKTNRKVTVKQLKEDYFKKIECFDSVEISGVEDRFNASLGTYHDLLKIIKDKDFLDNEENEDILEDIVLTLTLFEDREMIEERLKTYAHLFDDKVMKQLKRRRYTGWGRLSRKLINGIRDKQSGKTILDFLKSDGFANRNFMQLIHDDSLTFKEDIQKAQVSGQGDSLHEHIANLAGSPAIKKGILQTVKVVDELVKVMGRHKPENIVIEMARENQTTQKGQKNSRERMKRIEEGIKELGSQILKEHPVENTQLQNEKLYLYYLQNGRDMYVDQELDINRLSDYDVDHIVPQSFLKDDSIDNKVLTRSDKARGKSDNVPSEEVVKKMKNYWRQLLNAKLITQRKFDNLTKAERGGLSELDKAGFIKRQLVETRQITKHVAQILDSRMNTKYDENDKLIREVKVITLKSKLVSDFRKDFQFYKVREINNYHHAHDAYLNAVVGTALIKKYPKLESEFVYGDYKVYDVRKMIAKSEQEIGKATAKYFFYSNIMNFFKTEITLANGEIRKRPLIETNGETGEIVWDKGRDFATVRKVLSMPQVNIVKKTEVQTGGFSKESILPKRNSDKLIARKKDWDPKKYGGFDSPTVAYSVLVVAKVEKGKSKKLKSVKELLGITIMERSSFEKNPIDFLEAKGYKEVKKDLIIKLPKYSLFELENGRKRMLASAGELQKGNELALPSKYVNFLYLASHYEKLKGSPEDNEQKQLFVEQHKHYLDEIIEQISEFSKRVILADANLDKVLSAYNKHRDKPIREQAENIIHLFTLTNLGAPAAFKYFDTTIDRKRYTSTKEVLDATLIHQSITGLYETRIDLSQLGGDGGPAPEAAAKGGLLGRDLLTKLKAQIQFSTEGPQVTWEDRPAMCLVLNLEEEYRLHEKPVPPSIDPSWLQLFPMVWAEKAGMGLANQVPPVVVELKSDASPVAVRQYPMSKEAREGIRPHIQRFLDLGILVPCQSPWNTPLLPVKKPGTNDYRPVQDLREVNKRVQDIHPTVPNPYNLLSSLPPSHTWYSVLDLKDAFFCLKLHPNSQPLFAFEWRDPEKGNTGQLTWTRLPQGFKNSPTLFNEALHRDLASFRALNPQVVMLQYVDDLLVAAPTYRDCKEGTRRLLQELSKLGYRVSAKKAQLCREEVTYLGYLLKGGKRWLTPARKATVMKIPTPTTPRQVREFLGKAGFCRLFIPGFASLAAPLYPLTRPKVPFTWTEAHQEAFGRIKEALLSAPALALPDLTKPFALYVDEKEGVARGVLTQTLGPWRRPVAYLSKKLDPVASGWPTCLKAIAAVALLLKDADKLTLGQNVLVIAPHNLESIVRQPPDRWMTNARMTHYQSLLLNERVSFAPPAILNPATLLPVESDDTPIHICSEILAEETGTRPDLRDQPLPGVPAWYTDGSSFIMDGRRQAGAAIVDNKRTVWASNLPEGTSAQKAELIALTQALRLAEGKSINIYTDSRYAFATAHVHGAIYKQRGWLTSAGKDIKNKEEILALLEAIHLPKRVAIIHCPGHQRGTDPVATGNRKADEAAKQAAQSTRILTETTKNAGKRTADGSEFEKRTADGSEFESPKKKAKVE

SEQ ID NO: 1670 - protein, 2162 aa, synthetic construct
MPAAKRVKLDGGDKKYSIGLDIGTNSVGWAVITDEYKVPSKKFKVLGNTDRHSIKKNLIGALLFDSGETAEATRLKRTARRRYTRRKNRICYLQEIFSNEMAKVDDSFFHRLEESFLVEEDKKHERHPIFGNIVDEVAYHEKYPTIYHLRKKLVDSTDKADLRLIYLALAHMIKFRGHFLIEGDLNPDNSDVDKLFIQLVQTYNQLFEENPINASGVDAKAILSARLSKSRRLENLIAQLPGEKKNGLFGNLIALSLGLTPNFKSNFDLAEDAKLQLSKDTYDDDLDNLLAQIGDQYADLFLAAKNLSDAILLSDILRVNTEITKAPLSASMIKRYDEHHQDLTLLKALVRQQLPEKYKEIFFDQSKNGYAGYIDGGASQEEFYKFIKPILEKMDGTEELLVKLNREDLLRKQRTFDNGSIPHQIHLGELHAILRRQEDFYPFLKDNREKIEKILTFRIPYYVGPLARGNSRFAWMTRKSEETITPWNFEEVVDKGASAQSFIERMTNFDKNLPNEKVLPKHSLLYEYFTVYNELTKVKYVTEGMRKPAFLSGEQKKAIVDLLFKTNRKVTVKQLKEDYFKKIECFDSVEISGVEDRFNASLGTYHDLLKIIKDKDFLDNEENEDILEDIVLTLTLFEDREMIEERLKTYAHLFDDKVMKQLKRRRYTGWGRLSRKLINGIRDKQSGKTILDFLKSDGFANRNFMQLIHDDSLTFKEDIQKAQVSGQGDSLHEHIANLAGSPAIKKGILQTVKVVDELVKVMGRHKPENIVIEMARENQTTQKGQKNSRERMKRIEEGIKELGSQILKEHPVENTQLQNEKLYLYYLQNGRDMYVDQELDINRLSDYDVDHIVPQSFLKDDSIDNKVLTRSDKARGKSDNVPSEEVVKKMKNYWRQLLNAKLITQRKFDNLTKAERGGLSELDKAGFIKRQLVETRQITKHVAQILDSRMNTKYDENDKLIREVKVITLKSKLVSDFRKDFQFYKVREINNYHHAHDAYLNAVVGTALIKKYPKLESEFVYGDYKVYDVRKMIAKSEQEIGKATAKYFFYSNIMNFFKTEITLANGEIRKRPLIETNGETGEIVWDKGRDFATVRKVLSMPQVNIVKKTEVQTGGFSKESILPKRNSDKLIARKKDWDPKKYGGFDSPTVAYSVLVVAKVEKGKSKKLKSVKELLGITIMERSSFEKNPIDFLEAKGYKEVKKDLIIKLPKYSLFELENGRKRMLASAGELQKGNELALPSKYVNFLYLASHYEKLKGSPEDNEQKQLFVEQHKHYLDEIIEQISEFSKRVILADANLDKVLSAYNKHRDKPIREQAENIIHLFTLTNLGAPAAFKYFDTTIDRKRYTSTKEVLDATLIHQSITGLYETRIDLSQLGGDGGAEAAAKEAAAKEAAAKEAAAKALEAEAAAKEAAAKEAAAKEAAAKAGGLLGRDLLTKLKAQIQFSTEGPQVTWEDRPAMCLVLNLEEEYRLHEKPVPPSIDPSWLQLFPMVWAEKAGMGLANQVPPVVVELKSDASPVAVRQYPMSKEAREGIRPHIQRFLDLGILVPCQSPWNTPLLPVKKPGTNDYRPVQDLREVNKRVQDIHPTVPNPYNLLSSLPPSHTWYSVLDLKDAFFCLKLHPNSQPLFAFEWRDPEKGNTGQLTWTRLPQGFKNSPTLFNEALHRDLASFRALNPQVVMLQYVDDLLVAAPTYRDCKEGTRRLLQELSKLGYRVSAKKAQLCREEVTYLGYLLKGGKRWLTPARKATVMKIPTPTTPRQVREFLGKAGFCRLFIPGFASLAAPLYPLTRPKVPFTWTEAHQEAFGRIKEALLSAPALALPDLTKPFALYVDEKEGVARGVLTQTLGPWRRPVAYLSKKLDPVASGWPTCLKAIAAVALLLKDADKLTLGQNVLVIAPHNLESIVRQPPDRWMTNARMTHYQSLLLNERVSFAPPAILNPATLLPVESDDTPIHICSEILAEETGTRPDLRDQPLPGVPAWYTDGSSFIMDGRRQAGAAIVDNKRTVWASNLPEGTSAQKAELIALTQALRLAEGKSINIYTDSRYAFATAHVHGAIYKQRGWLTSAGKDIKNKEEILALLEAIHLPKRVAIIHCPGHQRGTDPVATGNRKADEAAKQAAQSTRILTETTKNAGKRTADGSEFEKRTADGSEFESPKKKAKVE

SEQ ID NO: 1671 - protein, 2124 aa, synthetic construct
MPAAKRVKLDGGDKKYSIGLDIGTNSVGWAVITDEYKVPSKKFKVLGNTDRHSIKKNLIGALLFDSGETAEATRLKRTARRRYTRRKNRICYLQEIFSNEMAKVDDSFFHRLEESFLVEEDKKHERHPIFGNIVDEVAYHEKYPTIYHLRKKLVDSTDKADLRLIYLALAHMIKFRGHFLIEGDLNPDNSDVDKLFIQLVQTYNQLFEENPINASGVDAKAILSARLSKSRRLENLIAQLPGEKKNGLFGNLIALSLGLTPNFKSNFDLAEDAKLQLSKDTYDDDLDNLLAQIGDQYADLFLAAKNLSDAILLSDILRVNTEITKAPLSASMIKRYDEHHQDLTLLKALVRQQLPEKYKEIFFDQSKNGYAGYIDGGASQEEFYKFIKPILEKMDGTEELLVKLNREDLLRKQRTFDNGSIPHQIHLGELHAILRRQEDFYPFLKDNREKIEKILTFRIPYYVGPLARGNSRFAWMTRKSEETITPWNFEEVVDKGASAQSFIERMTNFDKNLPNEKVLPKHSLLYEYFTVYNELTKVKYVTEGMRKPAFLSGEQKKAIVDLLFKTNRKVTVKQLKEDYFKKIECFDSVEISGVEDRFNASLGTYHDLLKIIKDKDFLDNEENEDILEDIVLTLTLFEDREMIEERLKTYAHLFDDKVMKQLKRRRYTGWGRLSRKLINGIRDKQSGKTILDFLKSDGFANRNFMQLIHDDSLTFKEDIQKAQVSGQGDSLHEHIANLAGSPAIKKGILQTVKVVDELVKVMGRHKPENIVIEMARENQTTQKGQKNSRERMKRIEEGIKELGSQILKEHPVENTQLQNEKLYLYYLQNGRDMYVDQELDINRLSDYDVDHIVPQSFLKDDSIDNKVLTRSDKARGKSDNVPSEEVVKKMKNYWRQLLNAKLITQRKFDNLTKAERGGLSELDKAGFIKRQLVETRQITKHVAQILDSRMNTKYDENDKLIREVKVITLKSKLVSDFRKDFQFYKVREINNYHHAHDAYLNAVVGTALIKKYPKLESEFVYGDYKVYDVRKMIAKSEQEIGKATAKYFFYSNIMNFFKTEITLANGEIRKRPLIETNGETGEIVWDKGRDFATVRKVLSMPQVNIVKKTEVQTGGFSKESILPKRNSDKLIARKKDWDPKKYGGFDSPTVAYSVLVVAKVEKGKSKKLKSVKELLGITIMERSSFEKNPIDFLEAKGYKEVKKDLIIKLPKYSLFELENGRKRMLASAGELQKGNELALPSKYVNFLYLASHYEKLKGSPEDNEQKQLFVEQHKHYLDEIIEQISEFSKRVILADANLDKVLSAYNKHRDKPIREQAENIIHLFTLTNLGAPAAFKYFDTTIDRKRYTSTKEVLDATLIHQSITGLYETRIDLSQLGGDGGEAAAKGSSGGLLGRDLLTKLKAQIQFSTEGPQVTWEDRPAMCLVLNLEEEYRLHEKPVPPSIDPSWLQLFPMVWAEKAGMGLANQVPPVVVELKSDASPVAVRQYPMSKEAREGIRPHIQRFLDLGILVPCQSPWNTPLLPVKKPGTNDYRPVQDLREVNKRVQDIHPTVPNPYNLLSSLPPSHTWYSVLDLKDAFFCLKLHPNSQPLFAFEWRDPEKGNTGQLTWTRLPQGFKNSPTLFNEALHRDLASFRALNPQVVMLQYVDDLLVAAPTYRDCKEGTRRLLQELSKLGYRVSAKKAQLCREEVTYLGYLLKGGKRWLTPARKATVMKIPTPTTPRQVREFLGKAGFCRLFIPGFASLAAPLYPLTRPKVPFTWTEAHQEAFGRIKEALLSAPALALPDLTKPFALYVDEKEGVARGVLTQTLGPWRRPVAYLSKKLDPVASGWPTCLKAIAAVALLLKDADKLTLGQNVLVIAPHNLESIVRQPPDRWMTNARMTHYQSLLLNERVSFAPPAILNPATLLPVESDDTPIHICSEILAEETGTRPDLRDQPLPGVPAWYTDGSSFIMDGRRQAGAAIVDNKRTVWASNLPEGTSAQKAELIALTQALRLAEGKSINIYTDSRYAFATAHVHGAIYKQRGWLTSAGKDIKNKEEILALLEAIHLPKRVAIIHCPGHQRGTDPVATGNRKADEAAKQAAQSTRILTETTKNAGKRTADGSEFEKRTADGSEFESPKKKAKVE

SEQ ID NO: 1672 - protein, 2127 aa, synthetic construct
MPAAKRVKLDGGDKKYSIGLDIGTNSVGWAVITDEYKVPSKKFKVLGNTDRHSIKKNLIGALLFDSGETAEATRLKRTARRRYTRRKNRICYLQEIFSNEMAKVDDSFFHRLEESFLVEEDKKHERHPIFGNIVDEVAYHEKYPTIYHLRKKLVDSTDKADLRLIYLALAHMIKFRGHFLIEGDLNPDNSDVDKLFIQLVQTYNQLFEENPINASGVDAKAILSARLSKSRRLENLIAQLPGEKKNGLFGNLIALSLGLTPNFKSNFDLAEDAKLQLSKDTYDDDLDNLLAQIGDQYADLFLAAKNLSDAILLSDILRVNTEITKAPLSASMIKRYDEHHQDLTLLKALVRQQLPEKYKEIFFDQSKNGYAGYIDGGASQEEFYKFIKPILEKMDGTEELLVKLNREDLLRKQRTFDNGSIPHQIHLGELHAILRRQEDFYPFLKDNREKIEKILTFRIPYYVGPLARGNSRFAWMTRKSEETITPWNFEEVVDKGASAQSFIERMTNFDKNLPNEKVLPKHSLLYEYFTVYNELTKVKYVTEGMRKPAFLSGEQKKAIVDLLFKTNRKVTVKQLKEDYFKKIECFDSVEISGVEDRFNASLGTYHDLLKIIKDKDFLDNEENEDILEDIVLTLTLFEDREMIEERLKTYAHLFDDKVMKQLKRRRYTGWGRLSRKLINGIRDKQSGKTILDFLKSDGFANRNFMQLIHDDSLTFKEDIQKAQVSGQGDSLHEHIANLAGSPAIKKGILQTVKVVDELVKVMGRHKPENIVIEMARENQTTQKGQKNSRERMKRIEEGIKELGSQILKEHPVENTQLQNEKLYLYYLQNGRDMYVDQELDINRLSDYDVDHIVPQSFLKDDSIDNKVLTRSDKARGKSDNVPSEEVVKKMKNYWRQLLNAKLITQRKFDNLTKAERGGLSELDKAGFIKRQLVETRQITKHVAQILDSRMNTKYDENDKLIREVKVITLKSKLVSDFRKDFQFYKVREINNYHHAHDAYLNAVVGTALIKKYPKLESEFVYGDYKVYDVRKMIAKSEQEIGKATAKYFFYSNIMNFFKTEITLANGEIRKRPLIETNGETGEIVWDKGRDFATVRKVLSMPQVNIVKKTEVQTGGFSKESILPKRNSDKLIARKKDWDPKKYGGFDSPTVAYSVLVVAKVEKGKSKKLKSVKELLGITIMERSSFEKNPIDFLEAKGYKEVKKDLIIKLPKYSLFELENGRKRMLASAGELQKGNELALPSKYVNFLYLASHYEKLKGSPEDNEQKQLFVEQHKHYLDEIIEQISEFSKRVILADANLDKVLSAYNKHRDKPIREQAENIIHLFTLTNLGAPAAFKYFDTTIDRKRYTSTKEVLDATLIHQSITGLYETRIDLSQLGGDGGGGGEAAAKPAPGGLLGRDLLTKLKAQIQFSTEGPQVTWEDRPAMCLVLNLEEEYRLHEKPVPPSIDPSWLQLFPMVWAEKAGMGLANQVPPVVVELKSDASPVAVRQYPMSKEAREGIRPHIQRFLDLGILVPCQSPWNTPLLPVKKPGTNDYRPVQDLREVNKRVQDIHPTVPNPYNLLSSLPPSHTWYSVLDLKDAFFCLKLHPNSQPLFAFEWRDPEKGNTGQLTWTRLPQGFKNSPTLFNEALHRDLASFRALNPQVVMLQYVDDLLVAAPTYRDCKEGTRRLLQELSKLGYRVSAKKAQLCREEVTYLGYLLKGGKRWLTPARKATVMKIPTPTTPRQVREFLGKAGFCRLFIPGFASLAAPLYPLTRPKVPFTWTEAHQEAFGRIKEALLSAPALALPDLTKPFALYVDEKEGVARGVLTQTLGPWRRPVAYLSKKLDPVASGWPTCLKAIAAVALLLKDADKLTLGQNVLVIAPHNLESIVRQPPDRWMTNARMTHYQSLLLNERVSFAPPAILNPATLLPVESDDTPIHICSEILAEETGTRPDLRDQPLPGVPAWYTDGSSFIMDGRRQAGAAIVDNKRTVWASNLPEGTSAQKAELIALTQALRLAEGKSINIYTDSRYAFATAHVHGAIYKQRGWLTSAGKDIKNKEEILALLEAIHLPKRVAIIHCPGHQRGTDPVATGNRKADEAAKQAAQSTRILTETTKNAGKRTADGSEFEKRTADGSEFESPKKKAKVE

SEQ ID NO: 1673 - protein, 2122 aa, synthetic construct
MPAAKRVKLDGGDKKYSIGLDIGTNSVGWAVITDEYKVPSKKFKVLGNTDRHSIKKNLIGALLFDSGETAEATRLKRTARRRYTRRKNRICYLQEIFSNEMAKVDDSFFHRLEESFLVEEDKKHERHPIFGNIVDEVAYHEKYPTIYHLRKKLVDSTDKADLRLIYLALAHMIKFRGHFLIEGDLNPDNSDVDKLFIQLVQTYNQLFEENPINASGVDAKAILSARLSKSRRLENLIAQLPGEKKNGLFGNLIALSLGLTPNFKSNFDLAEDAKLQLSKDTYDDDLDNLLAQIGDQYADLFLAAKNLSDAILLSDILRVNTEITKAPLSASMIKRYDEHHQDLTLLKALVRQQLPEKYKEIFFDQSKNGYAGYIDGGASQEEFYKFIKPILEKMDGTEELLVKLNREDLLRKQRTFDNGSIPHQIHLGELHAILRRQEDFYPFLKDNREKIEKILTFRIPYYVGPLARGNSRFAWMTRKSEETITPWNFEEVVDKGASAQSFIERMTNFDKNLPNEKVLPKHSLLYEYFTVYNELTKVKYVTEGMRKPAFLSGEQKKAIVDLLFKTNRKVTVKQLKEDYFKKIECFDSVEISGVEDRFNASLGTYHDLLKIIKDKDFLDNEENEDILEDIVLTLTLFEDREMIEERLKTYAHLFDDKVMKQLKRRRYTGWGRLSRKLINGIRDKQSGKTILDFLKSDGFANRNFMQLIHDDSLTFKEDIQKAQVSGQGDSLHEHIANLAGSPAIKKGILQTVKVVDELVKVMGRHKPENIVIEMARENQTTQKGQKNSRERMKRIEEGIKELGSQILKEHPVENTQLQNEKLYLYYLQNGRDMYVDQELDINRLSDYDVDHIVPQSFLKDDSIDNKVLTRSDKARGKSDNVPSEEVVKKMKNYWRQLLNAKLITQRKFDNLTKAERGGLSELDKAGFIKRQLVETRQITKHVAQILDSRMNTKYDENDKLIREVKVITLKSKLVSDFRKDFQFYKVREINNYHHAHDAYLNAVVGTALIKKYPKLESEFVYGDYKVYDVRKMIAKSEQEIGKATAKYFFYSNIMNFFKTEITLANGEIRKRPLIETNGETGEIVWDKGRDFATVRKVLSMPQVNIVKKTEVQTGGFSKESILPKRNSDKLIARKKDWDPKKYGGFDSPTVAYSVLVVAKVEKGKSKKLKSVKELLGITIMERSSFEKNPIDFLEAKGYKEVKKDLIIKLPKYSLFELENGRKRMLASAGELQKGNELALPSKYVNFLYLASHYEKLKGSPEDNEQKQLFVEQHKHYLDEIIEQISEFSKRVILADANLDKVLSAYNKHRDKPIREQAENIIHLFTLTNLGAPAAFKYFDTTIDRKRYTSTKEVLDATLIHQSITGLYETRIDLSQLGGDGGGGGPAPGGLLGRDLLTKLKAQIQFSTEGPQVTWEDRPAMCLVLNLEEEYRLHEKPVPPSIDPSWLQLFPMVWAEKAGMGLANQVPPVVVELKSDASPVAVRQYPMSKEAREGIRPHIQRFLDLGILVPCQSPWNTPLLPVKKPGTNDYRPVQDLREVNKRVQDIHPTVPNPYNLLSSLPPSHTWYSVLDLKDAFFCLKLHPNSQPLFAFEWRDPEKGNTGQLTWTRLPQGFKNSPTLFNEALHRDLASFRALNPQVVMLQYVDDLLVAAPTYRDCKEGTRRLLQELSKLGYRVSAKKAQLCREEVTYLGYLLKGGKRWLTPARKATVMKIPTPTTPRQVREFLGKAGFCRLFIPGFASLAAPLYPLTRPKVPFTWTEAHQEAFGRIKEALLSAPALALPDLTKPFALYVDEKEGVARGVLTQTLGPWRRPVAYLSKKLDPVASGWPTCLKAIAAVALLLKDADKLTLGQNVLVIAPHNLESIVRQPPDRWMTNARMTHYQSLLLNERVSFAPPAILNPATLLPVESDDTPIHICSEILAEETGTRPDLRDQPLPGVPAWYTDGSSFIMDGRRQAGAAIVDNKRTVWASNLPEGTSAQKAELIALTQALRLAEGKSINIYTDSRYAFATAHVHGAIYKQRGWLTSAGKDIKNKEEILALLEAIHLPKRVAIIHCPGHQRGTDPVATGNRKADEAAKQAAQSTRILTETTKNAGKRTADGSEFEKRTADGSEFESPKKKAKVE

SEQ ID NO: 1674 - protein, 2136 aa, synthetic construct
MPAAKRVKLDGGDKKYSIGLDIGTNSVGWAVITDEYKVPSKKFKVLGNTDRHSIKKNLIGALLFDSGETAEATRLKRTARRRYTRRKNRICYLQEIFSNEMAKVDDSFFHRLEESFLVEEDKKHERHPIFGNIVDEVAYHEKYPTIYHLRKKLVDSTDKADLRLIYLALAHMIKFRGHFLIEGDLNPDNSDVDKLFIQLVQTYNQLFEENPINASGVDAKAILSARLSKSRRLENLIAQLPGEKKNGLFGNLIALSLGLTPNFKSNFDLAEDAKLQLSKDTYDDDLDNLLAQIGDQYADLFLAAKNLSDAILLSDILRVNTEITKAPLSASMIKRYDEHHQDLTLLKALVRQQLPEKYKEIFFDQSKNGYAGYIDGGASQEEFYKFIKPILEKMDGTEELLVKLNREDLLRKQRTFDNGSIPHQIHLGELHAILRRQEDFYPFLKDNREKIEKILTFRIPYYVGPLARGNSRFAWMTRKSEETITPWNFEEVVDKGASAQSFIERMTNFDKNLPNEKVLPKHSLLYEYFTVYNELTKVKYVTEGMRKPAFLSGEQKKAIVDLLFKTNRKVTVKQLKEDYFKKIECFDSVEISGVEDRFNASLGTYHDLLKIIKDKDFLDNEENEDILEDIVLTLTLFEDREMIEERLKTYAHLFDDKVMKQLKRRRYTGWGRLSRKLINGIRDKQSGKTILDFLKSDGFANRNFMQLIHDDSLTFKEDIQKAQVSGQGDSLHEHIANLAGSPAIKKGILQTVKVVDELVKVMGRHKPENIVIEMARENQTTQKGQKNSRERMKRIEEGIKELGSQILKEHPVENTQLQNEKLYLYYLQNGRDMYVDQELDINRLSDYDVDHIVPQSFLKDDSIDNKVLTRSDKARGKSDNVPSEEVVKKMKNYWRQLLNAKLITQRKFDNLTKAERGGLSELDKAGFIKRQLVETRQITKHVAQILDSRMNTKYDENDKLIREVKVITLKSKLVSDFRKDFQFYKVREINNYHHAHDAYLNAVVGTALIKKYPKLESEFVYGDYKVYDVRKMIAKSEQEIGKATAKYFFYSNIMNFFKTEITLANGEIRKRPLIETNGETGEIVWDKGRDFATVRKVLSMPQVNIVKKTEVQTGGFSKESILPKRNSDKLIARKKDWDPKKYGGFDSPTVAYSVLVVAKVEKGKSKKLKSVKELLGITIMERSSFEKNPIDFLEAKGYKEVKKDLIIKLPKYSLFELENGRKRMLASAGELQKGNELALPSKYVNFLYLASHYEKLKGSPEDNEQKQLFVEQHKHYLDEIIEQISEFSKRVILADANLDKVLSAYNKHRDKPIREQAENIIHLFTLTNLGAPAAFKYFDTTIDRKRYTSTKEVLDATLIHQSITGLYETRIDLSQLGGDGGEAAAKEAAAKEAAAKEAAAKGGLLGRDLLTKLKAQIQFSTEGPQVTWEDRPAMCLVLNLEEEYRLHEKPVPPSIDPSWLQLFPMVWAEKAGMGLANQVPPVVVELKSDASPVAVRQYPMSKEAREGIRPHIQRFLDLGILVPCQSPWNTPLLPVKKPGTNDYRPVQDLREVNKRVQDIHPTVPNPYNLLSSLPPSHTWYSVLDLKDAFFCLKLHPNSQPLFAFEWRDPEKGNTGQLTWTRLPQGFKNSPTLFNEALHRDLASFRALNPQVVMLQYVDDLLVAAPTYRDCKEGTRRLLQELSKLGYRVSAKKAQLCREEVTYLGYLLKGGKRWLTPARKATVMKIPTPTTPRQVREFLGKAGFCRLFIPGFASLAAPLYPLTRPKVPFTWTEAHQEAFGRIKEALLSAPALALPDLTKPFALYVDEKEGVARGVLTQTLGPWRRPVAYLSKKLDPVASGWPTCLKAIAAVALLLKDADKLTLGQNVLVIAPHNLESIVRQPPDRWMTNARMTHYQSLLLNERVSFAPPAILNPATLLPVESDDTPIHICSEILAEETGTRPDLRDQPLPGVPAWYTDGSSFIMDGRRQAGAAIVDNKRTVWASNLPEGTSAQKAELIALTQALRLAEGKSINIYTDSRYAFATAHVHGAIYKQRGWLTSAGKDIKNKEEILALLEAIHLPKRVAIIHCPGHQRGTDPVATGNRKADEAAKQAAQSTRILTETTKNAGKRTADGSEFEKRTADGSEFESPKKKAKVE

SEQ ID NO: 1675 - protein, 2119 aa, synthetic construct
MPAAKRVKLDGGDKKYSIGLDIGTNSVGWAVITDEYKVPSKKFKVLGNTDRHSIKKNLIGALLFDSGETAEATRLKRTARRRYTRRKNRICYLQEIFSNEMAKVDDSFFHRLEESFLVEEDKKHERHPIFGNIVDEVAYHEKYPTIYHLRKKLVDSTDKADLRLIYLALAHMIKFRGHFLIEGDLNPDNSDVDKLFIQLVQTYNQLFEENPINASGVDAKAILSARLSKSRRLENLIAQLPGEKKNGLFGNLIALSLGLTPNFKSNFDLAEDAKLQLSKDTYDDDLDNLLAQIGDQYADLFLAAKNLSDAILLSDILRVNTEITKAPLSASMIKRYDEHHQDLTLLKALVRQQLPEKYKEIFFDQSKNGYAGYIDGGASQEEFYKFIKPILEKMDGTEELLVKLNREDLLRKQRTFDNGSIPHQIHLGELHAILRRQEDFYPFLKDNREKIEKILTFRIPYYVGPLARGNSRFAWMTRKSEETITPWNFEEVVDKGASAQSFIERMTNFDKNLPNEKVLPKHSLLYEYFTVYNELTKVKYVTEGMRKPAFLSGEQKKAIVDLLFKTNRKVTVKQLKEDYFKKIECFDSVEISGVEDRFNASLGTYHDLLKIIKDKDFLDNEENEDILEDIVLTLTLFEDREMIEERLKTYAHLFDDKVMKQLKRRRYTGWGRLSRKLINGIRDKQSGKTILDFLKSDGFANRNFMQLIHDDSLTFKEDIQKAQVSGQGDSLHEHIANLAGSPAIKKGILQTVKVVDELVKVMGRHKPENIVIEMARENQTTQKGQKNSRERMKRIEEGIKELGSQILKEHPVENTQLQNEKLYLYYLQNGRDMYVDQELDINRLSDYDVDHIVPQSFLKDDSIDNKVLTRSDKARGKSDNVPSEEVVKKMKNYWRQLLNAKLITQRKFDNLTKAERGGLSELDKAGFIKRQLVETRQITKHVAQILDSRMNTKYDENDKLIREVKVITLKSKLVSDFRKDFQFYKVREINNYHHAHDAYLNAVVGTALIKKYPKLESEFVYGDYKVYDVRKMIAKSEQEIGKATAKYFFYSNIMNFFKTEITLANGEIRKRPLIETNGETGEIVWDKGRDFATVRKVLSMPQVNIVKKTEVQTGGFSKESILPKRNSDKLIARKKDWDPKKYGGFDSPTVAYSVLVVAKVEKGKSKKLKSVKELLGITIMERSSFEKNPIDFLEAKGYKEVKKDLIIKLPKYSLFELENGRKRMLASAGELQKGNELALPSKYVNFLYLASHYEKLKGSPEDNEQKQLFVEQHKHYLDEIIEQISEFSKRVILADANLDKVLSAYNKHRDKPIREQAENIIHLFTLTNLGAPAAFKYFDTTIDRKRYTSTKEVLDATLIHQSITGLYETRIDLSQLGGDGGGGSGGLLGRDLLTKLKAQIQFSTEGPQVTWEDRPAMCLVLNLEEEYRLHEKPVPPSIDPSWLQLFPMVWAEKAGMGLANQVPPVVVELKSDASPVAVRQYPMSKEAREGIRPHIQRFLDLGILVPCQSPWNTPLLPVKKPGTNDYRPVQDLREVNKRVQDIHPTVPNPYNLLSSLPPSHTWYSVLDLKDAFFCLKLHPNSQPLFAFEWRDPEKGNTGQLTWTRLPQGFKNSPTLFNEALHRDLASFRALNPQVVMLQYVDDLLVAAPTYRDCKEGTRRLLQELSKLGYRVSAKKAQLCREEVTYLGYLLKGGKRWLTPARKATVMKIPTPTTPRQVREFLGKAGFCRLFIPGFASLAAPLYPLTRPKVPFTWTEAHQEAFGRIKEALLSAPALALPDLTKPFALYVDEKEGVARGVLTQTLGPWRRPVAYLSKKLDPVASGWPTCLKAIAAVALLLKDADKLTLGQNVLVIAPHNLESIVRQPPDRWMTNARMTHYQSLLLNERVSFAPPAILNPATLLPVESDDTPIHICSEILAEETGTRPDLRDQPLPGVPAWYTDGSSFIMDGRRQAGAAIVDNKRTVWASNLPEGTSAQKAELIALTQALRLAEGKSINIYTDSRYAFATAHVHGAIYKQRGWLTSAGKDIKNKEEILALLEAIHLPKRVAIIHCPGHQRGTDPVATGNRKADEAAKQAAQSTRILTETTKNAGKRTADGSEFEKRTADGSEFESPKKKAKVE

SEQ ID NO: 1676 - protein, 2122 aa, synthetic construct
MPAAKRVKLDGGDKKYSIGLDIGTNSVGWAVITDEYKVPSKKFKVLGNTDRHSIKKNLIGALLFDSGETAEATRLKRTARRRYTRRKNRICYLQEIFSNEMAKVDDSFFHRLEESFLVEEDKKHERHPIFGNIVDEVAYHEKYPTIYHLRKKLVDSTDKADLRLIYLALAHMIKFRGHFLIEGDLNPDNSDVDKLFIQLVQTYNQLFEENPINASGVDAKAILSARLSKSRRLENLIAQLPGEKKNGLFGNLIALSLGLTPNFKSNFDLAEDAKLQLSKDTYDDDLDNLLAQIGDQYADLFLAAKNLSDAILLSDILRVNTEITKAPLSASMIKRYDEHHQDLTLLKALVRQQLPEKYKEIFFDQSKNGYAGYIDGGASQEEFYKFIKPILEKMDGTEELLVKLNREDLLRKQRTFDNGSIPHQIHLGELHAILRRQEDFYPFLKDNREKIEKILTFRIPYYVGPLARGNSRFAWMTRKSEETITPWNFEEVVDKGASAQSFIERMTNFDKNLPNEKVLPKHSLLYEYFTVYNELTKVKYVTEGMRKPAFLSGEQKKAIVDLLFKTNRKVTVKQLKEDYFKKIECFDSVEISGVEDRFNASLGTYHDLLKIIKDKDFLDNEENEDILEDIVLTLTLFEDREMIEERLKTYAHLFDDKVMKQLKRRRYTGWGRLSRKLINGIRDKQSGKTILDFLKSDGFANRNFMQLIHDDSLTFKEDIQKAQVSGQGDSLHEHIANLAGSPAIKKGILQTVKVVDELVKVMGRHKPENIVIEMARENQTTQKGQKNSRERMKRIEEGIKELGSQILKEHPVENTQLQNEKLYLYYLQNGRDMYVDQELDINRLSDYDVDHIVPQSFLKDDSIDNKVLTRSDKARGKSDNVPSEEVVKKMKNYWRQLLNAKLITQRKFDNLTKAERGGLSELDKAGFIKRQLVETRQITKHVAQILDSRMNTKYDENDKLIREVKVITLKSKLVSDFRKDFQFYKVREINNYHHAHDAYLNAVVGTALIKKYPKLESEFVYGDYKVYDVRKMIAKSEQEIGKATAKYFFYSNIMNFFKTEITLANGEIRKRPLIETNGETGEIVWDKGRDFATVRKVLSMPQVNIVKKTEVQTGGFSKESILPKRNSDKLIARKKDWDPKKYGGFDSPTVAYSVLVVAKVEKGKSKKLKSVKELLGITIMERSSFEKNPIDFLEAKGYKEVKKDLIIKLPKYSLFELENGRKRMLASAGELQKGNELALPSKYVNFLYLASHYEKLKGSPEDNEQKQLFVEQHKHYLDEIIEQISEFSKRVILADANLDKVLSAYNKHRDKPIREQAENIIHLFTLTNLGAPAAFKYFDTTIDRKRYTSTKEVLDATLIHQSITGLYETRIDLSQLGGDGGGGGGSSGGLLGRDLLTKLKAQIQFSTEGPQVTWEDRPAMCLVLNLEEEYRLHEKPVPPSIDPSWLQLFPMVWAEKAGMGLANQVPPVVVELKSDASPVAVRQYPMSKEAREGIRPHIQRFLDLGILVPCQSPWNTPLLPVKKPGTNDYRPVQDLREVNKRVQDIHPTVPNPYNLLSSLPPSHTWYSVLDLKDAFFCLKLHPNSQPLFAFEWRDPEKGNTGQLTWTRLPQGFKNSPTLFNEALHRDLASFRALNPQVVMLQYVDDLLVAAPTYRDCKEGTRRLLQELSKLGYRVSAKKAQLCREEVTYLGYLLKGGKRWLTPARKATVMKIPTPTTPRQVREFLGKAGFCRLFIPGFASLAAPLYPLTRPKVPFTWTEAHQEAFGRIKEALLSAPALALPDLTKPFALYVDEKEGVARGVLTQTLGPWRRPVAYLSKKLDPVASGWPTCLKAIAAVALLLKDADKLTLGQNVLVIAPHNLESIVRQPPDRWMTNARMTHYQSLLLNERVSFAPPAILNPATLLPVESDDTPIHICSEILAEETGTRPDLRDQPLPGVPAWYTDGSSFIMDGRRQAGAAIVDNKRTVWASNLPEGTSAQKAELIALTQALRLAEGKSINIYTDSRYAFATAHVHGAIYKQRGWLTSAGKDIKNKEEILALLEAIHLPKRVAIIHCPGHQRGTDPVATGNRKADEAAKQAAQSTRILTETTKNAGKRTADGSEFEKRTADGSEFESPKKKAKVE

SEQ ID NO: 1677 - protein, 2127 aa, synthetic construct
MPAAKRVKLDGGDKKYSIGLDIGTNSVGWAVITDEYKVPSKKFKVLGNTDRHSIKKNLIGALLFDSGETAEATRLKRTARRRYTRRKNRICYLQEIFSNEMAKVDDSFFHRLEESFLVEEDKKHERHPIFGNIVDEVAYHEKYPTIYHLRKKLVDSTDKADLRLIYLALAHMIKFRGHFLIEGDLNPDNSDVDKLFIQLVQTYNQLFEENPINASGVDAKAILSARLSKSRRLENLIAQLPGEKKNGLFGNLIALSLGLTPNFKSNFDLAEDAKLQLSKDTYDDDLDNLLAQIGDQYADLFLAAKNLSDAILLSDILRVNTEITKAPLSASMIKRYDEHHQDLTLLKALVRQQLPEKYKEIFFDQSKNGYAGYIDGGASQEEFYKFIKPILEKMDGTEELLVKLNREDLLRKQRTFDNGSIPHQIHLGELHAILRRQEDFYPFLKDNREKIEKILTFRIPYYVGPLARGNSRFAWMTRKSEETITPWNFEEVVDKGASAQSFIERMTNFDKNLPNEKVLPKHSLLYEYFTVYNELTKVKYVTEGMRKPAFLSGEQKKAIVDLLFKTNRKVTVKQLKEDYFKKIECFDSVEISGVEDRFNASLGTYHDLLKIIKDKDFLDNEENEDILEDIVLTLTLFEDREMIEERLKTYAHLFDDKVMKQLKRRRYTGWGRLSRKLINGIRDKQSGKTILDFLKSDGFANRNFMQLIHDDSLTFKEDIQKAQVSGQGDSLHEHIANLAGSPAIKKGILQTVKVVDELVKVMGRHKPENIVIEMARENQTTQKGQKNSRERMKRIEEGIKELGSQILKEHPVENTQLQNEKLYLYYLQNGRDMYVDQELDINRLSDYDVDHIVPQSFLKDDSIDNKVLTRSDKARGKSDNVPSEEVVKKMKNYWRQLLNAKLITQRKFDNLTKAERGGLSELDKAGFIKRQLVETRQITKHVAQILDSRMNTKYDENDKLIREVKVITLKSKLVSDFRKDFQFYKVREINNYHHAHDAYLNAVVGTALIKKYPKLESEFVYGDYKVYDVRKMIAKSEQEIGKATAKYFFYSNIMNFFKTEITLANGEIRKRPLIETNGETGEIVWDKGRDFATVRKVLSMPQVNIVKKTEVQTGGFSKESILPKRNSDKLIARKKDWDPKKYGGFDSPTVAYSVLVVAKVEKGKSKKLKSVKELLGITIMERSSFEKNPIDFLEAKGYKEVKKDLIIKLPKYSLFELENGRKRMLASAGELQKGNELALPSKYVNFLYLASHYEKLKGSPEDNEQKQLFVEQHKHYLDEIIEQISEFSKRVILADANLDKVLSAYNKHRDKPIREQAENIIHLFTLTNLGAPAAFKYFDTTIDRKRYTSTKEVLDATLIHQSITGLYETRIDLSQLGGDGGEAAAKGGGGSSGGLLGRDLLTKLKAQIQFSTEGPQVTWEDRPAMCLVLNLEEEYRLHEKPVPPSIDPSWLQLFPMVWAEKAGMGLANQVPPVVVELKSDASPVAVRQYPMSKEAREGIRPHIQRFLDLGILVPCQSPWNTPLLPVKKPGTNDYRPVQDLREVNKRVQDIHPTVPNPYNLLSSLPPSHTWYSVLDLKDAFFCLKLHPNSQPLFAFEWRDPEKGNTGQLTWTRLPQGFKNSPTLFNEALHRDLASFRALNPQVVMLQYVDDLLVAAPTYRDCKEGTRRLLQELSKLGYRVSAKKAQLCREEVTYLGYLLKGGKRWLTPARKATVMKIPTPTTPRQVREFLGKAGFCRLFIPGFASLAAPLYPLTRPKVPFTWTEAHQEAFGRIKEALLSAPALALPDLTKPFALYVDEKEGVARGVLTQTLGPWRRPVAYLSKKLDPVASGWPTCLKAIAAVALLLKDADKLTLGQNVLVIAPHNLESIVRQPPDRWMTNARMTHYQSLLLNERVSFAPPAILNPATLLPVESDDTPIHICSEILAEETGTRPDLRDQPLPGVPAWYTDGSSFIMDGRRQAGAAIVDNKRTVWASNLPEGTSAQKAELIALTQALRLAEGKSINIYTDSRYAFATAHVHGAIYKQRGWLTSAGKDIKNKEEILALLEAIHLPKRVAIIHCPGHQRGTDPVATGNRKADEAAKQAAQSTRILTETTKNAGKRTADGSEFEKRTADGSEFESPKKKAKVE

SEQ ID NO: 1678 - protein, 2128 aa, synthetic construct
MPAAKRVKLDGGDKKYSIGLDIGTNSVGWAVITDEYKVPSKKFKVLGNTDRHSIKKNLIGALLFDSGETAEATRLKRTARRRYTRRKNRICYLQEIFSNEMAKVDDSFFHRLEESFLVEEDKKHERHPIFGNIVDEVAYHEKYPTIYHLRKKLVDSTDKADLRLIYLALAHMIKFRGHFLIEGDLNPDNSDVDKLFIQLVQTYNQLFEENPINASGVDAKAILSARLSKSRRLENLIAQLPGEKKNGLFGNLIALSLGLTPNFKSNFDLAEDAKLQLSKDTYDDDLDNLLAQIGDQYADLFLAAKNLSDAILLSDILRVNTEITKAPLSASMIKRYDEHHQDLTLLKALVRQQLPEKYKEIFFDQSKNGYAGYIDGGASQEEFYKFIKPILEKMDGTEELLVKLNREDLLRKQRTFDNGSIPHQIHLGELHAILRRQEDFYPFLKDNREKIEKILTFRIPYYVGPLARGNSRFAWMTRKSEETITPWNFEEVVDKGASAQSFIERMTNFDKNLPNEKVLPKHSLLYEYFTVYNELTKVKYVTEGMRKPAFLSGEQKKAIVDLLFKTNRKVTVKQLKEDYFKKIECFDSVEISGVEDRFNASLGTYHDLLKIIKDKDFLDNEENEDILEDIVLTLTLFEDREMIEERLKTYAHLFDDKVMKQLKRRRYTGWGRLSRKLINGIRDKQSGKTILDFLKSDGFANRNFMQLIHDDSLTFKEDIQKAQVSGQGDSLHEHIANLAGSPAIKKGILQTVKVVDELVKVMGRHKPENIVIEMARENQTTQKGQKNSRERMKRIEEGIKELGSQILKEHPVENTQLQNEKLYLYYLQNGRDMYVDQELDINRLSDYDVDHIVPQSFLKDDSIDNKVLTRSDKARGKSDNVPSEEVVKKMKNYWRQLLNAKLITQRKFDNLTKAERGGLSELDKAGFIKRQLVETRQITKHVAQILDSRMNTKYDENDKLIREVKVITLKSKLVSDFRKDFQFYKVREINNYHHAHDAYLNAVVGTALIKKYPKLESEFVYGDYKVYDVRKMIAKSEQEIGKATAKYFFYSNIMNFFKTEITLANGEIRKRPLIETNGETGEIVWDKGRDFATVRKVLSMPQVNIVKKTEVQTGGFSKESILPKRNSDKLIARKKDWDPKKYGGFDSPTVAYSVLVVAKVEKGKSKKLKSVKELLGITIMERSSFEKNPIDFLEAKGYKEVKKDLIIKLPKYSLFELENGRKRMLASAGELQKGNELALPSKYVNFLYLASHYEKLKGSPEDNEQKQLFVEQHKHYLDEIIEQISEFSKRVILADANLDKVLSAYNKHRDKPIREQAENIIHLFTLTNLGAPAAFKYFDTTIDRKRYTSTKEVLDATLIHQSITGLYETRIDLSQLGGDGGGGSGGSGGSGGSGGLLGRDLLTKLKAQIQFSTEGPQVTWEDRPAMCLVLNLEEEYRLHEKPVPPSIDPSWLQLFPMVWAEKAGMGLANQVPPVVVELKSDASPVAVRQYPMSKEAREGIRPHIQRFLDLGILVPCQSPWNTPLLPVKKPGTNDYRPVQDLREVNKRVQDIHPTVPNPYNLLSSLPPSHTWYSVLDLKDAFFCLKLHPNSQPLFAFEWRDPEKGNTGQLTWTRLPQGFKNSPTLFNEALHRDLASFRALNPQVVMLQYVDDLLVAAPTYRDCKEGTRRLLQELSKLGYRVSAKKAQLCREEVTYLGYLLKGGKRWLTPARKATVMKIPTPTTPRQVREFLGKAGFCRLFIPGFASLAAPLYPLTRPKVPFTWTEAHQEAFGRIKEALLSAPALALPDLTKPFALYVDEKEGVARGVLTQTLGPWRRPVAYLSKKLDPVASGWPTCLKAIAAVALLLKDADKLTLGQNVLVIAPHNLESIVRQPPDRWMTNARMTHYQSLLLNERVSFAPPAILNPATLLPVESDDTPIHICSEILAEETGTRPDLRDQPLPGVPAWYTDGSSFIMDGRRQAGAAIVDNKRTVWASNLPEGTSAQKAELIALTQALRLAEGKSINIYTDSRYAFATAHVHGAIYKQRGWLTSAGKDIKNKEEILALLEAIHLPKRVAIIHCPGHQRGTDPVATGNRKADEAAKQAAQSTRILTETTKNAGKRTADGSEFEKRTADGSEFESPKKKAKVE

SEQ ID NO: 1679 - protein, 2124 aa, synthetic construct
MPAAKRVKLDGGDKKYSIGLDIGTNSVGWAVITDEYKVPSKKFKVLGNTDRHSIKKNLIGALLFDSGETAEATRLKRTARRRYTRRKNRICYLQEIFSNEMAKVDDSFFHRLEESFLVEEDKKHERHPIFGNIVDEVAYHEKYPTIYHLRKKLVDSTDKADLRLIYLALAHMIKFRGHFLIEGDLNPDNSDVDKLFIQLVQTYNQLFEENPINASGVDAKAILSARLSKSRRLENLIAQLPGEKKNGLFGNLIALSLGLTPNFKSNFDLAEDAKLQLSKDTYDDDLDNLLAQIGDQYADLFLAAKNLSDAILLSDILRVNTEITKAPLSASMIKRYDEHHQDLTLLKALVRQQLPEKYKEIFFDQSKNGYAGYIDGGASQEEFYKFIKPILEKMDGTEELLVKLNREDLLRKQRTFDNGSIPHQIHLGELHAILRRQEDFYPFLKDNREKIEKILTFRIPYYVGPLARGNSRFAWMTRKSEETITPWNFEEVVDKGASAQSFIERMTNFDKNLPNEKVLPKHSLLYEYFTVYNELTKVKYVTEGMRKPAFLSGEQKKAIVDLLFKTNRKVTVKQLKEDYFKKIECFDSVEISGVEDRFNASLGTYHDLLKIIKDKDFLDNEENEDILEDIVLTLTLFEDREMIEERLKTYAHLFDDKVMKQLKRRRYTGWGRLSRKLINGIRDKQSGKTILDFLKSDGFANRNFMQLIHDDSLTFKEDIQKAQVSGQGDSLHEHIANLAGSPAIKKGILQTVKVVDELVKVMGRHKPENIVIEMARENQTTQKGQKNSRERMKRIEEGIKELGSQILKEHPVENTQLQNEKLYLYYLQNGRDMYVDQELDINRLSDYDVDHIVPQSFLKDDSIDNKVLTRSDKARGKSDNVPSEEVVKKMKNYWRQLLNAKLITQRKFDNLTKAERGGLSELDKAGFIKRQLVETRQITKHVAQILDSRMNTKYDENDKLIREVKVITLKSKLVSDFRKDFQFYKVREINNYHHAHDAYLNAVVGTALIKKYPKLESEFVYGDYKVYDVRKMIAKSEQEIGKATAKYFFYSNIMNFFKTEITLANGEIRKRPLIETNGETGEIVWDKGRDFATVRKVLSMPQVNIVKKTEVQTGGFSKESILPKRNSDKLIARKKDWDPKKYGGFDSPTVAYSVLVVAKVEKGKSKKLKSVKELLGITIMERSSFEKNPIDFLEAKGYKEVKKDLIIKLPKYSLFELENGRKRMLASAGELQKGNELALPSKYVNFLYLASHYEKLKGSPEDNEQKQLFVEQHKHYLDEIIEQISEFSKRVILADANLDKVLSAYNKHRDKPIREQAENIIHLFTLTNLGAPAAFKYFDTTIDRKRYTSTKEVLDATLIHQSITGLYETRIDLSQLGGDGGEAAAKGGSGGLLGRDLLTKLKAQIQFSTEGPQVTWEDRPAMCLVLNLEEEYRLHEKPVPPSIDPSWLQLFPMVWAEKAGMGLANQVPPVVVELKSDASPVAVRQYPMSKEAREGIRPHIQRFLDLGILVPCQSPWNTPLLPVKKPGTNDYRPVQDLREVNKRVQDIHPTVPNPYNLLSSLPPSHTWYSVLDLKDAFFCLKLHPNSQPLFAFEWRDPEKGNTGQLTWTRLPQGFKNSPTLFNEALHRDLASFRALNPQVVMLQYVDDLLVAAPTYRDCKEGTRRLLQELSKLGYRVSAKKAQLCREEVTYLGYLLKGGKRWLTPARKATVMKIPTPTTPRQVREFLGKAGFCRLFIPGFASLAAPLYPLTRPKVPFTWTEAHQEAFGRIKEALLSAPALALPDLTKPFALYVDEKEGVARGVLTQTLGPWRRPVAYLSKKLDPVASGWPTCLKAIAAVALLLKDADKLTLGQNVLVIAPHNLESIVRQPPDRWMTNARMTHYQSLLLNERVSFAPPAILNPATLLPVESDDTPIHICSEILAEETGTRPDLRDQPLPGVPAWYTDGSSFIMDGRRQAGAAIVDNKRTVWASNLPEGTSAQKAELIALTQALRLAEGKSINIYTDSRYAFATAHVHGAIYKQRGWLTSAGKDIKNKEEILALLEAIHLPKRVAIIHCPGHQRGTDPVATGNRKADEAAKQAAQSTRILTETTKNAGKRTADGSEFEKRTADGSEFESPKKKAKVE

SEQ ID NO: 1680 - protein, 2123 aa, synthetic construct
MPAAKRVKLDGGDKKYSIGLDIGTNSVGWAVITDEYKVPSKKFKVLGNTDRHSIKKNLIGALLFDSGETAEATRLKRTARRRYTRRKNRICYLQEIFSNEMAKVDDSFFHRLEESFLVEEDKKHERHPIFGNIVDEVAYHEKYPTIYHLRKKLVDSTDKADLRLIYLALAHMIKFRGHFLIEGDLNPDNSDVDKLFIQLVQTYNQLFEENPINASGVDAKAILSARLSKSRRLENLIAQLPGEKKNGLFGNLIALSLGLTPNFKSNFDLAEDAKLQLSKDTYDDDLDNLLAQIGDQYADLFLAAKNLSDAILLSDILRVNTEITKAPLSASMIKRYDEHHQDLTLLKALVRQQLPEKYKEIFFDQSKNGYAGYIDGGASQEEFYKFIKPILEKMDGTEELLVKLNREDLLRKQRTFDNGSIPHQIHLGELHAILRRQEDFYPFLKDNREKIEKILTFRIPYYVGPLARGNSRFAWMTRKSEETITPWNFEEVVDKGASAQSFIERMTNFDKNLPNEKVLPKHSLLYEYFTVYNELTKVKYVTEGMRKPAFLSGEQKKAIVDLLFKTNRKVTVKQLKEDYFKKIECFDSVEISGVEDRFNASLGTYHDLLKIIKDKDFLDNEENEDILEDIVLTLTLFEDREMIEERLKTYAHLFDDKVMKQLKRRRYTGWGRLSRKLINGIRDKQSGKTILDFLKSDGFANRNFMQLIHDDSLTFKEDIQKAQVSGQGDSLHEHIANLAGSPAIKKGILQTVKVVDELVKVMGRHKPENIVIEMARENQTTQKGQKNSRERMKRIEEGIKELGSQILKEHPVENTQLQNEKLYLYYLQNGRDMYVDQELDINRLSDYDVDHIVPQSFLKDDSIDNKVLTRSDKARGKSDNVPSEEVVKKMKNYWRQLLNAKLITQRKFDNLTKAERGGLSELDKAGFIKRQLVETRQITKHVAQILDSRMNTKYDENDKLIREVKVITLKSKLVSDFRKDFQFYKVREINNYHHAHDAYLNAVVGTALIKKYPKLESEFVYGDYKVYDVRKMIAKSEQEIGKATAKYFFYSNIMNFFKTEITLANGEIRKRPLIETNGETGEIVWDKGRDFATVRKVLSMPQVNIVKKTEVQTGGFSKESILPKRNSDKLIARKKDWDPKKYGGFDSPTVAYSVLVVAKVEKGKSKKLKSVKELLGITIMERSSFEKNPIDFLEAKGYKEVKKDLIIKLPKYSLFELENGRKRMLASAGELQKGNELALPSKYVNFLYLASHYEKLKGSPEDNEQKQLFVEQHKHYLDEIIEQISEFSKRVILADANLDKVLSAYNKHRDKPIREQAENIIHLFTLTNLGAPAAFKYFDTTIDRKRYTSTKEVLDATLIHQSITGLYETRIDLSQLGGDGGPAPAPAPGGLLGRDLLTKLKAQIQFSTEGPQVTWEDRPAMCLVLNLEEEYRLHEKPVPPSIDPSWLQLFPMVWAEKAGMGLANQVPPVVVELKSDASPVAVRQYPMSKEAREGIRPHIQRFLDLGILVPCQSPWNTPLLPVKKPGTNDYRPVQDLREVNKRVQDIHPTVPNPYNLLSSLPPSHTWYSVLDLKDAFFCLKLHPNSQPLFAFEWRDPEKGNTGQLTWTRLPQGFKNSPTLFNEALHRDLASFRALNPQVVMLQYVDDLLVAAPTYRDCKEGTRRLLQELSKLGYRVSAKKAQLCREEVTYLGYLLKGGKRWLTPARKATVMKIPTPTTPRQVREFLGKAGFCRLFIPGFASLAAPLYPLTRPKVPFTWTEAHQEAFGRIKEALLSAPALALPDLTKPFALYVDEKEGVARGVLTQTLGPWRRPVAYLSKKLDPVASGWPTCLKAIAAVALLLKDADKLTLGQNVLVIAPHNLESIVRQPPDRWMTNARMTHYQSLLLNERVSFAPPAILNPATLLPVESDDTPIHICSEILAEETGTRPDLRDQPLPGVPAWYTDGSSFIMDGRRQAGAAIVDNKRTVWASNLPEGTSAQKAELIALTQALRLAEGKSINIYTDSRYAFATAHVHGAIYKQRGWLTSAGKDIKNKEEILALLEAIHLPKRVAIIHCPGHQRGTDPVATGNRKADEAAKQAAQSTRILTETTKNAGKRTADGSEFEKRTADGSEFESPKKKAKVE

SEQ ID NO: 1681 - protein, 2131 aa, synthetic construct
MPAAKRVKLDGGDKKYSIGLDIGTNSVGWAVITDEYKVPSKKFKVLGNTDRHSIKKNLIGALLFDSGETAEATRLKRTARRRYTRRKNRICYLQEIFSNEMAKVDDSFFHRLEESFLVEEDKKHERHPIFGNIVDEVAYHEKYPTIYHLRKKLVDSTDKADLRLIYLALAHMIKFRGHFLIEGDLNPDNSDVDKLFIQLVQTYNQLFEENPINASGVDAKAILSARLSKSRRLENLIAQLPGEKKNGLFGNLIALSLGLTPNFKSNFDLAEDAKLQLSKDTYDDDLDNLLAQIGDQYADLFLAAKNLSDAILLSDILRVNTEITKAPLSASMIKRYDEHHQDLTLLKALVRQQLPEKYKEIFFDQSKNGYAGYIDGGASQEEFYKFIKPILEKMDGTEELLVKLNREDLLRKQRTFDNGSIPHQIHLGELHAILRRQEDFYPFLKDNREKIEKILTFRIPYYVGPLARGNSRFAWMTRKSEETITPWNFEEVVDKGASAQSFIERMTNFDKNLPNEKVLPKHSLLYEYFTVYNELTKVKYVTEGMRKPAFLSGEQKKAIVDLLFKTNRKVTVKQLKEDYFKKIECFDSVEISGVEDRFNASLGTYHDLLKIIKDKDFLDNEENEDILEDIVLTLTLFEDREMIEERLKTYAHLFDDKVMKQLKRRRYTGWGRLSRKLINGIRDKQSGKTILDFLKSDGFANRNFMQLIHDDSLTFKEDIQKAQVSGQGDSLHEHIANLAGSPAIKKGILQTVKVVDELVKVMGRHKPENIVIEMARENQTTQKGQKNSRERMKRIEEGIKELGSQILKEHPVENTQLQNEKLYLYYLQNGRDMYVDQELDINRLSDYDVDHIVPQSFLKDDSIDNKVLTRSDKARGKSDNVPSEEVVKKMKNYWRQLLNAKLITQRKFDNLTKAERGGLSELDKAGFIKRQLVETRQITKHVAQILDSRMNTKYDENDKLIREVKVITLKSKLVSDFRKDFQFYKVREINNYHHAHDAYLNAVVGTALIKKYPKLESEFVYGDYKVYDVRKMIAKSEQEIGKATAKYFFYSNIMNFFKTEITLANGEIRKRPLIETNGETGEIVWDKGRDFATVRKVLSMPQVNIVKKTEVQTGGFSKESILPKRNSDKLIARKKDWDPKKYGGFDSPTVAYSVLVVAKVEKGKSKKLKSVKELLGITIMERSSFEKNPIDFLEAKGYKEVKKDLIIKLPKYSLFELENGRKRMLASAGELQKGNELALPSKYVNFLYLASHYEKLKGSPEDNEQKQLFVEQHKHYLDEIIEQISEFSKRVILADANLDKVLSAYNKHRDKPIREQAENIIHLFTLTNLGAPAAFKYFDTTIDRKRYTSTKEVLDATLIHQSITGLYETRIDLSQLGGDGGGSSGSSGSSGSSGSSGGLLGRDLLTKLKAQIQFSTEGPQVTWEDRPAMCLVLNLEEEYRLHEKPVPPSIDPSWLQLFPMVWAEKAGMGLANQVPPVVVELKSDASPVAVRQYPMSKEAREGIRPHIQRFLDLGILVPCQSPWNTPLLPVKKPGTNDYRPVQDLREVNKRVQDIHPTVPNPYNLLSSLPPSHTWYSVLDLKDAFFCLKLHPNSQPLFAFEWRDPEKGNTGQLTWTRLPQGFKNSPTLFNEALHRDLASFRALNPQVVMLQYVDDLLVAAPTYRDCKEGTRRLLQELSKLGYRVSAKKAQLCREEVTYLGYLLKGGKRWLTPARKATVMKIPTPTTPRQVREFLGKAGFCRLFIPGFASLAAPLYPLTRPKVPFTWTEAHQEAFGRIKEALLSAPALALPDLTKPFALYVDEKEGVARGVLTQTLGPWRRPVAYLSKKLDPVASGWPTCLKAIAAVALLLKDADKLTLGQNVLVIAPHNLESIVRQPPDRWMTNARMTHYQSLLLNERVSFAPPAILNPATLLPVESDDTPIHICSEILAEETGTRPDLRDQPLPGVPAWYTDGSSFIMDGRRQAGAAIVDNKRTVWASNLPEGTSAQKAELIALTQALRLAEGKSINIYTDSRYAFATAHVHGAIYKQRGWLTSAGKDIKNKEEILALLEAIHLPKRVAIIHCPGHQRGTDPVATGNRKADEAAKQAAQSTRILTETTKNAGKRTADGSEFEKRTADGSEFESPKKKAKVE

SEQ ID NO: 1682 - protein, 2127 aa, synthetic construct
MPAAKRVKLDGGDKKYSIGLDIGTNSVGWAVITDEYKVPSKKFKVLGNTDRHSIKKNLIGALLFDSGETAEATRLKRTARRRYTRRKNRICYLQEIFSNEMAKVDDSFFHRLEESFLVEEDKKHERHPIFGNIVDEVAYHEKYPTIYHLRKKLVDSTDKADLRLIYLALAHMIKFRGHFLIEGDLNPDNSDVDKLFIQLVQTYNQLFEENPINASGVDAKAILSARLSKSRRLENLIAQLPGEKKNGLFGNLIALSLGLTPNFKSNFDLAEDAKLQLSKDTYDDDLDNLLAQIGDQYADLFLAAKNLSDAILLSDILRVNTEITKAPLSASMIKRYDEHHQDLTLLKALVRQQLPEKYKEIFFDQSKNGYAGYIDGGASQEEFYKFIKPILEKMDGTEELLVKLNREDLLRKQRTFDNGSIPHQIHLGELHAILRRQEDFYPFLKDNREKIEKILTFRIPYYVGPLARGNSRFAWMTRKSEETITPWNFEEVVDKGASAQSFIERMTNFDKNLPNEKVLPKHSLLYEYFTVYNELTKVKYVTEGMRKPAFLSGEQKKAIVDLLFKTNRKVTVKQLKEDYFKKIECFDSVEISGVEDRFNASLGTYHDLLKIIKDKDFLDNEENEDILEDIVLTLTLFEDREMIEERLKTYAHLFDDKVMKQLKRRRYTGWGRLSRKLINGIRDKQSGKTILDFLKSDGFANRNFMQLIHDDSLTFKEDIQKAQVSGQGDSLHEHIANLAGSPAIKKGILQTVKVVDELVKVMGRHKPENIVIEMARENQTTQKGQKNSRERMKRIEEGIKELGSQILKEHPVENTQLQNEKLYLYYLQNGRDMYVDQELDINRLSDYDVDHIVPQSFLKDDSIDNKVLTRSDKARGKSDNVPSEEVVKKMKNYWRQLLNAKLITQRKFDNLTKAERGGLSELDKAGFIKRQLVETRQITKHVAQILDSRMNTKYDENDKLIREVKVITLKSKLVSDFRKDFQFYKVREINNYHHAHDAYLNAVVGTALIKKYPKLESEFVYGDYKVYDVRKMIAKSEQEIGKATAKYFFYSNIMNFFKTEITLANGEIRKRPLIETNGETGEIVWDKGRDFATVRKVLSMPQVNIVKKTEVQTGGFSKESILPKRNSDKLIARKKDWDPKKYGGFDSPTVAYSVLVVAKVEKGKSKKLKSVKELLGITIMERSSFEKNPIDFLEAKGYKEVKKDLIIKLPKYSLFELENGRKRMLASAGELQKGNELALPSKYVNFLYLASHYEKLKGSPEDNEQKQLFVEQHKHYLDEIIEQISEFSKRVILADANLDKVLSAYNKHRDKPIREQAENIIHLFTLTNLGAPAAFKYFDTTIDRKRYTSTKEVLDATLIHQSITGLYETRIDLSQLGGDGGGGGGGSEAAAKGGLLGRDLLTKLKAQIQFSTEGPQVTWEDRPAMCLVLNLEEEYRLHEKPVPPSIDPSWLQLFPMVWAEKAGMGLANQVPPVVVELKSDASPVAVRQYPMSKEAREGIRPHIQRFLDLGILVPCQSPWNTPLLPVKKPGTNDYRPVQDLREVNKRVQDIHPTVPNPYNLLSSLPPSHTWYSVLDLKDAFFCLKLHPNSQPLFAFEWRDPEKGNTGQLTWTRLPQGFKNSPTLFNEALHRDLASFRALNPQVVMLQYVDDLLVAAPTYRDCKEGTRRLLQELSKLGYRVSAKKAQLCREEVTYLGYLLKGGKRWLTPARKATVMKIPTPTTPRQVREFLGKAGFCRLFIPGFASLAAPLYPLTRPKVPFTWTEAHQEAFGRIKEALLSAPALALPDLTKPFALYVDEKEGVARGVLTQTLGPWRRPVAYLSKKLDPVASGWPTCLKAIAAVALLLKDADKLTLGQNVLVIAPHNLESIVRQPPDRWMTNARMTHYQSLLLNERVSFAPPAILNPATLLPVESDDTPIHICSEILAEETGTRPDLRDQPLPGVPAWYTDGSSFIMDGRRQAGAAIVDNKRTVWASNLPEGTSAQKAELIALTQALRLAEGKSINIYTDSRYAFATAHVHGAIYKQRGWLTSAGKDIKNKEEILALLEAIHLPKRVAIIHCPGHQRGTDPVATGNRKADEAAKQAAQSTRILTETTKNAGKRTADGSEFEKRTADGSEFESPKKKAKVE

SEQ ID NO: 1683 - protein, 2125 aa, synthetic construct
MPAAKRVKLDGGDKKYSIGLDIGTNSVGWAVITDEYKVPSKKFKVLGNTDRHSIKKNLIGALLFDSGETAEATRLKRTARRRYTRRKNRICYLQEIFSNEMAKVDDSFFHRLEESFLVEEDKKHERHPIFGNIVDEVAYHEKYPTIYHLRKKLVDSTDKADLRLIYLALAHMIKFRGHFLIEGDLNPDNSDVDKLFIQLVQTYNQLFEENPINASGVDAKAILSARLSKSRRLENLIAQLPGEKKNGLFGNLIALSLGLTPNFKSNFDLAEDAKLQLSKDTYDDDLDNLLAQIGDQYADLFLAAKNLSDAILLSDILRVNTEITKAPLSASMIKRYDEHHQDLTLLKALVRQQLPEKYKEIFFDQSKNGYAGYIDGGASQEEFYKFIKPILEKMDGTEELLVKLNREDLLRKQRTFDNGSIPHQIHLGELHAILRRQEDFYPFLKDNREKIEKILTFRIPYYVGPLARGNSRFAWMTRKSEETITPWNFEEVVDKGASAQSFIERMTNFDKNLPNEKVLPKHSLLYEYFTVYNELTKVKYVTEGMRKPAFLSGEQKKAIVDLLFKTNRKVTVKQLKEDYFKKIECFDSVEISGVEDRFNASLGTYHDLLKIIKDKDFLDNEENEDILEDIVLTLTLFEDREMIEERLKTYAHLFDDKVMKQLKRRRYTGWGRLSRKLINGIRDKQSGKTILDFLKSDGFANRNFMQLIHDDSLTFKEDIQKAQVSGQGDSLHEHIANLAGSPAIKKGILQTVKVVDELVKVMGRHKPENIVIEMARENQTTQKGQKNSRERMKRIEEGIKELGSQILKEHPVENTQLQNEKLYLYYLQNGRDMYVDQELDINRLSDYDVDHIVPQSFLKDDSIDNKVLTRSDKARGKSDNVPSEEVVKKMKNYWRQLLNAKLITQRKFDNLTKAERGGLSELDKAGFIKRQLVETRQITKHVAQILDSRMNTKYDENDKLIREVKVITLKSKLVSDFRKDFQFYKVREINNYHHAHDAYLNAVVGTALIKKYPKLESEFVYGDYKVYDVRKMIAKSEQEIGKATAKYFFYSNIMNFFKTEITLANGEIRKRPLIETNGETGEIVWDKGRDFATVRKVLSMPQVNIVKKTEVQTGGFSKESILPKRNSDKLIARKKDWDPKKYGGFDSPTVAYSVLVVAKVEKGKSKKLKSVKELLGITIMERSSFEKNPIDFLEAKGYKEVKKDLIIKLPKYSLFELENGRKRMLASAGELQKGNELALPSKYVNFLYLASHYEKLKGSPEDNEQKQLFVEQHKHYLDEIIEQISEFSKRVILADANLDKVLSAYNKHRDKPIREQAENIIHLFTLTNLGAPAAFKYFDTTIDRKRYTSTKEVLDATLIHQSITGLYETRIDLSQLGGDGGPAPGGSGSSGGLLGRDLLTKLKAQIQFSTEGPQVTWEDRPAMCLVLNLEEEYRLHEKPVPPSIDPSWLQLFPMVWAEKAGMGLANQVPPVVVELKSDASPVAVRQYPMSKEAREGIRPHIQRFLDLGILVPCQSPWNTPLLPVKKPGTNDYRPVQDLREVNKRVQDIHPTVPNPYNLLSSLPPSHTWYSVLDLKDAFFCLKLHPNSQPLFAFEWRDPEKGNTGQLTWTRLPQGFKNSPTLFNEALHRDLASFRALNPQVVMLQYVDDLLVAAPTYRDCKEGTRRLLQELSKLGYRVSAKKAQLCREEVTYLGYLLKGGKRWLTPARKATVMKIPTPTTPRQVREFLGKAGFCRLFIPGFASLAAPLYPLTRPKVPFTWTEAHQEAFGRIKEALLSAPALALPDLTKPFALYVDEKEGVARGVLTQTLGPWRRPVAYLSKKLDPVASGWPTCLKAIAAVALLLKDADKLTLGQNVLVIAPHNLESIVRQPPDRWMTNARMTHYQSLLLNERVSFAPPAILNPATLLPVESDDTPIHICSEILAEETGTRPDLRDQPLPGVPAWYTDGSSFIMDGRRQAGAAIVDNKRTVWASNLPEGTSAQKAELIALTQALRLAEGKSINIYTDSRYAFATAHVHGAIYKQRGWLTSAGKDIKNKEEILALLEAIHLPKRVAIIHCPGHQRGTDPVATGNRKADEAAKQAAQSTRILTETTKNAGKRTADGSEFEKRTADGSEFESPKKKAKVE

SEQ ID NO: 1684 - protein, 2127 aa, synthetic construct
MPAAKRVKLDGGDKKYSIGLDIGTNSVGWAVITDEYKVPSKKFKVLGNTDRHSIKKNLIGALLFDSGETAEATRLKRTARRRYTRRKNRICYLQEIFSNEMAKVDDSFFHRLEESFLVEEDKKHERHPIFGNIVDEVAYHEKYPTIYHLRKKLVDSTDKADLRLIYLALAHMIKFRGHFLIEGDLNPDNSDVDKLFIQLVQTYNQLFEENPINASGVDAKAILSARLSKSRRLENLIAQLPGEKKNGLFGNLIALSLGLTPNFKSNFDLAEDAKLQLSKDTYDDDLDNLLAQIGDQYADLFLAAKNLSDAILLSDILRVNTEITKAPLSASMIKRYDEHHQDLTLLKALVRQQLPEKYKEIFFDQSKNGYAGYIDGGASQEEFYKFIKPILEKMDGTEELLVKLNREDLLRKQRTFDNGSIPHQIHLGELHAILRRQEDFYPFLKDNREKIEKILTFRIPYYVGPLARGNSRFAWMTRKSEETITPWNFEEVVDKGASAQSFIERMTNFDKNLPNEKVLPKHSLLYEYFTVYNELTKVKYVTEGMRKPAFLSGEQKKAIVDLLFKTNRKVTVKQLKEDYFKKIECFDSVEISGVEDRFNASLGTYHDLLKIIKDKDFLDNEENEDILEDIVLTLTLFEDREMIEERLKTYAHLFDDKVMKQLKRRRYTGWGRLSRKLINGIRDKQSGKTILDFLKSDGFANRNFMQLIHDDSLTFKEDIQKAQVSGQGDSLHEHIANLAGSPAIKKGILQTVKVVDELVKVMGRHKPENIVIEMARENQTTQKGQKNSRERMKRIEEGIKELGSQILKEHPVENTQLQNEKLYLYYLQNGRDMYVDQELDINRLSDYDVDHIVPQSFLKDDSIDNKVLTRSDKARGKSDNVPSEEVVKKMKNYWRQLLNAKLITQRKFDNLTKAERGGLSELDKAGFIKRQLVETRQITKHVAQILDSRMNTKYDENDKLIREVKVITLKSKLVSDFRKDFQFYKVREINNYHHAHDAYLNAVVGTALIKKYPKLESEFVYGDYKVYDVRKMIAKSEQEIGKATAKYFFYSNIMNFFKTEITLANGEIRKRPLIETNGETGEIVWDKGRDFATVRKVLSMPQVNIVKKTEVQTGGFSKESILPKRNSDKLIARKKDWDPKKYGGFDSPTVAYSVLVVAKVEKGKSKKLKSVKELLGITIMERSSFEKNPIDFLEAKGYKEVKKDLIIKLPKYSLFELENGRKRMLASAGELQKGNELALPSKYVNFLYLASHYEKLKGSPEDNEQKQLFVEQHKHYLDEIIEQISEFSKRVILADANLDKVLSAYNKHRDKPIREQAENIIHLFTLTNLGAPAAFKYFDTTIDRKRYTSTKEVLDATLIHQSITGLYETRIDLSQLGGDGGPAPAPAPAPAPGGLLGRDLLTKLKAQIQFSTEGPQVTWEDRPAMCLVLNLEEEYRLHEKPVPPSIDPSWLQLFPMVWAEKAGMGLANQVPPVVVELKSDASPVAVRQYPMSKEAREGIRPHIQRFLDLGILVPCQSPWNTPLLPVKKPGTNDYRPVQDLREVNKRVQDIHPTVPNPYNLLSSLPPSHTWYSVLDLKDAFFCLKLHPNSQPLFAFEWRDPEKGNTGQLTWTRLPQGFKNSPTLFNEALHRDLASFRALNPQVVMLQYVDDLLVAAPTYRDCKEGTRRLLQELSKLGYRVSAKKAQLCREEVTYLGYLLKGGKRWLTPARKATVMKIPTPTTPRQVREFLGKAGFCRLFIPGFASLAAPLYPLTRPKVPFTWTEAHQEAFGRIKEALLSAPALALPDLTKPFALYVDEKEGVARGVLTQTLGPWRRPVAYLSKKLDPVASGWPTCLKAIAAVALLLKDADKLTLGQNVLVIAPHNLESIVRQPPDRWMTNARMTHYQSLLLNERVSFAPPAILNPATLLPVESDDTPIHICSEILAEETGTRPDLRDQPLPGVPAWYTDGSSFIMDGRRQAGAAIVDNKRTVWASNLPEGTSAQKAELIALTQALRLAEGKSINIYTDSRYAFATAHVHGAIYKQRGWLTSAGKDIKNKEEILALLEAIHLPKRVAIIHCPGHQRGTDPVATGNRKADEAAKQAAQSTRILTETTKNAGKRTADGSEFEKRTADGSEFESPKKKAKVE

SEQ ID NO: 1685 - protein, 2127 aa, synthetic construct
MPAAKRVKLDGGDKKYSIGLDIGTNSVGWAVITDEYKVPSKKFKVLGNTDRHSIKKNLIGALLFDSGETAEATRLKRTARRRYTRRKNRICYLQEIFSNEMAKVDDSFFHRLEESFLVEEDKKHERHPIFGNIVDEVAYHEKYPTIYHLRKKLVDSTDKADLRLIYLALAHMIKFRGHFLIEGDLNPDNSDVDKLFIQLVQTYNQLFEENPINASGVDAKAILSARLSKSRRLENLIAQLPGEKKNGLFGNLIALSLGLTPNFKSNFDLAEDAKLQLSKDTYDDDLDNLLAQIGDQYADLFLAAKNLSDAILLSDILRVNTEITKAPLSASMIKRYDEHHQDLTLLKALVRQQLPEKYKEIFFDQSKNGYAGYIDGGASQEEFYKFIKPILEKMDGTEELLVKLNREDLLRKQRTFDNGSIPHQIHLGELHAILRRQEDFYPFLKDNREKIEKILTFRIPYYVGPLARGNSRFAWMTRKSEETITPWNFEEVVDKGASAQSFIERMTNFDKNLPNEKVLPKHSLLYEYFTVYNELTKVKYVTEGMRKPAFLSGEQKKAIVDLLFKTNRKVTVKQLKEDYFKKIECFDSVEISGVEDRFNASLGTYHDLLKIIKDKDFLDNEENEDILEDIVLTLTLFEDREMIEERLKTYAHLFDDKVMKQLKRRRYTGWGRLSRKLINGIRDKQSGKTILDFLKSDGFANRNFMQLIHDDSLTFKEDIQKAQVSGQGDSLHEHIANLAGSPAIKKGILQTVKVVDELVKVMGRHKPENIVIEMARENQTTQKGQKNSRERMKRIEEGIKELGSQILKEHPVENTQLQNEKLYLYYLQNGRDMYVDQELDINRLSDYDVDHIVPQSFLKDDSIDNKVLTRSDKARGKSDNVPSEEVVKKMKNYWRQLLNAKLITQRKFDNLTKAERGGLSELDKAGFIKRQLVETRQITKHVAQILDSRMNTKYDENDKLIREVKVITLKSKLVSDFRKDFQFYKVREINNYHHAHDAYLNAVVGTALIKKYPKLESEFVYGDYKVYDVRKMIAKSEQEIGKATAKYFFYSNIMNFFKTEITLANGEIRKRPLIETNGETGEIVWDKGRDFATVRKVLSMPQVNIVKKTEVQTGGFSKESILPKRNSDKLIARKKDWDPKKYGGFDSPTVAYSVLVVAKVEKGKSKKLKSVKELLGITIMERSSFEKNPIDFLEAKGYKEVKKDLIIKLPKYSLFELENGRKRMLASAGELQKGNELALPSKYVNFLYLASHYEKLKGSPEDNEQKQLFVEQHKHYLDEIIEQISEFSKRVILADANLDKVLSAYNKHRDKPIREQAENIIHLFTLTNLGAPAAFKYFDTTIDRKRYTSTKEVLDATLIHQSITGLYETRIDLSQLGGDGGEAAAKPAPGGGGGLLGRDLLTKLKAQIQFSTEGPQVTWEDRPAMCLVLNLEEEYRLHEKPVPPSIDPSWLQLFPMVWAEKAGMGLANQVPPVVVELKSDASPVAVRQYPMSKEAREGIRPHIQRFLDLGILVPCQSPWNTPLLPVKKPGTNDYRPVQDLREVNKRVQDIHPTVPNPYNLLSSLPPSHTWYSVLDLKDAFFCLKLHPNSQPLFAFEWRDPEKGNTGQLTWTRLPQGFKNSPTLFNEALHRDLASFRALNPQVVMLQYVDDLLVAAPTYRDCKEGTRRLLQELSKLGYRVSAKKAQLCREEVTYLGYLLKGGKRWLTPARKATVMKIPTPTTPRQVREFLGKAGFCRLFIPGFASLAAPLYPLTRPKVPFTWTEAHQEAFGRIKEALLSAPALALPDLTKPFALYVDEKEGVARGVLTQTLGPWRRPVAYLSKKLDPVASGWPTCLKAIAAVALLLKDADKLTLGQNVLVIAPHNLESIVRQPPDRWMTNARMTHYQSLLLNERVSFAPPAILNPATLLPVESDDTPIHICSEILAEETGTRPDLRDQPLPGVPAWYTDGSSFIMDGRRQAGAAIVDNKRTVWASNLPEGTSAQKAELIALTQALRLAEGKSINIYTDSRYAFATAHVHGAIYKQRGWLTSAGKDIKNKEEILALLEAIHLPKRVAIIHCPGHQRGTDPVATGNRKADEAAKQAAQSTRILTETTKNAGKRTADGSEFEKRTADGSEFESPKKKAKVE

SEQ ID NO: 1686 - protein, 2125 aa, synthetic construct
MPAAKRVKLDGGDKKYSIGLDIGTNSVGWAVITDEYKVPSKKFKVLGNTDRHSIKKNLIGALLFDSGETAEATRLKRTARRRYTRRKNRICYLQEIFSNEMAKVDDSFFHRLEESFLVEEDKKHERHPIFGNIVDEVAYHEKYPTIYHLRKKLVDSTDKADLRLIYLALAHMIKFRGHFLIEGDLNPDNSDVDKLFIQLVQTYNQLFEENPINASGVDAKAILSARLSKSRRLENLIAQLPGEKKNGLFGNLIALSLGLTPNFKSNFDLAEDAKLQLSKDTYDDDLDNLLAQIGDQYADLFLAAKNLSDAILLSDILRVNTEITKAPLSASMIKRYDEHHQDLTLLKALVRQQLPEKYKEIFFDQSKNGYAGYIDGGASQEEFYKFIKPILEKMDGTEELLVKLNREDLLRKQRTFDNGSIPHQIHLGELHAILRRQEDFYPFLKDNREKIEKILTFRIPYYVGPLARGNSRFAWMTRKSEETITPWNFEEVVDKGASAQSFIERMTNFDKNLPNEKVLPKHSLLYEYFTVYNELTKVKYVTEGMRKPAFLSGEQKKAIVDLLFKTNRKVTVKQLKEDYFKKIECFDSVEISGVEDRFNASLGTYHDLLKIIKDKDFLDNEENEDILEDIVLTLTLFEDREMIEERLKTYAHLFDDKVMKQLKRRRYTGWGRLSRKLINGIRDKQSGKTILDFLKSDGFANRNFMQLIHDDSLTFKEDIQKAQVSGQGDSLHEHIANLAGSPAIKKGILQTVKVVDELVKVMGRHKPENIVIEMARENQTTQKGQKNSRERMKRIEEGIKELGSQILKEHPVENTQLQNEKLYLYYLQNGRDMYVDQELDINRLSDYDVDHIVPQSFLKDDSIDNKVLTRSDKARGKSDNVPSEEVVKKMKNYWRQLLNAKLITQRKFDNLTKAERGGLSELDKAGFIKRQLVETRQITKHVAQILDSRMNTKYDENDKLIREVKVITLKSKLVSDFRKDFQFYKVREINNYHHAHDAYLNAVVGTALIKKYPKLESEFVYGDYKVYDVRKMIAKSEQEIGKATAKYFFYSNIMNFFKTEITLANGEIRKRPLIETNGETGEIVWDKGRDFATVRKVLSMPQVNIVKKTEVQTGGFSKESILPKRNSDKLIARKKDWDPKKYGGFDSPTVAYSVLVVAKVEKGKSKKLKSVKELLGITIMERSSFEKNPIDFLEAKGYKEVKKDLIIKLPKYSLFELENGRKRMLASAGELQKGNELALPSKYVNFLYLASHYEKLKGSPEDNEQKQLFVEQHKHYLDEIIEQISEFSKRVILADANLDKVLSAYNKHRDKPIREQAENIIHLFTLTNLGAPAAFKYFDTTIDRKRYTSTKEVLDATLIHQSITGLYETRIDLSQLGGDGGGGSGGSGGSGGLLGRDLLTKLKAQIQFSTEGPQVTWEDRPAMCLVLNLEEEYRLHEKPVPPSIDPSWLQLFPMVWAEKAGMGLANQVPPVVVELKSDASPVAVRQYPMSKEAREGIRPHIQRFLDLGILVPCQSPWNTPLLPVKKPGTNDYRPVQDLREVNKRVQDIHPTVPNPYNLLSSLPPSHTWYSVLDLKDAFFCLKLHPNSQPLFAFEWRDPEKGNTGQLTWTRLPQGFKNSPTLFNEALHRDLASFRALNPQVVMLQYVDDLLVAAPTYRDCKEGTRRLLQELSKLGYRVSAKKAQLCREEVTYLGYLLKGGKRWLTPARKATVMKIPTPTTPRQVREFLGKAGFCRLFIPGFASLAAPLYPLTRPKVPFTWTEAHQEAFGRIKEALLSAPALALPDLTKPFALYVDEKEGVARGVLTQTLGPWRRPVAYLSKKLDPVASGWPTCLKAIAAVALLLKDADKLTLGQNVLVIAPHNLESIVRQPPDRWMTNARMTHYQSLLLNERVSFAPPAILNPATLLPVESDDTPIHICSEILAEETGTRPDLRDQPLPGVPAWYTDGSSFIMDGRRQAGAAIVDNKRTVWASNLPEGTSAQKAELIALTQALRLAEGKSINIYTDSRYAFATAHVHGAIYKQRGWLTSAGKDIKNKEEILALLEAIHLPKRVAIIHCPGHQRGTDPVATGNRKADEAAKQAAQSTRILTETTKNAGKRTADGSEFEKRTADGSEFESPKKKAKVE

SEQ ID NO: 1687 - protein, 2127 aa, synthetic construct
MPAAKRVKLDGGDKKYSIGLDIGTNSVGWAVITDEYKVPSKKFKVLGNTDRHSIKKNLIGALLFDSGETAEATRLKRTARRRYTRRKNRICYLQEIFSNEMAKVDDSFFHRLEESFLVEEDKKHERHPIFGNIVDEVAYHEKYPTIYHLRKKLVDSTDKADLRLIYLALAHMIKFRGHFLIEGDLNPDNSDVDKLFIQLVQTYNQLFEENPINASGVDAKAILSARLSKSRRLENLIAQLPGEKKNGLFGNLIALSLGLTPNFKSNFDLAEDAKLQLSKDTYDDDLDNLLAQIGDQYADLFLAAKNLSDAILLSDILRVNTEITKAPLSASMIKRYDEHHQDLTLLKALVRQQLPEKYKEIFFDQSKNGYAGYIDGGASQEEFYKFIKPILEKMDGTEELLVKLNREDLLRKQRTFDNGSIPHQIHLGELHAILRRQEDFYPFLKDNREKIEKILTFRIPYYVGPLARGNSRFAWMTRKSEETITPWNFEEVVDKGASAQSFIERMTNFDKNLPNEKVLPKHSLLYEYFTVYNELTKVKYVTEGMRKPAFLSGEQKKAIVDLLFKTNRKVTVKQLKEDYFKKIECFDSVEISGVEDRFNASLGTYHDLLKIIKDKDFLDNEENEDILEDIVLTLTLFEDREMIEERLKTYAHLFDDKVMKQLKRRRYTGWGRLSRKLINGIRDKQSGKTILDFLKSDGFANRNFMQLIHDDSLTFKEDIQKAQVSGQGDSLHEHIANLAGSPAIKKGILQTVKVVDELVKVMGRHKPENIVIEMARENQTTQKGQKNSRERMKRIEEGIKELGSQILKEHPVENTQLQNEKLYLYYLQNGRDMYVDQELDINRLSDYDVDHIVPQSFLKDDSIDNKVLTRSDKARGKSDNVPSEEVVKKMKNYWRQLLNAKLITQRKFDNLTKAERGGLSELDKAGFIKRQLVETRQITKHVAQILDSRMNTKYDENDKLIREVKVITLKSKLVSDFRKDFQFYKVREINNYHHAHDAYLNAVVGTALIKKYPKLESEFVYGDYKVYDVRKMIAKSEQEIGKATAKYFFYSNIMNFFKTEITLANGEIRKRPLIETNGETGEIVWDKGRDFATVRKVLSMPQVNIVKKTEVQTGGFSKESILPKRNSDKLIARKKDWDPKKYGGFDSPTVAYSVLVVAKVEKGKSKKLKSVKELLGITIMERSSFEKNPIDFLEAKGYKEVKKDLIIKLPKYSLFELENGRKRMLASAGELQKGNELALPSKYVNFLYLASHYEKLKGSPEDNEQKQLFVEQHKHYLDEIIEQISEFSKRVILADANLDKVLSAYNKHRDKPIREQAENIIHLFTLTNLGAPAAFKYFDTTIDRKRYTSTKEVLDATLIHQSITGLYETRIDLSQLGGDGGEAAAKPAPGSSGGLLGRDLLTKLKAQIQFSTEGPQVTWEDRPAMCLVLNLEEEYRLHEKPVPPSIDPSWLQLFPMVWAEKAGMGLANQVPPVVVELKSDASPVAVRQYPMSKEAREGIRPHIQRFLDLGILVPCQSPWNTPLLPVKKPGTNDYRPVQDLREVNKRVQDIHPTVPNPYNLLSSLPPSHTWYSVLDLKDAFFCLKLHPNSQPLFAFEWRDPEKGNTGQLTWTRLPQGFKNSPTLFNEALHRDLASFRALNPQVVMLQYVDDLLVAAPTYRDCKEGTRRLLQELSKLGYRVSAKKAQLCREEVTYLGYLLKGGKRWLTPARKATVMKIPTPTTPRQVREFLGKAGFCRLFIPGFASLAAPLYPLTRPKVPFTWTEAHQEAFGRIKEALLSAPALALPDLTKPFALYVDEKEGVARGVLTQTLGPWRRPVAYLSKKLDPVASGWPTCLKAIAAVALLLKDADKLTLGQNVLVIAPHNLESIVRQPPDRWMTNARMTHYQSLLLNERVSFAPPAILNPATLLPVESDDTPIHICSEILAEETGTRPDLRDQPLPGVPAWYTDGSSFIMDGRRQAGAAIVDNKRTVWASNLPEGTSAQKAELIALTQALRLAEGKSINIYTDSRYAFATAHVHGAIYKQRGWLTSAGKDIKNKEEILALLEAIHLPKRVAIIHCPGHQRGTDPVATGNRKADEAAKQAAQSTRILTETTKNAGKRTADGSEFEKRTADGSEFESPKKKAKVE

SEQ ID NO: 1688 - protein, 2127 aa, synthetic construct
MPAAKRVKLDGGDKKYSIGLDIGTNSVGWAVITDEYKVPSKKFKVLGNTDRHSIKKNLIGALLFDSGETAEATRLKRTARRRYTRRKNRICYLQEIFSNEMAKVDDSFFHRLEESFLVEEDKKHERHPIFGNIVDEVAYHEKYPTIYHLRKKLVDSTDKADLRLIYLALAHMIKFRGHFLIEGDLNPDNSDVDKLFIQLVQTYNQLFEENPINASGVDAKAILSARLSKSRRLENLIAQLPGEKKNGLFGNLIALSLGLTPNFKSNFDLAEDAKLQLSKDTYDDDLDNLLAQIGDQYADLFLAAKNLSDAILLSDILRVNTEITKAPLSASMIKRYDEHHQDLTLLKALVRQQLPEKYKEIFFDQSKNGYAGYIDGGASQEEFYKFIKPILEKMDGTEELLVKLNREDLLRKQRTFDNGSIPHQIHLGELHAILRRQEDFYPFLKDNREKIEKILTFRIPYYVGPLARGNSRFAWMTRKSEETITPWNFEEVVDKGASAQSFIERMTNFDKNLPNEKVLPKHSLLYEYFTVYNELTKVKYVTEGMRKPAFLSGEQKKAIVDLLFKTNRKVTVKQLKEDYFKKIECFDSVEISGVEDRFNASLGTYHDLLKIIKDKDFLDNEENEDILEDIVLTLTLFEDREMIEERLKTYAHLFDDKVMKQLKRRRYTGWGRLSRKLINGIRDKQSGKTILDFLKSDGFANRNFMQLIHDDSLTFKEDIQKAQVSGQGDSLHEHIANLAGSPAIKKGILQTVKVVDELVKVMGRHKPENIVIEMARENQTTQKGQKNSRERMKRIEEGIKELGSQILKEHPVENTQLQNEKLYLYYLQNGRDMYVDQELDINRLSDYDVDHIVPQSFLKDDSIDNKVLTRSDKARGKSDNVPSEEVVKKMKNYWRQLLNAKLITQRKFDNLTKAERGGLSELDKAGFIKRQLVETRQITKHVAQILDSRMNTKYDENDKLIREVKVITLKSKLVSDFRKDFQFYKVREINNYHHAHDAYLNAVVGTALIKKYPKLESEFVYGDYKVYDVRKMIAKSEQEIGKATAKYFFYSNIMNFFKTEITLANGEIRKRPLIETNGETGEIVWDKGRDFATVRKVLSMPQVNIVKKTEVQTGGFSKESILPKRNSDKLIARKKDWDPKKYGGFDSPTVAYSVLVVAKVEKGKSKKLKSVKELLGITIMERSSFEKNPIDFLEAKGYKEVKKDLIIKLPKYSLFELENGRKRMLASAGELQKGNELALPSKYVNFLYLASHYEKLKGSPEDNEQKQLFVEQHKHYLDEIIEQISEFSKRVILADANLDKVLSAYNKHRDKPIREQAENIIHLFTLTNLGAPAAFKYFDTTIDRKRYTSTKEVLDATLIHQSITGLYETRIDLSQLGGDGGGGGEAAAKGSSGGLLGRDLLTKLKAQIQFSTEGPQVTWEDRPAMCLVLNLEEEYRLHEKPVPPSIDPSWLQLFPMVWAEKAGMGLANQVPPVVVELKSDASPVAVRQYPMSKEAREGIRPHIQRFLDLGILVPCQSPWNTPLLPVKKPGTNDYRPVQDLREVNKRVQDIHPTVPNPYNLLSSLPPSHTWYSVLDLKDAFFCLKLHPNSQPLFAFEWRDPEKGNTGQLTWTRLPQGFKNSPTLFNEALHRDLASFRALNPQVVMLQYVDDLLVAAPTYRDCKEGTRRLLQELSKLGYRVSAKKAQLCREEVTYLGYLLKGGKRWLTPARKATVMKIPTPTTPRQVREFLGKAGFCRLFIPGFASLAAPLYPLTRPKVPFTWTEAHQEAFGRIKEALLSAPALALPDLTKPFALYVDEKEGVARGVLTQTLGPWRRPVAYLSKKLDPVASGWPTCLKAIAAVALLLKDADKLTLGQNVLVIAPHNLESIVRQPPDRWMTNARMTHYQSLLLNERVSFAPPAILNPATLLPVESDDTPIHICSEILAEETGTRPDLRDQPLPGVPAWYTDGSSFIMDGRRQAGAAIVDNKRTVWASNLPEGTSAQKAELIALTQALRLAEGKSINIYTDSRYAFATAHVHGAIYKQRGWLTSAGKDIKNKEEILALLEAIHLPKRVAIIHCPGHQRGTDPVATGNRKADEAAKQAAQSTRILTETTKNAGKRTADGSEFEKRTADGSEFESPKKKAKVE

SEQ ID NO: 1689 - protein, 2121 aa, synthetic construct
MPAAKRVKLDGGDKKYSIGLDIGTNSVGWAVITDEYKVPSKKFKVLGNTDRHSIKKNLIGALLFDSGETAEATRLKRTARRRYTRRKNRICYLQEIFSNEMAKVDDSFFHRLEESFLVEEDKKHERHPIFGNIVDEVAYHEKYPTIYHLRKKLVDSTDKADLRLIYLALAHMIKFRGHFLIEGDLNPDNSDVDKLFIQLVQTYNQLFEENPINASGVDAKAILSARLSKSRRLENLIAQLPGEKKNGLFGNLIALSLGLTPNFKSNFDLAEDAKLQLSKDTYDDDLDNLLAQIGDQYADLFLAAKNLSDAILLSDILRVNTEITKAPLSASMIKRYDEHHQDLTLLKALVRQQLPEKYKEIFFDQSKNGYAGYIDGGASQEEFYKFIKPILEKMDGTEELLVKLNREDLLRKQRTFDNGSIPHQIHLGELHAILRRQEDFYPFLKDNREKIEKILTFRIPYYVGPLARGNSRFAWMTRKSEETITPWNFEEVVDKGASAQSFIERMTNFDKNLPNEKVLPKHSLLYEYFTVYNELTKVKYVTEGMRKPAFLSGEQKKAIVDLLFKTNRKVTVKQLKEDYFKKIECFDSVEISGVEDRFNASLGTYHDLLKIIKDKDFLDNEENEDILEDIVLTLTLFEDREMIEERLKTYAHLFDDKVMKQLKRRRYTGWGRLSRKLINGIRDKQSGKTILDFLKSDGFANRNFMQLIHDDSLTFKEDIQKAQVSGQGDSLHEHIANLAGSPAIKKGILQTVKVVDELVKVMGRHKPENIVIEMARENQTTQKGQKNSRERMKRIEEGIKELGSQILKEHPVENTQLQNEKLYLYYLQNGRDMYVDQELDINRLSDYDVDHIVPQSFLKDDSIDNKVLTRSDKARGKSDNVPSEEVVKKMKNYWRQLLNAKLITQRKFDNLTKAERGGLSELDKAGFIKRQLVETRQITKHVAQILDSRMNTKYDENDKLIREVKVITLKSKLVSDFRKDFQFYKVREINNYHHAHDAYLNAVVGTALIKKYPKLESEFVYGDYKVYDVRKMIAKSEQEIGKATAKYFFYSNIMNFFKTEITLANGEIRKRPLIETNGETGEIVWDKGRDFATVRKVLSMPQVNIVKKTEVQTGGFSKESILPKRNSDKLIARKKDWDPKKYGGFDSPTVAYSVLVVAKVEKGKSKKLKSVKELLGITIMERSSFEKNPIDFLEAKGYKEVKKDLIIKLPKYSLFELENGRKRMLASAGELQKGNELALPSKYVNFLYLASHYEKLKGSPEDNEQKQLFVEQHKHYLDEIIEQISEFSKRVILADANLDKVLSAYNKHRDKPIREQAENIIHLFTLTNLGAPAAFKYFDTTIDRKRYTSTKEVLDATLIHQSITGLYETRIDLSQLGGDGGEAAAKGGLLGRDLLTKLKAQIQFSTEGPQVTWEDRPAMCLVLNLEEEYRLHEKPVPPSIDPSWLQLFPMVWAEKAGMGLANQVPPVVVELKSDASPVAVRQYPMSKEAREGIRPHIQRFLDLGILVPCQSPWNTPLLPVKKPGTNDYRPVQDLREVNKRVQDIHPTVPNPYNLLSSLPPSHTWYSVLDLKDAFFCLKLHPNSQPLFAFEWRDPEKGNTGQLTWTRLPQGFKNSPTLFNEALHRDLASFRALNPQVVMLQYVDDLLVAAPTYRDCKEGTRRLLQELSKLGYRVSAKKAQLCREEVTYLGYLLKGGKRWLTPARKATVMKIPTPTTPRQVREFLGKAGFCRLFIPGFASLAAPLYPLTRPKVPFTWTEAHQEAFGRIKEALLSAPALALPDLTKPFALYVDEKEGVARGVLTQTLGPWRRPVAYLSKKLDPVASGWPTCLKAIAAVALLLKDADKLTLGQNVLVIAPHNLESIVRQPPDRWMTNARMTHYQSLLLNERVSFAPPAILNPATLLPVESDDTPIHICSEILAEETGTRPDLRDQPLPGVPAWYTDGSSFIMDGRRQAGAAIVDNKRTVWASNLPEGTSAQKAELIALTQALRLAEGKSINIYTDSRYAFATAHVHGAIYKQRGWLTSAGKDIKNKEEILALLEAIHLPKRVAIIHCPGHQRGTDPVATGNRKADEAAKQAAQSTRILTETTKNAGKRTADGSEFEKRTADGSEFESPKKKAKVE

SEQ ID NO: 1690 - protein, 2127 aa, synthetic construct
MPAAKRVKLDGGDKKYSIGLDIGTNSVGWAVITDEYKVPSKKFKVLGNTDRHSIKKNLIGALLFDSGETAEATRLKRTARRRYTRRKNRICYLQEIFSNEMAKVDDSFFHRLEESFLVEEDKKHERHPIFGNIVDEVAYHEKYPTIYHLRKKLVDSTDKADLRLIYLALAHMIKFRGHFLIEGDLNPDNSDVDKLFIQLVQTYNQLFEENPINASGVDAKAILSARLSKSRRLENLIAQLPGEKKNGLFGNLIALSLGLTPNFKSNFDLAEDAKLQLSKDTYDDDLDNLLAQIGDQYADLFLAAKNLSDAILLSDILRVNTEITKAPLSASMIKRYDEHHQDLTLLKALVRQQLPEKYKEIFFDQSKNGYAGYIDGGASQEEFYKFIKPILEKMDGTEELLVKLNREDLLRKQRTFDNGSIPHQIHLGELHAILRRQEDFYPFLKDNREKIEKILTFRIPYYVGPLARGNSRFAWMTRKSEETITPWNFEEVVDKGASAQSFIERMTNFDKNLPNEKVLPKHSLLYEYFTVYNELTKVKYVTEGMRKPAFLSGEQKKAIVDLLFKTNRKVTVKQLKEDYFKKIECFDSVEISGVEDRFNASLGTYHDLLKIIKDKDFLDNEENEDILEDIVLTLTLFEDREMIEERLKTYAHLFDDKVMKQLKRRRYTGWGRLSRKLINGIRDKQSGKTILDFLKSDGFANRNFMQLIHDDSLTFKEDIQKAQVSGQGDSLHEHIANLAGSPAIKKGILQTVKVVDELVKVMGRHKPENIVIEMARENQTTQKGQKNSRERMKRIEEGIKELGSQILKEHPVENTQLQNEKLYLYYLQNGRDMYVDQELDINRLSDYDVDHIVPQSFLKDDSIDNKVLTRSDKARGKSDNVPSEEVVKKMKNYWRQLLNAKLITQRKFDNLTKAERGGLSELDKAGFIKRQLVETRQITKHVAQILDSRMNTKYDENDKLIREVKVITLKSKLVSDFRKDFQFYKVREINNYHHAHDAYLNAVVGTALIKKYPKLESEFVYGDYKVYDVRKMIAKSEQEIGKATAKYFFYSNIMNFFKTEITLANGEIRKRPLIETNGETGEIVWDKGRDFATVRKVLSMPQVNIVKKTEVQTGGFSKESILPKRNSDKLIARKKDWDPKKYGGFDSPTVAYSVLVVAKVEKGKSKKLKSVKELLGITIMERSSFEKNPIDFLEAKGYKEVKKDLIIKLPKYSLFELENGRKRMLASAGELQKGNELALPSKYVNFLYLASHYEKLKGSPEDNEQKQLFVEQHKHYLDEIIEQISEFSKRVILADANLDKVLSAYNKHRDKPIREQAENIIHLFTLTNLGAPAAFKYFDTTIDRKRYTSTKEVLDATLIHQSITGLYETRIDLSQLGGDGGEAAAKGSSGGSGGLLGRDLLTKLKAQIQFSTEGPQVTWEDRPAMCLVLNLEEEYRLHEKPVPPSIDPSWLQLFPMVWAEKAGMGLANQVPPVVVELKSDASPVAVRQYPMSKEAREGIRPHIQRFLDLGILVPCQSPWNTPLLPVKKPGTNDYRPVQDLREVNKRVQDIHPTVPNPYNLLSSLPPSHTWYSVLDLKDAFFCLKLHPNSQPLFAFEWRDPEKGNTGQLTWTRLPQGFKNSPTLFNEALHRDLASFRALNPQVVMLQYVDDLLVAAPTYRDCKEGTRRLLQELSKLGYRVSAKKAQLCREEVTYLGYLLKGGKRWLTPARKATVMKIPTPTTPRQVREFLGKAGFCRLFIPGFASLAAPLYPLTRPKVPFTWTEAHQEAFGRIKEALLSAPALALPDLTKPFALYVDEKEGVARGVLTQTLGPWRRPVAYLSKKLDPVASGWPTCLKAIAAVALLLKDADKLTLGQNVLVIAPHNLESIVRQPPDRWMTNARMTHYQSLLLNERVSFAPPAILNPATLLPVESDDTPIHICSEILAEETGTRPDLRDQPLPGVPAWYTDGSSFIMDGRRQAGAAIVDNKRTVWASNLPEGTSAQKAELIALTQALRLAEGKSINIYTDSRYAFATAHVHGAIYKQRGWLTSAGKDIKNKEEILALLEAIHLPKRVAIIHCPGHQRGTDPVATGNRKADEAAKQAAQSTRILTETTKNAGKRTADGSEFEKRTADGSEFESPKKKAKVE

SEQ ID NO: 1691 - protein, 2125 aa, synthetic construct
MPAAKRVKLDGGDKKYSIGLDIGTNSVGWAVITDEYKVPSKKFKVLGNTDRHSIKKNLIGALLFDSGETAEATRLKRTARRRYTRRKNRICYLQEIFSNEMAKVDDSFFHRLEESFLVEEDKKHERHPIFGNIVDEVAYHEKYPTIYHLRKKLVDSTDKADLRLIYLALAHMIKFRGHFLIEGDLNPDNSDVDKLFIQLVQTYNQLFEENPINASGVDAKAILSARLSKSRRLENLIAQLPGEKKNGLFGNLIALSLGLTPNFKSNFDLAEDAKLQLSKDTYDDDLDNLLAQIGDQYADLFLAAKNLSDAILLSDILRVNTEITKAPLSASMIKRYDEHHQDLTLLKALVRQQLPEKYKEIFFDQSKNGYAGYIDGGASQEEFYKFIKPILEKMDGTEELLVKLNREDLLRKQRTFDNGSIPHQIHLGELHAILRRQEDFYPFLKDNREKIEKILTFRIPYYVGPLARGNSRFAWMTRKSEETITPWNFEEVVDKGASAQSFIERMTNFDKNLPNEKVLPKHSLLYEYFTVYNELTKVKYVTEGMRKPAFLSGEQKKAIVDLLFKTNRKVTVKQLKEDYFKKIECFDSVEISGVEDRFNASLGTYHDLLKIIKDKDFLDNEENEDILEDIVLTLTLFEDREMIEERLKTYAHLFDDKVMKQLKRRRYTGWGRLSRKLINGIRDKQSGKTILDFLKSDGFANRNFMQLIHDDSLTFKEDIQKAQVSGQGDSLHEHIANLAGSPAIKKGILQTVKVVDELVKVMGRHKPENIVIEMARENQTTQKGQKNSRERMKRIEEGIKELGSQILKEHPVENTQLQNEKLYLYYLQNGRDMYVDQELDINRLSDYDVDHIVPQSFLKDDSIDNKVLTRSDKARGKSDNVPSEEVVKKMKNYWRQLLNAKLITQRKFDNLTKAERGGLSELDKAGFIKRQLVETRQITKHVAQILDSRMNTKYDENDKLIREVKVITLKSKLVSDFRKDFQFYKVREINNYHHAHDAYLNAVVGTALIKKYPKLESEFVYGDYKVYDVRKMIAKSEQEIGKATAKYFFYSNIMNFFKTEITLANGEIRKRPLIETNGETGEIVWDKGRDFATVRKVLSMPQVNIVKKTEVQTGGFSKESILPKRNSDKLIARKKDWDPKKYGGFDSPTVAYSVLVVAKVEKGKSKKLKSVKELLGITIMERSSFEKNPIDFLEAKGYKEVKKDLIIKLPKYSLFELENGRKRMLASAGELQKGNELALPSKYVNFLYLASHYEKLKGSPEDNEQKQLFVEQHKHYLDEIIEQISEFSKRVILADANLDKVLSAYNKHRDKPIREQAENIIHLFTLTNLGAPAAFKYFDTTIDRKRYTSTKEVLDATLIHQSITGLYETRIDLSQLGGDGGPAPGGGGSSGGLLGRDLLTKLKAQIQFSTEGPQVTWEDRPAMCLVLNLEEEYRLHEKPVPPSIDPSWLQLFPMVWAEKAGMGLANQVPPVVVELKSDASPVAVRQYPMSKEAREGIRPHIQRFLDLGILVPCQSPWNTPLLPVKKPGTNDYRPVQDLREVNKRVQDIHPTVPNPYNLLSSLPPSHTWYSVLDLKDAFFCLKLHPNSQPLFAFEWRDPEKGNTGQLTWTRLPQGFKNSPTLFNEALHRDLASFRALNPQVVMLQYVDDLLVAAPTYRDCKEGTRRLLQELSKLGYRVSAKKAQLCREEVTYLGYLLKGGKRWLTPARKATVMKIPTPTTPRQVREFLGKAGFCRLFIPGFASLAAPLYPLTRPKVPFTWTEAHQEAFGRIKEALLSAPALALPDLTKPFALYVDEKEGVARGVLTQTLGPWRRPVAYLSKKLDPVASGWPTCLKAIAAVALLLKDADKLTLGQNVLVIAPHNLESIVRQPPDRWMTNARMTHYQSLLLNERVSFAPPAILNPATLLPVESDDTPIHICSEILAEETGTRPDLRDQPLPGVPAWYTDGSSFIMDGRRQAGAAIVDNKRTVWASNLPEGTSAQKAELIALTQALRLAEGKSINIYTDSRYAFATAHVHGAIYKQRGWLTSAGKDIKNKEEILALLEAIHLPKRVAIIHCPGHQRGTDPVATGNRKADEAAKQAAQSTRILTETTKNAGKRTADGSEFEKRTADGSEFESPKKKAKVE

SEQ ID NO: 1692 - protein, 2119 aa, synthetic construct
MPAAKRVKLDGGDKKYSIGLDIGTNSVGWAVITDEYKVPSKKFKVLGNTDRHSIKKNLIGALLFDSGETAEATRLKRTARRRYTRRKNRICYLQEIFSNEMAKVDDSFFHRLEESFLVEEDKKHERHPIFGNIVDEVAYHEKYPTIYHLRKKLVDSTDKADLRLIYLALAHMIKFRGHFLIEGDLNPDNSDVDKLFIQLVQTYNQLFEENPINASGVDAKAILSARLSKSRRLENLIAQLPGEKKNGLFGNLIALSLGLTPNFKSNFDLAEDAKLQLSKDTYDDDLDNLLAQIGDQYADLFLAAKNLSDAILLSDILRVNTEITKAPLSASMIKRYDEHHQDLTLLKALVRQQLPEKYKEIFFDQSKNGYAGYIDGGASQEEFYKFIKPILEKMDGTEELLVKLNREDLLRKQRTFDNGSIPHQIHLGELHAILRRQEDFYPFLKDNREKIEKILTFRIPYYVGPLARGNSRFAWMTRKSEETITPWNFEEVVDKGASAQSFIERMTNFDKNLPNEKVLPKHSLLYEYFTVYNELTKVKYVTEGMRKPAFLSGEQKKAIVDLLFKTNRKVTVKQLKEDYFKKIECFDSVEISGVEDRFNASLGTYHDLLKIIKDKDFLDNEENEDILEDIVLTLTLFEDREMIEERLKTYAHLFDDKVMKQLKRRRYTGWGRLSRKLINGIRDKQSGKTILDFLKSDGFANRNFMQLIHDDSLTFKEDIQKAQVSGQGDSLHEHIANLAGSPAIKKGILQTVKVVDELVKVMGRHKPENIVIEMARENQTTQKGQKNSRERMKRIEEGIKELGSQILKEHPVENTQLQNEKLYLYYLQNGRDMYVDQELDINRLSDYDVDHIVPQSFLKDDSIDNKVLTRSDKARGKSDNVPSEEVVKKMKNYWRQLLNAKLITQRKFDNLTKAERGGLSELDKAGFIKRQLVETRQITKHVAQILDSRMNTKYDENDKLIREVKVITLKSKLVSDFRKDFQFYKVREINNYHHAHDAYLNAVVGTALIKKYPKLESEFVYGDYKVYDVRKMIAKSEQEIGKATAKYFFYSNIMNFFKTEITLANGEIRKRPLIETNGETGEIVWDKGRDFATVRKVLSMPQVNIVKKTEVQTGGFSKESILPKRNSDKLIARKKDWDPKKYGGFDSPTVAYSVLVVAKVEKGKSKKLKSVKELLGITIMERSSFEKNPIDFLEAKGYKEVKKDLIIKLPKYSLFELENGRKRMLASAGELQKGNELALPSKYVNFLYLASHYEKLKGSPEDNEQKQLFVEQHKHYLDEIIEQISEFSKRVILADANLDKVLSAYNKHRDKPIREQAENIIHLFTLTNLGAPAAFKYFDTTIDRKRYTSTKEVLDATLIHQSITGLYETRIDLSQLGGDGGPAPGGLLGRDLLTKLKAQIQFSTEGPQVTWEDRPAMCLVLNLEEEYRLHEKPVPPSIDPSWLQLFPMVWAEKAGMGLANQVPPVVVELKSDASPVAVRQYPMSKEAREGIRPHIQRFLDLGILVPCQSPWNTPLLPVKKPGTNDYRPVQDLREVNKRVQDIHPTVPNPYNLLSSLPPSHTWYSVLDLKDAFFCLKLHPNSQPLFAFEWRDPEKGNTGQLTWTRLPQGFKNSPTLFNEALHRDLASFRALNPQVVMLQYVDDLLVAAPTYRDCKEGTRRLLQELSKLGYRVSAKKAQLCREEVTYLGYLLKGGKRWLTPARKATVMKIPTPTTPRQVREFLGKAGFCRLFIPGFASLAAPLYPLTRPKVPFTWTEAHQEAFGRIKEALLSAPALALPDLTKPFALYVDEKEGVARGVLTQTLGPWRRPVAYLSKKLDPVASGWPTCLKAIAAVALLLKDADKLTLGQNVLVIAPHNLESIVRQPPDRWMTNARMTHYQSLLLNERVSFAPPAILNPATLLPVESDDTPIHICSEILAEETGTRPDLRDQPLPGVPAWYTDGSSFIMDGRRQAGAAIVDNKRTVWASNLPEGTSAQKAELIALTQALRLAEGKSINIYTDSRYAFATAHVHGAIYKQRGWLTSAGKDIKNKEEILALLEAIHLPKRVAIIHCPGHQRGTDPVATGNRKADEAAKQAAQSTRILTETTKNAGKRTADGSEFEKRTADGSEFESPKKKAKVE

SEQ ID NO: 1693 - protein, 2128 aa, synthetic construct
MPAAKRVKLDGGDKKYSIGLDIGTNSVGWAVITDEYKVPSKKFKVLGNTDRHSIKKNLIGALLFDSGETAEATRLKRTARRRYTRRKNRICYLQEIFSNEMAKVDDSFFHRLEESFLVEEDKKHERHPIFGNIVDEVAYHEKYPTIYHLRKKLVDSTDKADLRLIYLALAHMIKFRGHFLIEGDLNPDNSDVDKLFIQLVQTYNQLFEENPINASGVDAKAILSARLSKSRRLENLIAQLPGEKKNGLFGNLIALSLGLTPNFKSNFDLAEDAKLQLSKDTYDDDLDNLLAQIGDQYADLFLAAKNLSDAILLSDILRVNTEITKAPLSASMIKRYDEHHQDLTLLKALVRQQLPEKYKEIFFDQSKNGYAGYIDGGASQEEFYKFIKPILEKMDGTEELLVKLNREDLLRKQRTFDNGSIPHQIHLGELHAILRRQEDFYPFLKDNREKIEKILTFRIPYYVGPLARGNSRFAWMTRKSEETITPWNFEEVVDKGASAQSFIERMTNFDKNLPNEKVLPKHSLLYEYFTVYNELTKVKYVTEGMRKPAFLSGEQKKAIVDLLFKTNRKVTVKQLKEDYFKKIECFDSVEISGVEDRFNASLGTYHDLLKIIKDKDFLDNEENEDILEDIVLTLTLFEDREMIEERLKTYAHLFDDKVMKQLKRRRYTGWGRLSRKLINGIRDKQSGKTILDFLKSDGFANRNFMQLIHDDSLTFKEDIQKAQVSGQGDSLHEHIANLAGSPAIKKGILQTVKVVDELVKVMGRHKPENIVIEMARENQTTQKGQKNSRERMKRIEEGIKELGSQILKEHPVENTQLQNEKLYLYYLQNGRDMYVDQELDINRLSDYDVDHIVPQSFLKDDSIDNKVLTRSDKARGKSDNVPSEEVVKKMKNYWRQLLNAKLITQRKFDNLTKAERGGLSELDKAGFIKRQLVETRQITKHVAQILDSRMNTKYDENDKLIREVKVITLKSKLVSDFRKDFQFYKVREINNYHHAHDAYLNAVVGTALIKKYPKLESEFVYGDYKVYDVRKMIAKSEQEIGKATAKYFFYSNIMNFFKTEITLANGEIRKRPLIETNGETGEIVWDKGRDFATVRKVLSMPQVNIVKKTEVQTGGFSKESILPKRNSDKLIARKKDWDPKKYGGFDSPTVAYSVLVVAKVEKGKSKKLKSVKELLGITIMERSSFEKNPIDFLEAKGYKEVKKDLIIKLPKYSLFELENGRKRMLASAGELQKGNELALPSKYVNFLYLASHYEKLKGSPEDNEQKQLFVEQHKHYLDEIIEQISEFSKRVILADANLDKVLSAYNKHRDKPIREQAENIIHLFTLTNLGAPAAFKYFDTTIDRKRYTSTKEVLDATLIHQSITGLYETRIDLSQLGGDGGGSAGSAAGSGEFGGLLGRDLLTKLKAQIQFSTEGPQVTWEDRPAMCLVLNLEEEYRLHEKPVPPSIDPSWLQLFPMVWAEKAGMGLANQVPPVVVELKSDASPVAVRQYPMSKEAREGIRPHIQRFLDLGILVPCQSPWNTPLLPVKKPGTNDYRPVQDLREVNKRVQDIHPTVPNPYNLLSSLPPSHTWYSVLDLKDAFFCLKLHPNSQPLFAFEWRDPEKGNTGQLTWTRLPQGFKNSPTLFNEALHRDLASFRALNPQVVMLQYVDDLLVAAPTYRDCKEGTRRLLQELSKLGYRVSAKKAQLCREEVTYLGYLLKGGKRWLTPARKATVMKIPTPTTPRQVREFLGKAGFCRLFIPGFASLAAPLYPLTRPKVPFTWTEAHQEAFGRIKEALLSAPALALPDLTKPFALYVDEKEGVARGVLTQTLGPWRRPVAYLSKKLDPVASGWPTCLKAIAAVALLLKDADKLTLGQNVLVIAPHNLESIVRQPPDRWMTNARMTHYQSLLLNERVSFAPPAILNPATLLPVESDDTPIHICSEILAEETGTRPDLRDQPLPGVPAWYTDGSSFIMDGRRQAGAAIVDNKRTVWASNLPEGTSAQKAELIALTQALRLAEGKSINIYTDSRYAFATAHVHGAIYKQRGWLTSAGKDIKNKEEILALLEAIHLPKRVAIIHCPGHQRGTDPVATGNRKADEAAKQAAQSTRILTETTKNAGKRTADGSEFEKRTADGSEFESPKKKAKVE

SEQ ID NO: 1694 - protein, 2125 aa, synthetic construct
MPAAKRVKLDGGDKKYSIGLDIGTNSVGWAVITDEYKVPSKKFKVLGNTDRHSIKKNLIGALLFDSGETAEATRLKRTARRRYTRRKNRICYLQEIFSNEMAKVDDSFFHRLEESFLVEEDKKHERHPIFGNIVDEVAYHEKYPTIYHLRKKLVDSTDKADLRLIYLALAHMIKFRGHFLIEGDLNPDNSDVDKLFIQLVQTYNQLFEENPINASGVDAKAILSARLSKSRRLENLIAQLPGEKKNGLFGNLIALSLGLTPNFKSNFDLAEDAKLQLSKDTYDDDLDNLLAQIGDQYADLFLAAKNLSDAILLSDILRVNTEITKAPLSASMIKRYDEHHQDLTLLKALVRQQLPEKYKEIFFDQSKNGYAGYIDGGASQEEFYKFIKPILEKMDGTEELLVKLNREDLLRKQRTFDNGSIPHQIHLGELHAILRRQEDFYPFLKDNREKIEKILTFRIPYYVGPLARGNSRFAWMTRKSEETITPWNFEEVVDKGASAQSFIERMTNFDKNLPNEKVLPKHSLLYEYFTVYNELTKVKYVTEGMRKPAFLSGEQKKAIVDLLFKTNRKVTVKQLKEDYFKKIECFDSVEISGVEDRFNASLGTYHDLLKIIKDKDFLDNEENEDILEDIVLTLTLFEDREMIEERLKTYAHLFDDKVMKQLKRRRYTGWGRLSRKLINGIRDKQSGKTILDFLKSDGFANRNFMQLIHDDSLTFKEDIQKAQVSGQGDSLHEHIANLAGSPAIKKGILQTVKVVDELVKVMGRHKPENIVIEMARENQTTQKGQKNSRERMKRIEEGIKELGSQILKEHPVENTQLQNEKLYLYYLQNGRDMYVDQELDINRLSDYDVDHIVPQSFLKDDSIDNKVLTRSDKARGKSDNVPSEEVVKKMKNYWRQLLNAKLITQRKFDNLTKAERGGLSELDKAGFIKRQLVETRQITKHVAQILDSRMNTKYDENDKLIREVKVITLKSKLVSDFRKDFQFYKVREINNYHHAHDAYLNAVVGTALIKKYPKLESEFVYGDYKVYDVRKMIAKSEQEIGKATAKYFFYSNIMNFFKTEITLANGEIRKRPLIETNGETGEIVWDKGRDFATVRKVLSMPQVNIVKKTEVQTGGFSKESILPKRNSDKLIARKKDWDPKKYGGFDSPTVAYSVLVVAKVEKGKSKKLKSVKELLGITIMERSSFEKNPIDFLEAKGYKEVKKDLIIKLPKYSLFELENGRKRMLASAGELQKGNELALPSKYVNFLYLASHYEKLKGSPEDNEQKQLFVEQHKHYLDEIIEQISEFSKRVILADANLDKVLSAYNKHRDKPIREQAENIIHLFTLTNLGAPAAFKYFDTTIDRKRYTSTKEVLDATLIHQSITGLYETRIDLSQLGGDGGGSSPAPGGGGGLLGRDLLTKLKAQIQFSTEGPQVTWEDRPAMCLVLNLEEEYRLHEKPVPPSIDPSWLQLFPMVWAEKAGMGLANQVPPVVVELKSDASPVAVRQYPMSKEAREGIRPHIQRFLDLGILVPCQSPWNTPLLPVKKPGTNDYRPVQDLREVNKRVQDIHPTVPNPYNLLSSLPPSHTWYSVLDLKDAFFCLKLHPNSQPLFAFEWRDPEKGNTGQLTWTRLPQGFKNSPTLFNEALHRDLASFRALNPQVVMLQYVDDLLVAAPTYRDCKEGTRRLLQELSKLGYRVSAKKAQLCREEVTYLGYLLKGGKRWLTPARKATVMKIPTPTTPRQVREFLGKAGFCRLFIPGFASLAAPLYPLTRPKVPFTWTEAHQEAFGRIKEALLSAPALALPDLTKPFALYVDEKEGVARGVLTQTLGPWRRPVAYLSKKLDPVASGWPTCLKAIAAVALLLKDADKLTLGQNVLVIAPHNLESIVRQPPDRWMTNARMTHYQSLLLNERVSFAPPAILNPATLLPVESDDTPIHICSEILAEETGTRPDLRDQPLPGVPAWYTDGSSFIMDGRRQAGAAIVDNKRTVWASNLPEGTSAQKAELIALTQALRLAEGKSINIYTDSRYAFATAHVHGAIYKQRGWLTSAGKDIKNKEEILALLEAIHLPKRVAIIHCPGHQRGTDPVATGNRKADEAAKQAAQSTRILTETTKNAGKRTADGSEFEKRTADGSEFESPKKKAKVE

SEQ ID NO: 1695 - protein, 2122 aa, synthetic construct
MPAAKRVKLDGGDKKYSIGLDIGTNSVGWAVITDEYKVPSKKFKVLGNTDRHSIKKNLIGALLFDSGETAEATRLKRTARRRYTRRKNRICYLQEIFSNEMAKVDDSFFHRLEESFLVEEDKKHERHPIFGNIVDEVAYHEKYPTIYHLRKKLVDSTDKADLRLIYLALAHMIKFRGHFLIEGDLNPDNSDVDKLFIQLVQTYNQLFEENPINASGVDAKAILSARLSKSRRLENLIAQLPGEKKNGLFGNLIALSLGLTPNFKSNFDLAEDAKLQLSKDTYDDDLDNLLAQIGDQYADLFLAAKNLSDAILLSDILRVNTEITKAPLSASMIKRYDEHHQDLTLLKALVRQQLPEKYKEIFFDQSKNGYAGYIDGGASQEEFYKFIKPILEKMDGTEELLVKLNREDLLRKQRTFDNGSIPHQIHLGELHAILRRQEDFYPFLKDNREKIEKILTFRIPYYVGPLARGNSRFAWMTRKSEETITPWNFEEVVDKGASAQSFIERMTNFDKNLPNEKVLPKHSLLYEYFTVYNELTKVKYVTEGMRKPAFLSGEQKKAIVDLLFKTNRKVTVKQLKEDYFKKIECFDSVEISGVEDRFNASLGTYHDLLKIIKDKDFLDNEENEDILEDIVLTLTLFEDREMIEERLKTYAHLFDDKVMKQLKRRRYTGWGRLSRKLINGIRDKQSGKTILDFLKSDGFANRNFMQLIHDDSLTFKEDIQKAQVSGQGDSLHEHIANLAGSPAIKKGILQTVKVVDELVKVMGRHKPENIVIEMARENQTTQKGQKNSRERMKRIEEGIKELGSQILKEHPVENTQLQNEKLYLYYLQNGRDMYVDQELDINRLSDYDVDHIVPQSFLKDDSIDNKVLTRSDKARGKSDNVPSEEVVKKMKNYWRQLLNAKLITQRKFDNLTKAERGGLSELDKAGFIKRQLVETRQITKHVAQILDSRMNTKYDENDKLIREVKVITLKSKLVSDFRKDFQFYKVREINNYHHAHDAYLNAVVGTALIKKYPKLESEFVYGDYKVYDVRKMIAKSEQEIGKATAKYFFYSNIMNFFKTEITLANGEIRKRPLIETNGETGEIVWDKGRDFATVRKVLSMPQVNIVKKTEVQTGGFSKESILPKRNSDKLIARKKDWDPKKYGGFDSPTVAYSVLVVAKVEKGKSKKLKSVKELLGITIMERSSFEKNPIDFLEAKGYKEVKKDLIIKLPKYSLFELENGRKRMLASAGELQKGNELALPSKYVNFLYLASHYEKLKGSPEDNEQKQLFVEQHKHYLDEIIEQISEFSKRVILADANLDKVLSAYNKHRDKPIREQAENIIHLFTLTNLGAPAAFKYFDTTIDRKRYTSTKEVLDATLIHQSITGLYETRIDLSQLGGDGGPAPGSSGGLLGRDLLTKLKAQIQFSTEGPQVTWEDRPAMCLVLNLEEEYRLHEKPVPPSIDPSWLQLFPMVWAEKAGMGLANQVPPVVVELKSDASPVAVRQYPMSKEAREGIRPHIQRFLDLGILVPCQSPWNTPLLPVKKPGTNDYRPVQDLREVNKRVQDIHPTVPNPYNLLSSLPPSHTWYSVLDLKDAFFCLKLHPNSQPLFAFEWRDPEKGNTGQLTWTRLPQGFKNSPTLFNEALHRDLASFRALNPQVVMLQYVDDLLVAAPTYRDCKEGTRRLLQELSKLGYRVSAKKAQLCREEVTYLGYLLKGGKRWLTPARKATVMKIPTPTTPRQVREFLGKAGFCRLFIPGFASLAAPLYPLTRPKVPFTWTEAHQEAFGRIKEALLSAPALALPDLTKPFALYVDEKEGVARGVLTQTLGPWRRPVAYLSKKLDPVASGWPTCLKAIAAVALLLKDADKLTLGQNVLVIAPHNLESIVRQPPDRWMTNARMTHYQSLLLNERVSFAPPAILNPATLLPVESDDTPIHICSEILAEETGTRPDLRDQPLPGVPAWYTDGSSFIMDGRRQAGAAIVDNKRTVWASNLPEGTSAQKAELIALTQALRLAEGKSINIYTDSRYAFATAHVHGAIYKQRGWLTSAGKDIKNKEEILALLEAIHLPKRVAIIHCPGHQRGTDPVATGNRKADEAAKQAAQSTRILTETTKNAGKRTADGSEFEKRTADGSEFESPKKKAKVE

SEQ ID NO: 1696 - protein, 2125 aa, synthetic construct
MPAAKRVKLDGGDKKYSIGLDIGTNSVGWAVITDEYKVPSKKFKVLGNTDRHSIKKNLIGALLFDSGETAEATRLKRTARRRYTRRKNRICYLQEIFSNEMAKVDDSFFHRLEESFLVEEDKKHERHPIFGNIVDEVAYHEKYPTIYHLRKKLVDSTDKADLRLIYLALAHMIKFRGHFLIEGDLNPDNSDVDKLFIQLVQTYNQLFEENPINASGVDAKAILSARLSKSRRLENLIAQLPGEKKNGLFGNLIALSLGLTPNFKSNFDLAEDAKLQLSKDTYDDDLDNLLAQIGDQYADLFLAAKNLSDAILLSDILRVNTEITKAPLSASMIKRYDEHHQDLTLLKALVRQQLPEKYKEIFFDQSKNGYAGYIDGGASQEEFYKFIKPILEKMDGTEELLVKLNREDLLRKQRTFDNGSIPHQIHLGELHAILRRQEDFYPFLKDNREKIEKILTFRIPYYVGPLARGNSRFAWMTRKSEETITPWNFEEVVDKGASAQSFIERMTNFDKNLPNEKVLPKHSLLYEYFTVYNELTKVKYVTEGMRKPAFLSGEQKKAIVDLLFKTNRKVTVKQLKEDYFKKIECFDSVEISGVEDRFNASLGTYHDLLKIIKDKDFLDNEENEDILEDIVLTLTLFEDREMIEERLKTYAHLFDDKVMKQLKRRRYTGWGRLSRKLINGIRDKQSGKTILDFLKSDGFANRNFMQLIHDDSLTFKEDIQKAQVSGQGDSLHEHIANLAGSPAIKKGILQTVKVVDELVKVMGRHKPENIVIEMARENQTTQKGQKNSRERMKRIEEGIKELGSQILKEHPVENTQLQNEKLYLYYLQNGRDMYVDQELDINRLSDYDVDHIVPQSFLKDDSIDNKVLTRSDKARGKSDNVPSEEVVKKMKNYWRQLLNAKLITQRKFDNLTKAERGGLSELDKAGFIKRQLVETRQITKHVAQILDSRMNTKYDENDKLIREVKVITLKSKLVSDFRKDFQFYKVREINNYHHAHDAYLNAVVGTALIKKYPKLESEFVYGDYKVYDVRKMIAKSEQEIGKATAKYFFYSNIMNFFKTEITLANGEIRKRPLIETNGETGEIVWDKGRDFATVRKVLSMPQVNIVKKTEVQTGGFSKESILPKRNSDKLIARKKDWDPKKYGGFDSPTVAYSVLVVAKVEKGKSKKLKSVKELLGITIMERSSFEKNPIDFLEAKGYKEVKKDLIIKLPKYSLFELENGRKRMLASAGELQKGNELALPSKYVNFLYLASHYEKLKGSPEDNEQKQLFVEQHKHYLDEIIEQISEFSKRVILADANLDKVLSAYNKHRDKPIREQAENIIHLFTLTNLGAPAAFKYFDTTIDRKRYTSTKEVLDATLIHQSITGLYETRIDLSQLGGDGGPAPAPAPAPGGLLGRDLLTKLKAQIQFSTEGPQVTWEDRPAMCLVLNLEEEYRLHEKPVPPSIDPSWLQLFPMVWAEKAGMGLANQVPPVVVELKSDASPVAVRQYPMSKEAREGIRPHIQRFLDLGILVPCQSPWNTPLLPVKKPGTNDYRPVQDLREVNKRVQDIHPTVPNPYNLLSSLPPSHTWYSVLDLKDAFFCLKLHPNSQPLFAFEWRDPEKGNTGQLTWTRLPQGFKNSPTLFNEALHRDLASFRALNPQVVMLQYVDDLLVAAPTYRDCKEGTRRLLQELSKLGYRVSAKKAQLCREEVTYLGYLLKGGKRWLTPARKATVMKIPTPTTPRQVREFLGKAGFCRLFIPGFASLAAPLYPLTRPKVPFTWTEAHQEAFGRIKEALLSAPALALPDLTKPFALYVDEKEGVARGVLTQTLGPWRRPVAYLSKKLDPVASGWPTCLKAIAAVALLLKDADKLTLGQNVLVIAPHNLESIVRQPPDRWMTNARMTHYQSLLLNERVSFAPPAILNPATLLPVESDDTPIHICSEILAEETGTRPDLRDQPLPGVPAWYTDGSSFIMDGRRQAGAAIVDNKRTVWASNLPEGTSAQKAELIALTQALRLAEGKSINIYTDSRYAFATAHVHGAIYKQRGWLTSAGKDIKNKEEILALLEAIHLPKRVAIIHCPGHQRGTDPVATGNRKADEAAKQAAQSTRILTETTKNAGKRTADGSEFEKRTADGSEFESPKKKAKVE

SEQ ID NO: 1697 - protein, 2119 aa, synthetic construct
MPAAKRVKLDGGDKKYSIGLDIGTNSVGWAVITDEYKVPSKKFKVLGNTDRHSIKKNLIGALLFDSGETAEATRLKRTARRRYTRRKNRICYLQEIFSNEMAKVDDSFFHRLEESFLVEEDKKHERHPIFGNIVDEVAYHEKYPTIYHLRKKLVDSTDKADLRLIYLALAHMIKFRGHFLIEGDLNPDNSDVDKLFIQLVQTYNQLFEENPINASGVDAKAILSARLSKSRRLENLIAQLPGEKKNGLFGNLIALSLGLTPNFKSNFDLAEDAKLQLSKDTYDDDLDNLLAQIGDQYADLFLAAKNLSDAILLSDILRVNTEITKAPLSASMIKRYDEHHQDLTLLKALVRQQLPEKYKEIFFDQSKNGYAGYIDGGASQEEFYKFIKPILEKMDGTEELLVKLNREDLLRKQRTFDNGSIPHQIHLGELHAILRRQEDFYPFLKDNREKIEKILTFRIPYYVGPLARGNSRFAWMTRKSEETITPWNFEEVVDKGASAQSFIERMTNFDKNLPNEKVLPKHSLLYEYFTVYNELTKVKYVTEGMRKPAFLSGEQKKAIVDLLFKTNRKVTVKQLKEDYFKKIECFDSVEISGVEDRFNASLGTYHDLLKIIKDKDFLDNEENEDILEDIVLTLTLFEDREMIEERLKTYAHLFDDKVMKQLKRRRYTGWGRLSRKLINGIRDKQSGKTILDFLKSDGFANRNFMQLIHDDSLTFKEDIQKAQVSGQGDSLHEHIANLAGSPAIKKGILQTVKVVDELVKVMGRHKPENIVIEMARENQTTQKGQKNSRERMKRIEEGIKELGSQILKEHPVENTQLQNEKLYLYYLQNGRDMYVDQELDINRLSDYDVDHIVPQSFLKDDSIDNKVLTRSDKARGKSDNVPSEEVVKKMKNYWRQLLNAKLITQRKFDNLTKAERGGLSELDKAGFIKRQLVETRQITKHVAQILDSRMNTKYDENDKLIREVKVITLKSKLVSDFRKDFQFYKVREINNYHHAHDAYLNAVVGTALIKKYPKLESEFVYGDYKVYDVRKMIAKSEQEIGKATAKYFFYSNIMNFFKTEITLANGEIRKRPLIETNGETGEIVWDKGRDFATVRKVLSMPQVNIVKKTEVQTGGFSKESILPKRNSDKLIARKKDWDPKKYGGFDSPTVAYSVLVVAKVEKGKSKKLKSVKELLGITIMERSSFEKNPIDFLEAKGYKEVKKDLIIKLPKYSLFELENGRKRMLASAGELQKGNELALPSKYVNFLYLASHYEKLKGSPEDNEQKQLFVEQHKHYLDEIIEQISEFSKRVILADANLDKVLSAYNKHRDKPIREQAENIIHLFTLTNLGAPAAFKYFDTTIDRKRYTSTKEVLDATLIHQSITGLYETRIDLSQLGGDGGGSSGGLLGRDLLTKLKAQIQFSTEGPQVTWEDRPAMCLVLNLEEEYRLHEKPVPPSIDPSWLQLFPMVWAEKAGMGLANQVPPVVVELKSDASPVAVRQYPMSKEAREGIRPHIQRFLDLGILVPCQSPWNTPLLPVKKPGTNDYRPVQDLREVNKRVQDIHPTVPNPYNLLSSLPPSHTWYSVLDLKDAFFCLKLHPNSQPLFAFEWRDPEKGNTGQLTWTRLPQGFKNSPTLFNEALHRDLASFRALNPQVVMLQYVDDLLVAAPTYRDCKEGTRRLLQELSKLGYRVSAKKAQLCREEVTYLGYLLKGGKRWLTPARKATVMKIPTPTTPRQVREFLGKAGFCRLFIPGFASLAAPLYPLTRPKVPFTWTEAHQEAFGRIKEALLSAPALALPDLTKPFALYVDEKEGVARGVLTQTLGPWRRPVAYLSKKLDPVASGWPTCLKAIAAVALLLKDADKLTLGQNVLVIAPHNLESIVRQPPDRWMTNARMTHYQSLLLNERVSFAPPAILNPATLLPVESDDTPIHICSEILAEETGTRPDLRDQPLPGVPAWYTDGSSFIMDGRRQAGAAIVDNKRTVWASNLPEGTSAQKAELIALTQALRLAEGKSINIYTDSRYAFATAHVHGAIYKQRGWLTSAGKDIKNKEEILALLEAIHLPKRVAIIHCPGHQRGTDPVATGNRKADEAAKQAAQSTRILTETTKNAGKRTADGSEFEKRTADGSEFESPKKKAKVE

SEQ ID NO: 1698 - protein, 2122 aa, synthetic construct
MPAAKRVKLDGGDKKYSIGLDIGTNSVGWAVITDEYKVPSKKFKVLGNTDRHSIKKNLIGALLFDSGETAEATRLKRTARRRYTRRKNRICYLQEIFSNEMAKVDDSFFHRLEESFLVEEDKKHERHPIFGNIVDEVAYHEKYPTIYHLRKKLVDSTDKADLRLIYLALAHMIKFRGHFLIEGDLNPDNSDVDKLFIQLVQTYNQLFEENPINASGVDAKAILSARLSKSRRLENLIAQLPGEKKNGLFGNLIALSLGLTPNFKSNFDLAEDAKLQLSKDTYDDDLDNLLAQIGDQYADLFLAAKNLSDAILLSDILRVNTEITKAPLSASMIKRYDEHHQDLTLLKALVRQQLPEKYKEIFFDQSKNGYAGYIDGGASQEEFYKFIKPILEKMDGTEELLVKLNREDLLRKQRTFDNGSIPHQIHLGELHAILRRQEDFYPFLKDNREKIEKILTFRIPYYVGPLARGNSRFAWMTRKSEETITPWNFEEVVDKGASAQSFIERMTNFDKNLPNEKVLPKHSLLYEYFTVYNELTKVKYVTEGMRKPAFLSGEQKKAIVDLLFKTNRKVTVKQLKEDYFKKIECFDSVEISGVEDRFNASLGTYHDLLKIIKDKDFLDNEENEDILEDIVLTLTLFEDREMIEERLKTYAHLFDDKVMKQLKRRRYTGWGRLSRKLINGIRDKQSGKTILDFLKSDGFANRNFMQLIHDDSLTFKEDIQKAQVSGQGDSLHEHIANLAGSPAIKKGILQTVKVVDELVKVMGRHKPENIVIEMARENQTTQKGQKNSRERMKRIEEGIKELGSQILKEHPVENTQLQNEKLYLYYLQNGRDMYVDQELDINRLSDYDVDHIVPQSFLKDDSIDNKVLTRSDKARGKSDNVPSEEVVKKMKNYWRQLLNAKLITQRKFDNLTKAERGGLSELDKAGFIKRQLVETRQITKHVAQILDSRMNTKYDENDKLIREVKVITLKSKLVSDFRKDFQFYKVREINNYHHAHDAYLNAVVGTALIKKYPKLESEFVYGDYKVYDVRKMIAKSEQEIGKATAKYFFYSNIMNFFKTEITLANGEIRKRPLIETNGETGEIVWDKGRDFATVRKVLSMPQVNIVKKTEVQTGGFSKESILPKRNSDKLIARKKDWDPKKYGGFDSPTVAYSVLVVAKVEKGKSKKLKSVKELLGITIMERSSFEKNPIDFLEAKGYKEVKKDLIIKLPKYSLFELENGRKRMLASAGELQKGNELALPSKYVNFLYLASHYEKLKGSPEDNEQKQLFVEQHKHYLDEIIEQISEFSKRVILADANLDKVLSAYNKHRDKPIREQAENIIHLFTLTNLGAPAAFKYFDTTIDRKRYTSTKEVLDATLIHQSITGLYETRIDLSQLGGDGGGSSGGGGGLLGRDLLTKLKAQIQFSTEGPQVTWEDRPAMCLVLNLEEEYRLHEKPVPPSIDPSWLQLFPMVWAEKAGMGLANQVPPVVVELKSDASPVAVRQYPMSKEAREGIRPHIQRFLDLGILVPCQSPWNTPLLPVKKPGTNDYRPVQDLREVNKRVQDIHPTVPNPYNLLSSLPPSHTWYSVLDLKDAFFCLKLHPNSQPLFAFEWRDPEKGNTGQLTWTRLPQGFKNSPTLFNEALHRDLASFRALNPQVVMLQYVDDLLVAAPTYRDCKEGTRRLLQELSKLGYRVSAKKAQLCREEVTYLGYLLKGGKRWLTPARKATVMKIPTPTTPRQVREFLGKAGFCRLFIPGFASLAAPLYPLTRPKVPFTWTEAHQEAFGRIKEALLSAPALALPDLTKPFALYVDEKEGVARGVLTQTLGPWRRPVAYLSKKLDPVASGWPTCLKAIAAVALLLKDADKLTLGQNVLVIAPHNLESIVRQPPDRWMTNARMTHYQSLLLNERVSFAPPAILNPATLLPVESDDTPIHICSEILAEETGTRPDLRDQPLPGVPAWYTDGSSFIMDGRRQAGAAIVDNKRTVWASNLPEGTSAQKAELIALTQALRLAEGKSINIYTDSRYAFATAHVHGAIYKQRGWLTSAGKDIKNKEEILALLEAIHLPKRVAIIHCPGHQRGTDPVATGNRKADEAAKQAAQSTRILTETTKNAGKRTADGSEFEKRTADGSEFESPKKKAKVE

SEQ ID NO: 1699 - protein, 2127 aa, synthetic construct
MPAAKRVKLDGGDKKYSIGLDIGTNSVGWAVITDEYKVPSKKFKVLGNTDRHSIKKNLIGALLFDSGETAEATRLKRTARRRYTRRKNRICYLQEIFSNEMAKVDDSFFHRLEESFLVEEDKKHERHPIFGNIVDEVAYHEKYPTIYHLRKKLVDSTDKADLRLIYLALAHMIKFRGHFLIEGDLNPDNSDVDKLFIQLVQTYNQLFEENPINASGVDAKAILSARLSKSRRLENLIAQLPGEKKNGLFGNLIALSLGLTPNFKSNFDLAEDAKLQLSKDTYDDDLDNLLAQIGDQYADLFLAAKNLSDAILLSDILRVNTEITKAPLSASMIKRYDEHHQDLTLLKALVRQQLPEKYKEIFFDQSKNGYAGYIDGGASQEEFYKFIKPILEKMDGTEELLVKLNREDLLRKQRTFDNGSIPHQIHLGELHAILRRQEDFYPFLKDNREKIEKILTFRIPYYVGPLARGNSRFAWMTRKSEETITPWNFEEVVDKGASAQSFIERMTNFDKNLPNEKVLPKHSLLYEYFTVYNELTKVKYVTEGMRKPAFLSGEQKKAIVDLLFKTNRKVTVKQLKEDYFKKIECFDSVEISGVEDRFNASLGTYHDLLKIIKDKDFLDNEENEDILEDIVLTLTLFEDREMIEERLKTYAHLFDDKVMKQLKRRRYTGWGRLSRKLINGIRDKQSGKTILDFLKSDGFANRNFMQLIHDDSLTFKEDIQKAQVSGQGDSLHEHIANLAGSPAIKKGILQTVKVVDELVKVMGRHKPENIVIEMARENQTTQKGQKNSRERMKRIEEGIKELGSQILKEHPVENTQLQNEKLYLYYLQNGRDMYVDQELDINRLSDYDVDHIVPQSFLKDDSIDNKVLTRSDKARGKSDNVPSEEVVKKMKNYWRQLLNAKLITQRKFDNLTKAERGGLSELDKAGFIKRQLVETRQITKHVAQILDSRMNTKYDENDKLIREVKVITLKSKLVSDFRKDFQFYKVREINNYHHAHDAYLNAVVGTALIKKYPKLESEFVYGDYKVYDVRKMIAKSEQEIGKATAKYFFYSNIMNFFKTEITLANGEIRKRPLIETNGETGEIVWDKGRDFATVRKVLSMPQVNIVKKTEVQTGGFSKESILPKRNSDKLIARKKDWDPKKYGGFDSPTVAYSVLVVAKVEKGKSKKLKSVKELLGITIMERSSFEKNPIDFLEAKGYKEVKKDLIIKLPKYSLFELENGRKRMLASAGELQKGNELALPSKYVNFLYLASHYEKLKGSPEDNEQKQLFVEQHKHYLDEIIEQISEFSKRVILADANLDKVLSAYNKHRDKPIREQAENIIHLFTLTNLGAPAAFKYFDTTIDRKRYTSTKEVLDATLIHQSITGLYETRIDLSQLGGDGGPAPEAAAKGSSGGLLGRDLLTKLKAQIQFSTEGPQVTWEDRPAMCLVLNLEEEYRLHEKPVPPSIDPSWLQLFPMVWAEKAGMGLANQVPPVVVELKSDASPVAVRQYPMSKEAREGIRPHIQRFLDLGILVPCQSPWNTPLLPVKKPGTNDYRPVQDLREVNKRVQDIHPTVPNPYNLLSSLPPSHTWYSVLDLKDAFFCLKLHPNSQPLFAFEWRDPEKGNTGQLTWTRLPQGFKNSPTLFNEALHRDLASFRALNPQVVMLQYVDDLLVAAPTYRDCKEGTRRLLQELSKLGYRVSAKKAQLCREEVTYLGYLLKGGKRWLTPARKATVMKIPTPTTPRQVREFLGKAGFCRLFIPGFASLAAPLYPLTRPKVPFTWTEAHQEAFGRIKEALLSAPALALPDLTKPFALYVDEKEGVARGVLTQTLGPWRRPVAYLSKKLDPVASGWPTCLKAIAAVALLLKDADKLTLGQNVLVIAPHNLESIVRQPPDRWMTNARMTHYQSLLLNERVSFAPPAILNPATLLPVESDDTPIHICSEILAEETGTRPDLRDQPLPGVPAWYTDGSSFIMDGRRQAGAAIVDNKRTVWASNLPEGTSAQKAELIALTQALRLAEGKSINIYTDSRYAFATAHVHGAIYKQRGWLTSAGKDIKNKEEILALLEAIHLPKRVAIIHCPGHQRGTDPVATGNRKADEAAKQAAQSTRILTETTKNAGKRTADGSEFEKRTADGSEFESPKKKAKVE

SEQ ID NO: 1700 - protein, 2127 aa, synthetic construct
MPAAKRVKLDGGDKKYSIGLDIGTNSVGWAVITDEYKVPSKKFKVLGNTDRHSIKKNLIGALLFDSGETAEATRLKRTARRRYTRRKNRICYLQEIFSNEMAKVDDSFFHRLEESFLVEEDKKHERHPIFGNIVDEVAYHEKYPTIYHLRKKLVDSTDKADLRLIYLALAHMIKFRGHFLIEGDLNPDNSDVDKLFIQLVQTYNQLFEENPINASGVDAKAILSARLSKSRRLENLIAQLPGEKKNGLFGNLIALSLGLTPNFKSNFDLAEDAKLQLSKDTYDDDLDNLLAQIGDQYADLFLAAKNLSDAILLSDILRVNTEITKAPLSASMIKRYDEHHQDLTLLKALVRQQLPEKYKEIFFDQSKNGYAGYIDGGASQEEFYKFIKPILEKMDGTEELLVKLNREDLLRKQRTFDNGSIPHQIHLGELHAILRRQEDFYPFLKDNREKIEKILTFRIPYYVGPLARGNSRFAWMTRKSEETITPWNFEEVVDKGASAQSFIERMTNFDKNLPNEKVLPKHSLLYEYFTVYNELTKVKYVTEGMRKPAFLSGEQKKAIVDLLFKTNRKVTVKQLKEDYFKKIECFDSVEISGVEDRFNASLGTYHDLLKIIKDKDFLDNEENEDILEDIVLTLTLFEDREMIEERLKTYAHLFDDKVMKQLKRRRYTGWGRLSRKLINGIRDKQSGKTILDFLKSDGFANRNFMQLIHDDSLTFKEDIQKAQVSGQGDSLHEHIANLAGSPAIKKGILQTVKVVDELVKVMGRHKPENIVIEMARENQTTQKGQKNSRERMKRIEEGIKELGSQILKEHPVENTQLQNEKLYLYYLQNGRDMYVDQELDINRLSDYDVDHIVPQSFLKDDSIDNKVLTRSDKARGKSDNVPSEEVVKKMKNYWRQLLNAKLITQRKFDNLTKAERGGLSELDKAGFIKRQLVETRQITKHVAQILDSRMNTKYDENDKLIREVKVITLKSKLVSDFRKDFQFYKVREINNYHHAHDAYLNAVVGTALIKKYPKLESEFVYGDYKVYDVRKMIAKSEQEIGKATAKYFFYSNIMNFFKTEITLANGEIRKRPLIETNGETGEIVWDKGRDFATVRKVLSMPQVNIVKKTEVQTGGFSKESILPKRNSDKLIARKKDWDPKKYGGFDSPTVAYSVLVVAKVEKGKSKKLKSVKELLGITIMERSSFEKNPIDFLEAKGYKEVKKDLIIKLPKYSLFELENGRKRMLASAGELQKGNELALPSKYVNFLYLASHYEKLKGSPEDNEQKQLFVEQHKHYLDEIIEQISEFSKRVILADANLDKVLSAYNKHRDKPIREQAENIIHLFTLTNLGAPAAFKYFDTTIDRKRYTSTKEVLDATLIHQSITGLYETRIDLSQLGGDGGEAAAKGSSGGGGGLLGRDLLTKLKAQIQFSTEGPQVTWEDRPAMCLVLNLEEEYRLHEKPVPPSIDPSWLQLFPMVWAEKAGMGLANQVPPVVVELKSDASPVAVRQYPMSKEAREGIRPHIQRFLDLGILVPCQSPWNTPLLPVKKPGTNDYRPVQDLREVNKRVQDIHPTVPNPYNLLSSLPPSHTWYSVLDLKDAFFCLKLHPNSQPLFAFEWRDPEKGNTGQLTWTRLPQGFKNSPTLFNEALHRDLASFRALNPQVVMLQYVDDLLVAAPTYRDCKEGTRRLLQELSKLGYRVSAKKAQLCREEVTYLGYLLKGGKRWLTPARKATVMKIPTPTTPRQVREFLGKAGFCRLFIPGFASLAAPLYPLTRPKVPFTWTEAHQEAFGRIKEALLSAPALALPDLTKPFALYVDEKEGVARGVLTQTLGPWRRPVAYLSKKLDPVASGWPTCLKAIAAVALLLKDADKLTLGQNVLVIAPHNLESIVRQPPDRWMTNARMTHYQSLLLNERVSFAPPAILNPATLLPVESDDTPIHICSEILAEETGTRPDLRDQPLPGVPAWYTDGSSFIMDGRRQAGAAIVDNKRTVWASNLPEGTSAQKAELIALTQALRLAEGKSINIYTDSRYAFATAHVHGAIYKQRGWLTSAGKDIKNKEEILALLEAIHLPKRVAIIHCPGHQRGTDPVATGNRKADEAAKQAAQSTRILTETTKNAGKRTADGSEFEKRTADGSEFESPKKKAKVE

SEQ ID NO: 1701 - protein, 2129 aa, synthetic construct
MPAAKRVKLDGGDKKYSIGLDIGTNSVGWAVITDEYKVPSKKFKVLGNTDRHSIKKNLIGALLFDSGETAEATRLKRTARRRYTRRKNRICYLQEIFSNEMAKVDDSFFHRLEESFLVEEDKKHERHPIFGNIVDEVAYHEKYPTIYHLRKKLVDSTDKADLRLIYLALAHMIKFRGHFLIEGDLNPDNSDVDKLFIQLVQTYNQLFEENPINASGVDAKAILSARLSKSRRLENLIAQLPGEKKNGLFGNLIALSLGLTPNFKSNFDLAEDAKLQLSKDTYDDDLDNLLAQIGDQYADLFLAAKNLSDAILLSDILRVNTEITKAPLSASMIKRYDEHHQDLTLLKALVRQQLPEKYKEIFFDQSKNGYAGYIDGGASQEEFYKFIKPILEKMDGTEELLVKLNREDLLRKQRTFDNGSIPHQIHLGELHAILRRQEDFYPFLKDNREKIEKILTFRIPYYVGPLARGNSRFAWMTRKSEETITPWNFEEVVDKGASAQSFIERMTNFDKNLPNEKVLPKHSLLYEYFTVYNELTKVKYVTEGMRKPAFLSGEQKKAIVDLLFKTNRKVTVKQLKEDYFKKIECFDSVEISGVEDRFNASLGTYHDLLKIIKDKDFLDNEENEDILEDIVLTLTLFEDREMIEERLKTYAHLFDDKVMKQLKRRRYTGWGRLSRKLINGIRDKQSGKTILDFLKSDGFANRNFMQLIHDDSLTFKEDIQKAQVSGQGDSLHEHIANLAGSPAIKKGILQTVKVVDELVKVMGRHKPENIVIEMARENQTTQKGQKNSRERMKRIEEGIKELGSQILKEHPVENTQLQNEKLYLYYLQNGRDMYVDQELDINRLSDYDVDHIVPQSFLKDDSIDNKVLTRSDKARGKSDNVPSEEVVKKMKNYWRQLLNAKLITQRKFDNLTKAERGGLSELDKAGFIKRQLVETRQITKHVAQILDSRMNTKYDENDKLIREVKVITLKSKLVSDFRKDFQFYKVREINNYHHAHDAYLNAVVGTALIKKYPKLESEFVYGDYKVYDVRKMIAKSEQEIGKATAKYFFYSNIMNFFKTEITLANGEIRKRPLIETNGETGEIVWDKGRDFATVRKVLSMPQVNIVKKTEVQTGGFSKESILPKRNSDKLIARKKDWDPKKYGGFDSPTVAYSVLVVAKVEKGKSKKLKSVKELLGITIMERSSFEKNPIDFLEAKGYKEVKKDLIIKLPKYSLFELENGRKRMLASAGELQKGNELALPSKYVNFLYLASHYEKLKGSPEDNEQKQLFVEQHKHYLDEIIEQISEFSKRVILADANLDKVLSAYNKHRDKPIREQAENIIHLFTLTNLGAPAAFKYFDTTIDRKRYTSTKEVLDATLIHQSITGLYETRIDLSQLGGDGGPAPAPAPAPAPAPGGLLGRDLLTKLKAQIQFSTEGPQVTWEDRPAMCLVLNLEEEYRLHEKPVPPSIDPSWLQLFPMVWAEKAGMGLANQVPPVVVELKSDASPVAVRQYPMSKEAREGIRPHIQRFLDLGILVPCQSPWNTPLLPVKKPGTNDYRPVQDLREVNKRVQDIHPTVPNPYNLLSSLPPSHTWYSVLDLKDAFFCLKLHPNSQPLFAFEWRDPEKGNTGQLTWTRLPQGFKNSPTLFNEALHRDLASFRALNPQVVMLQYVDDLLVAAPTYRDCKEGTRRLLQELSKLGYRVSAKKAQLCREEVTYLGYLLKGGKRWLTPARKATVMKIPTPTTPRQVREFLGKAGFCRLFIPGFASLAAPLYPLTRPKVPFTWTEAHQEAFGRIKEALLSAPALALPDLTKPFALYVDEKEGVARGVLTQTLGPWRRPVAYLSKKLDPVASGWPTCLKAIAAVALLLKDADKLTLGQNVLVIAPHNLESIVRQPPDRWMTNARMTHYQSLLLNERVSFAPPAILNPATLLPVESDDTPIHICSEILAEETGTRPDLRDQPLPGVPAWYTDGSSFIMDGRRQAGAAIVDNKRTVWASNLPEGTSAQKAELIALTQALRLAEGKSINIYTDSRYAFATAHVHGAIYKQRGWLTSAGKDIKNKEEILALLEAIHLPKRVAIIHCPGHQRGTDPVATGNRKADEAAKQAAQSTRILTETTKNAGKRTADGSEFEKRTADGSEFESPKKKAKVE

SEQ ID NO: 1702 - protein, 2127 aa, synthetic construct
MPAAKRVKLDGGDKKYSIGLDIGTNSVGWAVITDEYKVPSKKFKVLGNTDRHSIKKNLIGALLFDSGETAEATRLKRTARRRYTRRKNRICYLQEIFSNEMAKVDDSFFHRLEESFLVEEDKKHERHPIFGNIVDEVAYHEKYPTIYHLRKKLVDSTDKADLRLIYLALAHMIKFRGHFLIEGDLNPDNSDVDKLFIQLVQTYNQLFEENPINASGVDAKAILSARLSKSRRLENLIAQLPGEKKNGLFGNLIALSLGLTPNFKSNFDLAEDAKLQLSKDTYDDDLDNLLAQIGDQYADLFLAAKNLSDAILLSDILRVNTEITKAPLSASMIKRYDEHHQDLTLLKALVRQQLPEKYKEIFFDQSKNGYAGYIDGGASQEEFYKFIKPILEKMDGTEELLVKLNREDLLRKQRTFDNGSIPHQIHLGELHAILRRQEDFYPFLKDNREKIEKILTFRIPYYVGPLARGNSRFAWMTRKSEETITPWNFEEVVDKGASAQSFIERMTNFDKNLPNEKVLPKHSLLYEYFTVYNELTKVKYVTEGMRKPAFLSGEQKKAIVDLLFKTNRKVTVKQLKEDYFKKIECFDSVEISGVEDRFNASLGTYHDLLKIIKDKDFLDNEENEDILEDIVLTLTLFEDREMIEERLKTYAHLFDDKVMKQLKRRRYTGWGRLSRKLINGIRDKQSGKTILDFLKSDGFANRNFMQLIHDDSLTFKEDIQKAQVSGQGDSLHEHIANLAGSPAIKKGILQTVKVVDELVKVMGRHKPENIVIEMARENQTTQKGQKNSRERMKRIEEGIKELGSQILKEHPVENTQLQNEKLYLYYLQNGRDMYVDQELDINRLSDYDVDHIVPQSFLKDDSIDNKVLTRSDKARGKSDNVPSEEVVKKMKNYWRQLLNAKLITQRKFDNLTKAERGGLSELDKAGFIKRQLVETRQITKHVAQILDSRMNTKYDENDKLIREVKVITLKSKLVSDFRKDFQFYKVREINNYHHAHDAYLNAVVGTALIKKYPKLESEFVYGDYKVYDVRKMIAKSEQEIGKATAKYFFYSNIMNFFKTEITLANGEIRKRPLIETNGETGEIVWDKGRDFATVRKVLSMPQVNIVKKTEVQTGGFSKESILPKRNSDKLIARKKDWDPKKYGGFDSPTVAYSVLVVAKVEKGKSKKLKSVKELLGITIMERSSFEKNPIDFLEAKGYKEVKKDLIIKLPKYSLFELENGRKRMLASAGELQKGNELALPSKYVNFLYLASHYEKLKGSPEDNEQKQLFVEQHKHYLDEIIEQISEFSKRVILADANLDKVLSAYNKHRDKPIREQAENIIHLFTLTNLGAPAAFKYFDTTIDRKRYTSTKEVLDATLIHQSITGLYETRIDLSQLGGDGGGGGEAAAKGGSGGLLGRDLLTKLKAQIQFSTEGPQVTWEDRPAMCLVLNLEEEYRLHEKPVPPSIDPSWLQLFPMVWAEKAGMGLANQVPPVVVELKSDASPVAVRQYPMSKEAREGIRPHIQRFLDLGILVPCQSPWNTPLLPVKKPGTNDYRPVQDLREVNKRVQDIHPTVPNPYNLLSSLPPSHTWYSVLDLKDAFFCLKLHPNSQPLFAFEWRDPEKGNTGQLTWTRLPQGFKNSPTLFNEALHRDLASFRALNPQVVMLQYVDDLLVAAPTYRDCKEGTRRLLQELSKLGYRVSAKKAQLCREEVTYLGYLLKGGKRWLTPARKATVMKIPTPTTPRQVREFLGKAGFCRLFIPGFASLAAPLYPLTRPKVPFTWTEAHQEAFGRIKEALLSAPALALPDLTKPFALYVDEKEGVARGVLTQTLGPWRRPVAYLSKKLDPVASGWPTCLKAIAAVALLLKDADKLTLGQNVLVIAPHNLESIVRQPPDRWMTNARMTHYQSLLLNERVSFAPPAILNPATLLPVESDDTPIHICSEILAEETGTRPDLRDQPLPGVPAWYTDGSSFIMDGRRQAGAAIVDNKRTVWASNLPEGTSAQKAELIALTQALRLAEGKSINIYTDSRYAFATAHVHGAIYKQRGWLTSAGKDIKNKEEILALLEAIHLPKRVAIIHCPGHQRGTDPVATGNRKADEAAKQAAQSTRILTETTKNAGKRTADGSEFEKRTADGSEFESPKKKAKVE

SEQ ID NO: 1703 - protein, 2122 aa, synthetic construct
MPAAKRVKLDGGDKKYSIGLDIGTNSVGWAVITDEYKVPSKKFKVLGNTDRHSIKKNLIGALLFDSGETAEATRLKRTARRRYTRRKNRICYLQEIFSNEMAKVDDSFFHRLEESFLVEEDKKHERHPIFGNIVDEVAYHEKYPTIYHLRKKLVDSTDKADLRLIYLALAHMIKFRGHFLIEGDLNPDNSDVDKLFIQLVQTYNQLFEENPINASGVDAKAILSARLSKSRRLENLIAQLPGEKKNGLFGNLIALSLGLTPNFKSNFDLAEDAKLQLSKDTYDDDLDNLLAQIGDQYADLFLAAKNLSDAILLSDILRVNTEITKAPLSASMIKRYDEHHQDLTLLKALVRQQLPEKYKEIFFDQSKNGYAGYIDGGASQEEFYKFIKPILEKMDGTEELLVKLNREDLLRKQRTFDNGSIPHQIHLGELHAILRRQEDFYPFLKDNREKIEKILTFRIPYYVGPLARGNSRFAWMTRKSEETITPWNFEEVVDKGASAQSFIERMTNFDKNLPNEKVLPKHSLLYEYFTVYNELTKVKYVTEGMRKPAFLSGEQKKAIVDLLFKTNRKVTVKQLKEDYFKKIECFDSVEISGVEDRFNASLGTYHDLLKIIKDKDFLDNEENEDILEDIVLTLTLFEDREMIEERLKTYAHLFDDKVMKQLKRRRYTGWGRLSRKLINGIRDKQSGKTILDFLKSDGFANRNFMQLIHDDSLTFKEDIQKAQVSGQGDSLHEHIANLAGSPAIKKGILQTVKVVDELVKVMGRHKPENIVIEMARENQTTQKGQKNSRERMKRIEEGIKELGSQILKEHPVENTQLQNEKLYLYYLQNGRDMYVDQELDINRLSDYDVDHIVPQSFLKDDSIDNKVLTRSDKARGKSDNVPSEEVVKKMKNYWRQLLNAKLITQRKFDNLTKAERGGLSELDKAGFIKRQLVETRQITKHVAQILDSRMNTKYDENDKLIREVKVITLKSKLVSDFRKDFQFYKVREINNYHHAHDAYLNAVVGTALIKKYPKLESEFVYGDYKVYDVRKMIAKSEQEIGKATAKYFFYSNIMNFFKTEITLANGEIRKRPLIETNGETGEIVWDKGRDFATVRKVLSMPQVNIVKKTEVQTGGFSKESILPKRNSDKLIARKKDWDPKKYGGFDSPTVAYSVLVVAKVEKGKSKKLKSVKELLGITIMERSSFEKNPIDFLEAKGYKEVKKDLIIKLPKYSLFELENGRKRMLASAGELQKGNELALPSKYVNFLYLASHYEKLKGSPEDNEQKQLFVEQHKHYLDEIIEQISEFSKRVILADANLDKVLSAYNKHRDKPIREQAENIIHLFTLTNLGAPAAFKYFDTTIDRKRYTSTKEVLDATLIHQSITGLYETRIDLSQLGGDGGGGSPAPGGLLGRDLLTKLKAQIQFSTEGPQVTWEDRPAMCLVLNLEEEYRLHEKPVPPSIDPSWLQLFPMVWAEKAGMGLANQVPPVVVELKSDASPVAVRQYPMSKEAREGIRPHIQRFLDLGILVPCQSPWNTPLLPVKKPGTNDYRPVQDLREVNKRVQDIHPTVPNPYNLLSSLPPSHTWYSVLDLKDAFFCLKLHPNSQPLFAFEWRDPEKGNTGQLTWTRLPQGFKNSPTLFNEALHRDLASFRALNPQVVMLQYVDDLLVAAPTYRDCKEGTRRLLQELSKLGYRVSAKKAQLCREEVTYLGYLLKGGKRWLTPARKATVMKIPTPTTPRQVREFLGKAGFCRLFIPGFASLAAPLYPLTRPKVPFTWTEAHQEAFGRIKEALLSAPALALPDLTKPFALYVDEKEGVARGVLTQTLGPWRRPVAYLSKKLDPVASGWPTCLKAIAAVALLLKDADKLTLGQNVLVIAPHNLESIVRQPPDRWMTNARMTHYQSLLLNERVSFAPPAILNPATLLPVESDDTPIHICSEILAEETGTRPDLRDQPLPGVPAWYTDGSSFIMDGRRQAGAAIVDNKRTVWASNLPEGTSAQKAELIALTQALRLAEGKSINIYTDSRYAFATAHVHGAIYKQRGWLTSAGKDIKNKEEILALLEAIHLPKRVAIIHCPGHQRGTDPVATGNRKADEAAKQAAQSTRILTETTKNAGKRTADGSEFEKRTADGSEFESPKKKAKVE

SEQ ID NO: 1704 - protein, 2127 aa, synthetic construct
MPAAKRVKLDGGDKKYSIGLDIGTNSVGWAVITDEYKVPSKKFKVLGNTDRHSIKKNLIGALLFDSGETAEATRLKRTARRRYTRRKNRICYLQEIFSNEMAKVDDSFFHRLEESFLVEEDKKHERHPIFGNIVDEVAYHEKYPTIYHLRKKLVDSTDKADLRLIYLALAHMIKFRGHFLIEGDLNPDNSDVDKLFIQLVQTYNQLFEENPINASGVDAKAILSARLSKSRRLENLIAQLPGEKKNGLFGNLIALSLGLTPNFKSNFDLAEDAKLQLSKDTYDDDLDNLLAQIGDQYADLFLAAKNLSDAILLSDILRVNTEITKAPLSASMIKRYDEHHQDLTLLKALVRQQLPEKYKEIFFDQSKNGYAGYIDGGASQEEFYKFIKPILEKMDGTEELLVKLNREDLLRKQRTFDNGSIPHQIHLGELHAILRRQEDFYPFLKDNREKIEKILTFRIPYYVGPLARGNSRFAWMTRKSEETITPWNFEEVVDKGASAQSFIERMTNFDKNLPNEKVLPKHSLLYEYFTVYNELTKVKYVTEGMRKPAFLSGEQKKAIVDLLFKTNRKVTVKQLKEDYFKKIECFDSVEISGVEDRFNASLGTYHDLLKIIKDKDFLDNEENEDILEDIVLTLTLFEDREMIEERLKTYAHLFDDKVMKQLKRRRYTGWGRLSRKLINGIRDKQSGKTILDFLKSDGFANRNFMQLIHDDSLTFKEDIQKAQVSGQGDSLHEHIANLAGSPAIKKGILQTVKVVDELVKVMGRHKPENIVIEMARENQTTQKGQKNSRERMKRIEEGIKELGSQILKEHPVENTQLQNEKLYLYYLQNGRDMYVDQELDINRLSDYDVDHIVPQSFLKDDSIDNKVLTRSDKARGKSDNVPSEEVVKKMKNYWRQLLNAKLITQRKFDNLTKAERGGLSELDKAGFIKRQLVETRQITKHVAQILDSRMNTKYDENDKLIREVKVITLKSKLVSDFRKDFQFYKVREINNYHHAHDAYLNAVVGTALIKKYPKLESEFVYGDYKVYDVRKMIAKSEQEIGKATAKYFFYSNIMNFFKTEITLANGEIRKRPLIETNGETGEIVWDKGRDFATVRKVLSMPQVNIVKKTEVQTGGFSKESILPKRNSDKLIARKKDWDPKKYGGFDSPTVAYSVLVVAKVEKGKSKKLKSVKELLGITIMERSSFEKNPIDFLEAKGYKEVKKDLIIKLPKYSLFELENGRKRMLASAGELQKGNELALPSKYVNFLYLASHYEKLKGSPEDNEQKQLFVEQHKHYLDEIIEQISEFSKRVILADANLDKVLSAYNKHRDKPIREQAENIIHLFTLTNLGAPAAFKYFDTTIDRKRYTSTKEVLDATLIHQSITGLYETRIDLSQLGGDGGGGSEAAAKPAPGGLLGRDLLTKLKAQIQFSTEGPQVTWEDRPAMCLVLNLEEEYRLHEKPVPPSIDPSWLQLFPMVWAEKAGMGLANQVPPVVVELKSDASPVAVRQYPMSKEAREGIRPHIQRFLDLGILVPCQSPWNTPLLPVKKPGTNDYRPVQDLREVNKRVQDIHPTVPNPYNLLSSLPPSHTWYSVLDLKDAFFCLKLHPNSQPLFAFEWRDPEKGNTGQLTWTRLPQGFKNSPTLFNEALHRDLASFRALNPQVVMLQYVDDLLVAAPTYRDCKEGTRRLLQELSKLGYRVSAKKAQLCREEVTYLGYLLKGGKRWLTPARKATVMKIPTPTTPRQVREFLGKAGFCRLFIPGFASLAAPLYPLTRPKVPFTWTEAHQEAFGRIKEALLSAPALALPDLTKPFALYVDEKEGVARGVLTQTLGPWRRPVAYLSKKLDPVASGWPTCLKAIAAVALLLKDADKLTLGQNVLVIAPHNLESIVRQPPDRWMTNARMTHYQSLLLNERVSFAPPAILNPATLLPVESDDTPIHICSEILAEETGTRPDLRDQPLPGVPAWYTDGSSFIMDGRRQAGAAIVDNKRTVWASNLPEGTSAQKAELIALTQALRLAEGKSINIYTDSRYAFATAHVHGAIYKQRGWLTSAGKDIKNKEEILALLEAIHLPKRVAIIHCPGHQRGTDPVATGNRKADEAAKQAAQSTRILTETTKNAGKRTADGSEFEKRTADGSEFESPKKKAKVE

SEQ ID NO: 1705 - protein, 2121 aa, synthetic construct
MPAAKRVKLDGGDKKYSIGLDIGTNSVGWAVITDEYKVPSKKFKVLGNTDRHSIKKNLIGALLFDSGETAEATRLKRTARRRYTRRKNRICYLQEIFSNEMAKVDDSFFHRLEESFLVEEDKKHERHPIFGNIVDEVAYHEKYPTIYHLRKKLVDSTDKADLRLIYLALAHMIKFRGHFLIEGDLNPDNSDVDKLFIQLVQTYNQLFEENPINASGVDAKAILSARLSKSRRLENLIAQLPGEKKNGLFGNLIALSLGLTPNFKSNFDLAEDAKLQLSKDTYDDDLDNLLAQIGDQYADLFLAAKNLSDAILLSDILRVNTEITKAPLSASMIKRYDEHHQDLTLLKALVRQQLPEKYKEIFFDQSKNGYAGYIDGGASQEEFYKFIKPILEKMDGTEELLVKLNREDLLRKQRTFDNGSIPHQIHLGELHAILRRQEDFYPFLKDNREKIEKILTFRIPYYVGPLARGNSRFAWMTRKSEETITPWNFEEVVDKGASAQSFIERMTNFDKNLPNEKVLPKHSLLYEYFTVYNELTKVKYVTEGMRKPAFLSGEQKKAIVDLLFKTNRKVTVKQLKEDYFKKIECFDSVEISGVEDRFNASLGTYHDLLKIIKDKDFLDNEENEDILEDIVLTLTLFEDREMIEERLKTYAHLFDDKVMKQLKRRRYTGWGRLSRKLINGIRDKQSGKTILDFLKSDGFANRNFMQLIHDDSLTFKEDIQKAQVSGQGDSLHEHIANLAGSPAIKKGILQTVKVVDELVKVMGRHKPENIVIEMARENQTTQKGQKNSRERMKRIEEGIKELGSQILKEHPVENTQLQNEKLYLYYLQNGRDMYVDQELDINRLSDYDVDHIVPQSFLKDDSIDNKVLTRSDKARGKSDNVPSEEVVKKMKNYWRQLLNAKLITQRKFDNLTKAERGGLSELDKAGFIKRQLVETRQITKHVAQILDSRMNTKYDENDKLIREVKVITLKSKLVSDFRKDFQFYKVREINNYHHAHDAYLNAVVGTALIKKYPKLESEFVYGDYKVYDVRKMIAKSEQEIGKATAKYFFYSNIMNFFKTEITLANGEIRKRPLIETNGETGEIVWDKGRDFATVRKVLSMPQVNIVKKTEVQTGGFSKESILPKRNSDKLIARKKDWDPKKYGGFDSPTVAYSVLVVAKVEKGKSKKLKSVKELLGITIMERSSFEKNPIDFLEAKGYKEVKKDLIIKLPKYSLFELENGRKRMLASAGELQKGNELALPSKYVNFLYLASHYEKLKGSPEDNEQKQLFVEQHKHYLDEIIEQISEFSKRVILADANLDKVLSAYNKHRDKPIREQAENIIHLFTLTNLGAPAAFKYFDTTIDRKRYTSTKEVLDATLIHQSITGLYETRIDLSQLGGDGGGGGGSGGLLGRDLLTKLKAQIQFSTEGPQVTWEDRPAMCLVLNLEEEYRLHEKPVPPSIDPSWLQLFPMVWAEKAGMGLANQVPPVVVELKSDASPVAVRQYPMSKEAREGIRPHIQRFLDLGILVPCQSPWNTPLLPVKKPGTNDYRPVQDLREVNKRVQDIHPTVPNPYNLLSSLPPSHTWYSVLDLKDAFFCLKLHPNSQPLFAFEWRDPEKGNTGQLTWTRLPQGFKNSPTLFNEALHRDLASFRALNPQVVMLQYVDDLLVAAPTYRDCKEGTRRLLQELSKLGYRVSAKKAQLCREEVTYLGYLLKGGKRWLTPARKATVMKIPTPTTPRQVREFLGKAGFCRLFIPGFASLAAPLYPLTRPKVPFTWTEAHQEAFGRIKEALLSAPALALPDLTKPFALYVDEKEGVARGVLTQTLGPWRRPVAYLSKKLDPVASGWPTCLKAIAAVALLLKDADKLTLGQNVLVIAPHNLESIVRQPPDRWMTNARMTHYQSLLLNERVSFAPPAILNPATLLPVESDDTPIHICSEILAEETGTRPDLRDQPLPGVPAWYTDGSSFIMDGRRQAGAAIVDNKRTVWASNLPEGTSAQKAELIALTQALRLAEGKSINIYTDSRYAFATAHVHGAIYKQRGWLTSAGKDIKNKEEILALLEAIHLPKRVAIIHCPGHQRGTDPVATGNRKADEAAKQAAQSTRILTETTKNAGKRTADGSEFEKRTADGSEFESPKKKAKVE

SEQ ID NO: 1706 - protein, 2146 aa, synthetic construct
MPAAKRVKLDGGDKKYSIGLDIGTNSVGWAVITDEYKVPSKKFKVLGNTDRHSIKKNLIGALLFDSGETAEATRLKRTARRRYTRRKNRICYLQEIFSNEMAKVDDSFFHRLEESFLVEEDKKHERHPIFGNIVDEVAYHEKYPTIYHLRKKLVDSTDKADLRLIYLALAHMIKFRGHFLIEGDLNPDNSDVDKLFIQLVQTYNQLFEENPINASGVDAKAILSARLSKSRRLENLIAQLPGEKKNGLFGNLIALSLGLTPNFKSNFDLAEDAKLQLSKDTYDDDLDNLLAQIGDQYADLFLAAKNLSDAILLSDILRVNTEITKAPLSASMIKRYDEHHQDLTLLKALVRQQLPEKYKEIFFDQSKNGYAGYIDGGASQEEFYKFIKPILEKMDGTEELLVKLNREDLLRKQRTFDNGSIPHQIHLGELHAILRRQEDFYPFLKDNREKIEKILTFRIPYYVGPLARGNSRFAWMTRKSEETITPWNFEEVVDKGASAQSFIERMTNFDKNLPNEKVLPKHSLLYEYFTVYNELTKVKYVTEGMRKPAFLSGEQKKAIVDLLFKTNRKVTVKQLKEDYFKKIECFDSVEISGVEDRFNASLGTYHDLLKIIKDKDFLDNEENEDILEDIVLTLTLFEDREMIEERLKTYAHLFDDKVMKQLKRRRYTGWGRLSRKLINGIRDKQSGKTILDFLKSDGFANRNFMQLIHDDSLTFKEDIQKAQVSGQGDSLHEHIANLAGSPAIKKGILQTVKVVDELVKVMGRHKPENIVIEMARENQTTQKGQKNSRERMKRIEEGIKELGSQILKEHPVENTQLQNEKLYLYYLQNGRDMYVDQELDINRLSDYDVDHIVPQSFLKDDSIDNKVLTRSDKARGKSDNVPSEEVVKKMKNYWRQLLNAKLITQRKFDNLTKAERGGLSELDKAGFIKRQLVETRQITKHVAQILDSRMNTKYDENDKLIREVKVITLKSKLVSDFRKDFQFYKVREINNYHHAHDAYLNAVVGTALIKKYPKLESEFVYGDYKVYDVRKMIAKSEQEIGKATAKYFFYSNIMNFFKTEITLANGEIRKRPLIETNGETGEIVWDKGRDFATVRKVLSMPQVNIVKKTEVQTGGFSKESILPKRNSDKLIARKKDWDPKKYGGFDSPTVAYSVLVVAKVEKGKSKKLKSVKELLGITIMERSSFEKNPIDFLEAKGYKEVKKDLIIKLPKYSLFELENGRKRMLASAGELQKGNELALPSKYVNFLYLASHYEKLKGSPEDNEQKQLFVEQHKHYLDEIIEQISEFSKRVILADANLDKVLSAYNKHRDKPIREQAENIIHLFTLTNLGAPAAFKYFDTTIDRKRYTSTKEVLDATLIHQSITGLYETRIDLSQLGGDGGEAAAKEAAAKEAAAKEAAAKEAAAKEAAAKGGLLGRDLLTKLKAQIQFSTEGPQVTWEDRPAMCLVLNLEEEYRLHEKPVPPSIDPSWLQLFPMVWAEKAGMGLANQVPPVVVELKSDASPVAVRQYPMSKEAREGIRPHIQRFLDLGILVPCQSPWNTPLLPVKKPGTNDYRPVQDLREVNKRVQDIHPTVPNPYNLLSSLPPSHTWYSVLDLKDAFFCLKLHPNSQPLFAFEWRDPEKGNTGQLTWTRLPQGFKNSPTLFNEALHRDLASFRALNPQVVMLQYVDDLLVAAPTYRDCKEGTRRLLQELSKLGYRVSAKKAQLCREEVTYLGYLLKGGKRWLTPARKATVMKIPTPTTPRQVREFLGKAGFCRLFIPGFASLAAPLYPLTRPKVPFTWTEAHQEAFGRIKEALLSAPALALPDLTKPFALYVDEKEGVARGVLTQTLGPWRRPVAYLSKKLDPVASGWPTCLKAIAAVALLLKDADKLTLGQNVLVIAPHNLESIVRQPPDRWMTNARMTHYQSLLLNERVSFAPPAILNPATLLPVESDDTPIHICSEILAEETGTRPDLRDQPLPGVPAWYTDGSSFIMDGRRQAGAAIVDNKRTVWASNLPEGTSAQKAELIALTQALRLAEGKSINIYTDSRYAFATAHVHGAIYKQRGWLTSAGKDIKNKEEILALLEAIHLPKRVAIIHCPGHQRGTDPVATGNRKADEAAKQAAQSTRILTETTKNAGKRTADGSEFEKRTADGSEFESPKKKAKVE

SEQ ID NO: 1707 - protein, 2122 aa, synthetic construct
MPAAKRVKLDGGDKKYSIGLDIGTNSVGWAVITDEYKVPSKKFKVLGNTDRHSIKKNLIGALLFDSGETAEATRLKRTARRRYTRRKNRICYLQEIFSNEMAKVDDSFFHRLEESFLVEEDKKHERHPIFGNIVDEVAYHEKYPTIYHLRKKLVDSTDKADLRLIYLALAHMIKFRGHFLIEGDLNPDNSDVDKLFIQLVQTYNQLFEENPINASGVDAKAILSARLSKSRRLENLIAQLPGEKKNGLFGNLIALSLGLTPNFKSNFDLAEDAKLQLSKDTYDDDLDNLLAQIGDQYADLFLAAKNLSDAILLSDILRVNTEITKAPLSASMIKRYDEHHQDLTLLKALVRQQLPEKYKEIFFDQSKNGYAGYIDGGASQEEFYKFIKPILEKMDGTEELLVKLNREDLLRKQRTFDNGSIPHQIHLGELHAILRRQEDFYPFLKDNREKIEKILTFRIPYYVGPLARGNSRFAWMTRKSEETITPWNFEEVVDKGASAQSFIERMTNFDKNLPNEKVLPKHSLLYEYFTVYNELTKVKYVTEGMRKPAFLSGEQKKAIVDLLFKTNRKVTVKQLKEDYFKKIECFDSVEISGVEDRFNASLGTYHDLLKIIKDKDFLDNEENEDILEDIVLTLTLFEDREMIEERLKTYAHLFDDKVMKQLKRRRYTGWGRLSRKLINGIRDKQSGKTILDFLKSDGFANRNFMQLIHDDSLTFKEDIQKAQVSGQGDSLHEHIANLAGSPAIKKGILQTVKVVDELVKVMGRHKPENIVIEMARENQTTQKGQKNSRERMKRIEEGIKELGSQILKEHPVENTQLQNEKLYLYYLQNGRDMYVDQELDINRLSDYDVDHIVPQSFLKDDSIDNKVLTRSDKARGKSDNVPSEEVVKKMKNYWRQLLNAKLITQRKFDNLTKAERGGLSELDKAGFIKRQLVETRQITKHVAQILDSRMNTKYDENDKLIREVKVITLKSKLVSDFRKDFQFYKVREINNYHHAHDAYLNAVVGTALIKKYPKLESEFVYGDYKVYDVRKMIAKSEQEIGKATAKYFFYSNIMNFFKTEITLANGEIRKRPLIETNGETGEIVWDKGRDFATVRKVLSMPQVNIVKKTEVQTGGFSKESILPKRNSDKLIARKKDWDPKKYGGFDSPTVAYSVLVVAKVEKGKSKKLKSVKELLGITIMERSSFEKNPIDFLEAKGYKEVKKDLIIKLPKYSLFELENGRKRMLASAGELQKGNELALPSKYVNFLYLASHYEKLKGSPEDNEQKQLFVEQHKHYLDEIIEQISEFSKRVILADANLDKVLSAYNKHRDKPIREQAENIIHLFTLTNLGAPAAFKYFDTTIDRKRYTSTKEVLDATLIHQSITGLYETRIDLSQLGGDGGGGGGGGGGLLGRDLLTKLKAQIQFSTEGPQVTWEDRPAMCLVLNLEEEYRLHEKPVPPSIDPSWLQLFPMVWAEKAGMGLANQVPPVVVELKSDASPVAVRQYPMSKEAREGIRPHIQRFLDLGILVPCQSPWNTPLLPVKKPGTNDYRPVQDLREVNKRVQDIHPTVPNPYNLLSSLPPSHTWYSVLDLKDAFFCLKLHPNSQPLFAFEWRDPEKGNTGQLTWTRLPQGFKNSPTLFNEALHRDLASFRALNPQVVMLQYVDDLLVAAPTYRDCKEGTRRLLQELSKLGYRVSAKKAQLCREEVTYLGYLLKGGKRWLTPARKATVMKIPTPTTPRQVREFLGKAGFCRLFIPGFASLAAPLYPLTRPKVPFTWTEAHQEAFGRIKEALLSAPALALPDLTKPFALYVDEKEGVARGVLTQTLGPWRRPVAYLSKKLDPVASGWPTCLKAIAAVALLLKDADKLTLGQNVLVIAPHNLESIVRQPPDRWMTNARMTHYQSLLLNERVSFAPPAILNPATLLPVESDDTPIHICSEILAEETGTRPDLRDQPLPGVPAWYTDGSSFIMDGRRQAGAAIVDNKRTVWASNLPEGTSAQKAELIALTQALRLAEGKSINIYTDSRYAFATAHVHGAIYKQRGWLTSAGKDIKNKEEILALLEAIHLPKRVAIIHCPGHQRGTDPVATGNRKADEAAKQAAQSTRILTETTKNAGKRTADGSEFEKRTADGSEFESPKKKAKVE

SEQ ID NO: 1708 - protein, 2127 aa, synthetic construct
MPAAKRVKLDGGDKKYSIGLDIGTNSVGWAVITDEYKVPSKKFKVLGNTDRHSIKKNLIGALLFDSGETAEATRLKRTARRRYTRRKNRICYLQEIFSNEMAKVDDSFFHRLEESFLVEEDKKHERHPIFGNIVDEVAYHEKYPTIYHLRKKLVDSTDKADLRLIYLALAHMIKFRGHFLIEGDLNPDNSDVDKLFIQLVQTYNQLFEENPINASGVDAKAILSARLSKSRRLENLIAQLPGEKKNGLFGNLIALSLGLTPNFKSNFDLAEDAKLQLSKDTYDDDLDNLLAQIGDQYADLFLAAKNLSDAILLSDILRVNTEITKAPLSASMIKRYDEHHQDLTLLKALVRQQLPEKYKEIFFDQSKNGYAGYIDGGASQEEFYKFIKPILEKMDGTEELLVKLNREDLLRKQRTFDNGSIPHQIHLGELHAILRRQEDFYPFLKDNREKIEKILTFRIPYYVGPLARGNSRFAWMTRKSEETITPWNFEEVVDKGASAQSFIERMTNFDKNLPNEKVLPKHSLLYEYFTVYNELTKVKYVTEGMRKPAFLSGEQKKAIVDLLFKTNRKVTVKQLKEDYFKKIECFDSVEISGVEDRFNASLGTYHDLLKIIKDKDFLDNEENEDILEDIVLTLTLFEDREMIEERLKTYAHLFDDKVMKQLKRRRYTGWGRLSRKLINGIRDKQSGKTILDFLKSDGFANRNFMQLIHDDSLTFKEDIQKAQVSGQGDSLHEHIANLAGSPAIKKGILQTVKVVDELVKVMGRHKPENIVIEMARENQTTQKGQKNSRERMKRIEEGIKELGSQILKEHPVENTQLQNEKLYLYYLQNGRDMYVDQELDINRLSDYDVDHIVPQSFLKDDSIDNKVLTRSDKARGKSDNVPSEEVVKKMKNYWRQLLNAKLITQRKFDNLTKAERGGLSELDKAGFIKRQLVETRQITKHVAQILDSRMNTKYDENDKLIREVKVITLKSKLVSDFRKDFQFYKVREINNYHHAHDAYLNAVVGTALIKKYPKLESEFVYGDYKVYDVRKMIAKSEQEIGKATAKYFFYSNIMNFFKTEITLANGEIRKRPLIETNGETGEIVWDKGRDFATVRKVLSMPQVNIVKKTEVQTGGFSKESILPKRNSDKLIARKKDWDPKKYGGFDSPTVAYSVLVVAKVEKGKSKKLKSVKELLGITIMERSSFEKNPIDFLEAKGYKEVKKDLIIKLPKYSLFELENGRKRMLASAGELQKGNELALPSKYVNFLYLASHYEKLKGSPEDNEQKQLFVEQHKHYLDEIIEQISEFSKRVILADANLDKVLSAYNKHRDKPIREQAENIIHLFTLTNLGAPAAFKYFDTTIDRKRYTSTKEVLDATLIHQSITGLYETRIDLSQLGGDGGGSSGGGEAAAKGGLLGRDLLTKLKAQIQFSTEGPQVTWEDRPAMCLVLNLEEEYRLHEKPVPPSIDPSWLQLFPMVWAEKAGMGLANQVPPVVVELKSDASPVAVRQYPMSKEAREGIRPHIQRFLDLGILVPCQSPWNTPLLPVKKPGTNDYRPVQDLREVNKRVQDIHPTVPNPYNLLSSLPPSHTWYSVLDLKDAFFCLKLHPNSQPLFAFEWRDPEKGNTGQLTWTRLPQGFKNSPTLFNEALHRDLASFRALNPQVVMLQYVDDLLVAAPTYRDCKEGTRRLLQELSKLGYRVSAKKAQLCREEVTYLGYLLKGGKRWLTPARKATVMKIPTPTTPRQVREFLGKAGFCRLFIPGFASLAAPLYPLTRPKVPFTWTEAHQEAFGRIKEALLSAPALALPDLTKPFALYVDEKEGVARGVLTQTLGPWRRPVAYLSKKLDPVASGWPTCLKAIAAVALLLKDADKLTLGQNVLVIAPHNLESIVRQPPDRWMTNARMTHYQSLLLNERVSFAPPAILNPATLLPVESDDTPIHICSEILAEETGTRPDLRDQPLPGVPAWYTDGSSFIMDGRRQAGAAIVDNKRTVWASNLPEGTSAQKAELIALTQALRLAEGKSINIYTDSRYAFATAHVHGAIYKQRGWLTSAGKDIKNKEEILALLEAIHLPKRVAIIHCPGHQRGTDPVATGNRKADEAAKQAAQSTRILTETTKNAGKRTADGSEFEKRTADGSEFESPKKKAKVE

SEQ ID NO: 1709 - protein, 2124 aa, synthetic construct
MPAAKRVKLDGGDKKYSIGLDIGTNSVGWAVITDEYKVPSKKFKVLGNTDRHSIKKNLIGALLFDSGETAEATRLKRTARRRYTRRKNRICYLQEIFSNEMAKVDDSFFHRLEESFLVEEDKKHERHPIFGNIVDEVAYHEKYPTIYHLRKKLVDSTDKADLRLIYLALAHMIKFRGHFLIEGDLNPDNSDVDKLFIQLVQTYNQLFEENPINASGVDAKAILSARLSKSRRLENLIAQLPGEKKNGLFGNLIALSLGLTPNFKSNFDLAEDAKLQLSKDTYDDDLDNLLAQIGDQYADLFLAAKNLSDAILLSDILRVNTEITKAPLSASMIKRYDEHHQDLTLLKALVRQQLPEKYKEIFFDQSKNGYAGYIDGGASQEEFYKFIKPILEKMDGTEELLVKLNREDLLRKQRTFDNGSIPHQIHLGELHAILRRQEDFYPFLKDNREKIEKILTFRIPYYVGPLARGNSRFAWMTRKSEETITPWNFEEVVDKGASAQSFIERMTNFDKNLPNEKVLPKHSLLYEYFTVYNELTKVKYVTEGMRKPAFLSGEQKKAIVDLLFKTNRKVTVKQLKEDYFKKIECFDSVEISGVEDRFNASLGTYHDLLKIIKDKDFLDNEENEDILEDIVLTLTLFEDREMIEERLKTYAHLFDDKVMKQLKRRRYTGWGRLSRKLINGIRDKQSGKTILDFLKSDGFANRNFMQLIHDDSLTFKEDIQKAQVSGQGDSLHEHIANLAGSPAIKKGILQTVKVVDELVKVMGRHKPENIVIEMARENQTTQKGQKNSRERMKRIEEGIKELGSQILKEHPVENTQLQNEKLYLYYLQNGRDMYVDQELDINRLSDYDVDHIVPQSFLKDDSIDNKVLTRSDKARGKSDNVPSEEVVKKMKNYWRQLLNAKLITQRKFDNLTKAERGGLSELDKAGFIKRQLVETRQITKHVAQILDSRMNTKYDENDKLIREVKVITLKSKLVSDFRKDFQFYKVREINNYHHAHDAYLNAVVGTALIKKYPKLESEFVYGDYKVYDVRKMIAKSEQEIGKATAKYFFYSNIMNFFKTEITLANGEIRKRPLIETNGETGEIVWDKGRDFATVRKVLSMPQVNIVKKTEVQTGGFSKESILPKRNSDKLIARKKDWDPKKYGGFDSPTVAYSVLVVAKVEKGKSKKLKSVKELLGITIMERSSFEKNPIDFLEAKGYKEVKKDLIIKLPKYSLFELENGRKRMLASAGELQKGNELALPSKYVNFLYLASHYEKLKGSPEDNEQKQLFVEQHKHYLDEIIEQISEFSKRVILADANLDKVLSAYNKHRDKPIREQAENIIHLFTLTNLGAPAAFKYFDTTIDRKRYTSTKEVLDATLIHQSITGLYETRIDLSQLGGDGGGSSEAAAKGGLLGRDLLTKLKAQIQFSTEGPQVTWEDRPAMCLVLNLEEEYRLHEKPVPPSIDPSWLQLFPMVWAEKAGMGLANQVPPVVVELKSDASPVAVRQYPMSKEAREGIRPHIQRFLDLGILVPCQSPWNTPLLPVKKPGTNDYRPVQDLREVNKRVQDIHPTVPNPYNLLSSLPPSHTWYSVLDLKDAFFCLKLHPNSQPLFAFEWRDPEKGNTGQLTWTRLPQGFKNSPTLFNEALHRDLASFRALNPQVVMLQYVDDLLVAAPTYRDCKEGTRRLLQELSKLGYRVSAKKAQLCREEVTYLGYLLKGGKRWLTPARKATVMKIPTPTTPRQVREFLGKAGFCRLFIPGFASLAAPLYPLTRPKVPFTWTEAHQEAFGRIKEALLSAPALALPDLTKPFALYVDEKEGVARGVLTQTLGPWRRPVAYLSKKLDPVASGWPTCLKAIAAVALLLKDADKLTLGQNVLVIAPHNLESIVRQPPDRWMTNARMTHYQSLLLNERVSFAPPAILNPATLLPVESDDTPIHICSEILAEETGTRPDLRDQPLPGVPAWYTDGSSFIMDGRRQAGAAIVDNKRTVWASNLPEGTSAQKAELIALTQALRLAEGKSINIYTDSRYAFATAHVHGAIYKQRGWLTSAGKDIKNKEEILALLEAIHLPKRVAIIHCPGHQRGTDPVATGNRKADEAAKQAAQSTRILTETTKNAGKRTADGSEFEKRTADGSEFESPKKKAKVE

SEQ ID NO: 1710 - protein, 2125 aa, synthetic construct
MPAAKRVKLDGGDKKYSIGLDIGTNSVGWAVITDEYKVPSKKFKVLGNTDRHSIKKNLIGALLFDSGETAEATRLKRTARRRYTRRKNRICYLQEIFSNEMAKVDDSFFHRLEESFLVEEDKKHERHPIFGNIVDEVAYHEKYPTIYHLRKKLVDSTDKADLRLIYLALAHMIKFRGHFLIEGDLNPDNSDVDKLFIQLVQTYNQLFEENPINASGVDAKAILSARLSKSRRLENLIAQLPGEKKNGLFGNLIALSLGLTPNFKSNFDLAEDAKLQLSKDTYDDDLDNLLAQIGDQYADLFLAAKNLSDAILLSDILRVNTEITKAPLSASMIKRYDEHHQDLTLLKALVRQQLPEKYKEIFFDQSKNGYAGYIDGGASQEEFYKFIKPILEKMDGTEELLVKLNREDLLRKQRTFDNGSIPHQIHLGELHAILRRQEDFYPFLKDNREKIEKILTFRIPYYVGPLARGNSRFAWMTRKSEETITPWNFEEVVDKGASAQSFIERMTNFDKNLPNEKVLPKHSLLYEYFTVYNELTKVKYVTEGMRKPAFLSGEQKKAIVDLLFKTNRKVTVKQLKEDYFKKIECFDSVEISGVEDRFNASLGTYHDLLKIIKDKDFLDNEENEDILEDIVLTLTLFEDREMIEERLKTYAHLFDDKVMKQLKRRRYTGWGRLSRKLINGIRDKQSGKTILDFLKSDGFANRNFMQLIHDDSLTFKEDIQKAQVSGQGDSLHEHIANLAGSPAIKKGILQTVKVVDELVKVMGRHKPENIVIEMARENQTTQKGQKNSRERMKRIEEGIKELGSQILKEHPVENTQLQNEKLYLYYLQNGRDMYVDQELDINRLSDYDVDHIVPQSFLKDDSIDNKVLTRSDKARGKSDNVPSEEVVKKMKNYWRQLLNAKLITQRKFDNLTKAERGGLSELDKAGFIKRQLVETRQITKHVAQILDSRMNTKYDENDKLIREVKVITLKSKLVSDFRKDFQFYKVREINNYHHAHDAYLNAVVGTALIKKYPKLESEFVYGDYKVYDVRKMIAKSEQEIGKATAKYFFYSNIMNFFKTEITLANGEIRKRPLIETNGETGEIVWDKGRDFATVRKVLSMPQVNIVKKTEVQTGGFSKESILPKRNSDKLIARKKDWDPKKYGGFDSPTVAYSVLVVAKVEKGKSKKLKSVKELLGITIMERSSFEKNPIDFLEAKGYKEVKKDLIIKLPKYSLFELENGRKRMLASAGELQKGNELALPSKYVNFLYLASHYEKLKGSPEDNEQKQLFVEQHKHYLDEIIEQISEFSKRVILADANLDKVLSAYNKHRDKPIREQAENIIHLFTLTNLGAPAAFKYFDTTIDRKRYTSTKEVLDATLIHQSITGLYETRIDLSQLGGDGGGGGPAPGGSGGLLGRDLLTKLKAQIQFSTEGPQVTWEDRPAMCLVLNLEEEYRLHEKPVPPSIDPSWLQLFPMVWAEKAGMGLANQVPPVVVELKSDASPVAVRQYPMSKEAREGIRPHIQRFLDLGILVPCQSPWNTPLLPVKKPGTNDYRPVQDLREVNKRVQDIHPTVPNPYNLLSSLPPSHTWYSVLDLKDAFFCLKLHPNSQPLFAFEWRDPEKGNTGQLTWTRLPQGFKNSPTLFNEALHRDLASFRALNPQVVMLQYVDDLLVAAPTYRDCKEGTRRLLQELSKLGYRVSAKKAQLCREEVTYLGYLLKGGKRWLTPARKATVMKIPTPTTPRQVREFLGKAGFCRLFIPGFASLAAPLYPLTRPKVPFTWTEAHQEAFGRIKEALLSAPALALPDLTKPFALYVDEKEGVARGVLTQTLGPWRRPVAYLSKKLDPVASGWPTCLKAIAAVALLLKDADKLTLGQNVLVIAPHNLESIVRQPPDRWMTNARMTHYQSLLLNERVSFAPPAILNPATLLPVESDDTPIHICSEILAEETGTRPDLRDQPLPGVPAWYTDGSSFIMDGRRQAGAAIVDNKRTVWASNLPEGTSAQKAELIALTQALRLAEGKSINIYTDSRYAFATAHVHGAIYKQRGWLTSAGKDIKNKEEILALLEAIHLPKRVAIIHCPGHQRGTDPVATGNRKADEAAKQAAQSTRILTETTKNAGKRTADGSEFEKRTADGSEFESPKKKAKVE

SEQ ID NO: 1711 - protein, 2127 aa, synthetic construct
MPAAKRVKLDGGDKKYSIGLDIGTNSVGWAVITDEYKVPSKKFKVLGNTDRHSIKKNLIGALLFDSGETAEATRLKRTARRRYTRRKNRICYLQEIFSNEMAKVDDSFFHRLEESFLVEEDKKHERHPIFGNIVDEVAYHEKYPTIYHLRKKLVDSTDKADLRLIYLALAHMIKFRGHFLIEGDLNPDNSDVDKLFIQLVQTYNQLFEENPINASGVDAKAILSARLSKSRRLENLIAQLPGEKKNGLFGNLIALSLGLTPNFKSNFDLAEDAKLQLSKDTYDDDLDNLLAQIGDQYADLFLAAKNLSDAILLSDILRVNTEITKAPLSASMIKRYDEHHQDLTLLKALVRQQLPEKYKEIFFDQSKNGYAGYIDGGASQEEFYKFIKPILEKMDGTEELLVKLNREDLLRKQRTFDNGSIPHQIHLGELHAILRRQEDFYPFLKDNREKIEKILTFRIPYYVGPLARGNSRFAWMTRKSEETITPWNFEEVVDKGASAQSFIERMTNFDKNLPNEKVLPKHSLLYEYFTVYNELTKVKYVTEGMRKPAFLSGEQKKAIVDLLFKTNRKVTVKQLKEDYFKKIECFDSVEISGVEDRFNASLGTYHDLLKIIKDKDFLDNEENEDILEDIVLTLTLFEDREMIEERLKTYAHLFDDKVMKQLKRRRYTGWGRLSRKLINGIRDKQSGKTILDFLKSDGFANRNFMQLIHDDSLTFKEDIQKAQVSGQGDSLHEHIANLAGSPAIKKGILQTVKVVDELVKVMGRHKPENIVIEMARENQTTQKGQKNSRERMKRIEEGIKELGSQILKEHPVENTQLQNEKLYLYYLQNGRDMYVDQELDINRLSDYDVDHIVPQSFLKDDSIDNKVLTRSDKARGKSDNVPSEEVVKKMKNYWRQLLNAKLITQRKFDNLTKAERGGLSELDKAGFIKRQLVETRQITKHVAQILDSRMNTKYDENDKLIREVKVITLKSKLVSDFRKDFQFYKVREINNYHHAHDAYLNAVVGTALIKKYPKLESEFVYGDYKVYDVRKMIAKSEQEIGKATAKYFFYSNIMNFFKTEITLANGEIRKRPLIETNGETGEIVWDKGRDFATVRKVLSMPQVNIVKKTEVQTGGFSKESILPKRNSDKLIARKKDWDPKKYGGFDSPTVAYSVLVVAKVEKGKSKKLKSVKELLGITIMERSSFEKNPIDFLEAKGYKEVKKDLIIKLPKYSLFELENGRKRMLASAGELQKGNELALPSKYVNFLYLASHYEKLKGSPEDNEQKQLFVEQHKHYLDEIIEQISEFSKRVILADANLDKVLSAYNKHRDKPIREQAENIIHLFTLTNLGAPAAFKYFDTTIDRKRYTSTKEVLDATLIHQSITGLYETRIDLSQLGGDGGGSSEAAAKPAPGGLLGRDLLTKLKAQIQFSTEGPQVTWEDRPAMCLVLNLEEEYRLHEKPVPPSIDPSWLQLFPMVWAEKAGMGLANQVPPVVVELKSDASPVAVRQYPMSKEAREGIRPHIQRFLDLGILVPCQSPWNTPLLPVKKPGTNDYRPVQDLREVNKRVQDIHPTVPNPYNLLSSLPPSHTWYSVLDLKDAFFCLKLHPNSQPLFAFEWRDPEKGNTGQLTWTRLPQGFKNSPTLFNEALHRDLASFRALNPQVVMLQYVDDLLVAAPTYRDCKEGTRRLLQELSKLGYRVSAKKAQLCREEVTYLGYLLKGGKRWLTPARKATVMKIPTPTTPRQVREFLGKAGFCRLFIPGFASLAAPLYPLTRPKVPFTWTEAHQEAFGRIKEALLSAPALALPDLTKPFALYVDEKEGVARGVLTQTLGPWRRPVAYLSKKLDPVASGWPTCLKAIAAVALLLKDADKLTLGQNVLVIAPHNLESIVRQPPDRWMTNARMTHYQSLLLNERVSFAPPAILNPATLLPVESDDTPIHICSEILAEETGTRPDLRDQPLPGVPAWYTDGSSFIMDGRRQAGAAIVDNKRTVWASNLPEGTSAQKAELIALTQALRLAEGKSINIYTDSRYAFATAHVHGAIYKQRGWLTSAGKDIKNKEEILALLEAIHLPKRVAIIHCPGHQRGTDPVATGNRKADEAAKQAAQSTRILTETTKNAGKRTADGSEFEKRTADGSEFESPKKKAKVE

SEQ ID NO: 1712 - protein, 2131 aa, synthetic construct
MPAAKRVKLDGGDKKYSIGLDIGTNSVGWAVITDEYKVPSKKFKVLGNTDRHSIKKNLIGALLFDSGETAEATRLKRTARRRYTRRKNRICYLQEIFSNEMAKVDDSFFHRLEESFLVEEDKKHERHPIFGNIVDEVAYHEKYPTIYHLRKKLVDSTDKADLRLIYLALAHMIKFRGHFLIEGDLNPDNSDVDKLFIQLVQTYNQLFEENPINASGVDAKAILSARLSKSRRLENLIAQLPGEKKNGLFGNLIALSLGLTPNFKSNFDLAEDAKLQLSKDTYDDDLDNLLAQIGDQYADLFLAAKNLSDAILLSDILRVNTEITKAPLSASMIKRYDEHHQDLTLLKALVRQQLPEKYKEIFFDQSKNGYAGYIDGGASQEEFYKFIKPILEKMDGTEELLVKLNREDLLRKQRTFDNGSIPHQIHLGELHAILRRQEDFYPFLKDNREKIEKILTFRIPYYVGPLARGNSRFAWMTRKSEETITPWNFEEVVDKGASAQSFIERMTNFDKNLPNEKVLPKHSLLYEYFTVYNELTKVKYVTEGMRKPAFLSGEQKKAIVDLLFKTNRKVTVKQLKEDYFKKIECFDSVEISGVEDRFNASLGTYHDLLKIIKDKDFLDNEENEDILEDIVLTLTLFEDREMIEERLKTYAHLFDDKVMKQLKRRRYTGWGRLSRKLINGIRDKQSGKTILDFLKSDGFANRNFMQLIHDDSLTFKEDIQKAQVSGQGDSLHEHIANLAGSPAIKKGILQTVKVVDELVKVMGRHKPENIVIEMARENQTTQKGQKNSRERMKRIEEGIKELGSQILKEHPVENTQLQNEKLYLYYLQNGRDMYVDQELDINRLSDYDVDHIVPQSFLKDDSIDNKVLTRSDKARGKSDNVPSEEVVKKMKNYWRQLLNAKLITQRKFDNLTKAERGGLSELDKAGFIKRQLVETRQITKHVAQILDSRMNTKYDENDKLIREVKVITLKSKLVSDFRKDFQFYKVREINNYHHAHDAYLNAVVGTALIKKYPKLESEFVYGDYKVYDVRKMIAKSEQEIGKATAKYFFYSNIMNFFKTEITLANGEIRKRPLIETNGETGEIVWDKGRDFATVRKVLSMPQVNIVKKTEVQTGGFSKESILPKRNSDKLIARKKDWDPKKYGGFDSPTVAYSVLVVAKVEKGKSKKLKSVKELLGITIMERSSFEKNPIDFLEAKGYKEVKKDLIIKLPKYSLFELENGRKRMLASAGELQKGNELALPSKYVNFLYLASHYEKLKGSPEDNEQKQLFVEQHKHYLDEIIEQISEFSKRVILADANLDKVLSAYNKHRDKPIREQAENIIHLFTLTNLGAPAAFKYFDTTIDRKRYTSTKEVLDATLIHQSITGLYETRIDLSQLGGDGGEAAAKGGGGSEAAAKGGLLGRDLLTKLKAQIQFSTEGPQVTWEDRPAMCLVLNLEEEYRLHEKPVPPSIDPSWLQLFPMVWAEKAGMGLANQVPPVVVELKSDASPVAVRQYPMSKEAREGIRPHIQRFLDLGILVPCQSPWNTPLLPVKKPGTNDYRPVQDLREVNKRVQDIHPTVPNPYNLLSSLPPSHTWYSVLDLKDAFFCLKLHPNSQPLFAFEWRDPEKGNTGQLTWTRLPQGFKNSPTLFNEALHRDLASFRALNPQVVMLQYVDDLLVAAPTYRDCKEGTRRLLQELSKLGYRVSAKKAQLCREEVTYLGYLLKGGKRWLTPARKATVMKIPTPTTPRQVREFLGKAGFCRLFIPGFASLAAPLYPLTRPKVPFTWTEAHQEAFGRIKEALLSAPALALPDLTKPFALYVDEKEGVARGVLTQTLGPWRRPVAYLSKKLDPVASGWPTCLKAIAAVALLLKDADKLTLGQNVLVIAPHNLESIVRQPPDRWMTNARMTHYQSLLLNERVSFAPPAILNPATLLPVESDDTPIHICSEILAEETGTRPDLRDQPLPGVPAWYTDGSSFIMDGRRQAGAAIVDNKRTVWASNLPEGTSAQKAELIALTQALRLAEGKSINIYTDSRYAFATAHVHGAIYKQRGWLTSAGKDIKNKEEILALLEAIHLPKRVAIIHCPGHQRGTDPVATGNRKADEAAKQAAQSTRILTETTKNAGKRTADGSEFEKRTADGSEFESPKKKAKVE

SEQ ID NO: 1713 - protein, 2127 aa, synthetic construct
MPAAKRVKLDGGDKKYSIGLDIGTNSVGWAVITDEYKVPSKKFKVLGNTDRHSIKKNLIGALLFDSGETAEATRLKRTARRRYTRRKNRICYLQEIFSNEMAKVDDSFFHRLEESFLVEEDKKHERHPIFGNIVDEVAYHEKYPTIYHLRKKLVDSTDKADLRLIYLALAHMIKFRGHFLIEGDLNPDNSDVDKLFIQLVQTYNQLFEENPINASGVDAKAILSARLSKSRRLENLIAQLPGEKKNGLFGNLIALSLGLTPNFKSNFDLAEDAKLQLSKDTYDDDLDNLLAQIGDQYADLFLAAKNLSDAILLSDILRVNTEITKAPLSASMIKRYDEHHQDLTLLKALVRQQLPEKYKEIFFDQSKNGYAGYIDGGASQEEFYKFIKPILEKMDGTEELLVKLNREDLLRKQRTFDNGSIPHQIHLGELHAILRRQEDFYPFLKDNREKIEKILTFRIPYYVGPLARGNSRFAWMTRKSEETITPWNFEEVVDKGASAQSFIERMTNFDKNLPNEKVLPKHSLLYEYFTVYNELTKVKYVTEGMRKPAFLSGEQKKAIVDLLFKTNRKVTVKQLKEDYFKKIECFDSVEISGVEDRFNASLGTYHDLLKIIKDKDFLDNEENEDILEDIVLTLTLFEDREMIEERLKTYAHLFDDKVMKQLKRRRYTGWGRLSRKLINGIRDKQSGKTILDFLKSDGFANRNFMQLIHDDSLTFKEDIQKAQVSGQGDSLHEHIANLAGSPAIKKGILQTVKVVDELVKVMGRHKPENIVIEMARENQTTQKGQKNSRERMKRIEEGIKELGSQILKEHPVENTQLQNEKLYLYYLQNGRDMYVDQELDINRLSDYDVDHIVPQSFLKDDSIDNKVLTRSDKARGKSDNVPSEEVVKKMKNYWRQLLNAKLITQRKFDNLTKAERGGLSELDKAGFIKRQLVETRQITKHVAQILDSRMNTKYDENDKLIREVKVITLKSKLVSDFRKDFQFYKVREINNYHHAHDAYLNAVVGTALIKKYPKLESEFVYGDYKVYDVRKMIAKSEQEIGKATAKYFFYSNIMNFFKTEITLANGEIRKRPLIETNGETGEIVWDKGRDFATVRKVLSMPQVNIVKKTEVQTGGFSKESILPKRNSDKLIARKKDWDPKKYGGFDSPTVAYSVLVVAKVEKGKSKKLKSVKELLGITIMERSSFEKNPIDFLEAKGYKEVKKDLIIKLPKYSLFELENGRKRMLASAGELQKGNELALPSKYVNFLYLASHYEKLKGSPEDNEQKQLFVEQHKHYLDEIIEQISEFSKRVILADANLDKVLSAYNKHRDKPIREQAENIIHLFTLTNLGAPAAFKYFDTTIDRKRYTSTKEVLDATLIHQSITGLYETRIDLSQLGGDGGGSSGGSEAAAKGGLLGRDLLTKLKAQIQFSTEGPQVTWEDRPAMCLVLNLEEEYRLHEKPVPPSIDPSWLQLFPMVWAEKAGMGLANQVPPVVVELKSDASPVAVRQYPMSKEAREGIRPHIQRFLDLGILVPCQSPWNTPLLPVKKPGTNDYRPVQDLREVNKRVQDIHPTVPNPYNLLSSLPPSHTWYSVLDLKDAFFCLKLHPNSQPLFAFEWRDPEKGNTGQLTWTRLPQGFKNSPTLFNEALHRDLASFRALNPQVVMLQYVDDLLVAAPTYRDCKEGTRRLLQELSKLGYRVSAKKAQLCREEVTYLGYLLKGGKRWLTPARKATVMKIPTPTTPRQVREFLGKAGFCRLFIPGFASLAAPLYPLTRPKVPFTWTEAHQEAFGRIKEALLSAPALALPDLTKPFALYVDEKEGVARGVLTQTLGPWRRPVAYLSKKLDPVASGWPTCLKAIAAVALLLKDADKLTLGQNVLVIAPHNLESIVRQPPDRWMTNARMTHYQSLLLNERVSFAPPAILNPATLLPVESDDTPIHICSEILAEETGTRPDLRDQPLPGVPAWYTDGSSFIMDGRRQAGAAIVDNKRTVWASNLPEGTSAQKAELIALTQALRLAEGKSINIYTDSRYAFATAHVHGAIYKQRGWLTSAGKDIKNKEEILALLEAIHLPKRVAIIHCPGHQRGTDPVATGNRKADEAAKQAAQSTRILTETTKNAGKRTADGSEFEKRTADGSEFESPKKKAKVE

SEQ ID NO: 1714 - protein, 2125 aa, synthetic construct
MPAAKRVKLDGGDKKYSIGLDIGTNSVGWAVITDEYKVPSKKFKVLGNTDRHSIKKNLIGALLFDSGETAEATRLKRTARRRYTRRKNRICYLQEIFSNEMAKVDDSFFHRLEESFLVEEDKKHERHPIFGNIVDEVAYHEKYPTIYHLRKKLVDSTDKADLRLIYLALAHMIKFRGHFLIEGDLNPDNSDVDKLFIQLVQTYNQLFEENPINASGVDAKAILSARLSKSRRLENLIAQLPGEKKNGLFGNLIALSLGLTPNFKSNFDLAEDAKLQLSKDTYDDDLDNLLAQIGDQYADLFLAAKNLSDAILLSDILRVNTEITKAPLSASMIKRYDEHHQDLTLLKALVRQQLPEKYKEIFFDQSKNGYAGYIDGGASQEEFYKFIKPILEKMDGTEELLVKLNREDLLRKQRTFDNGSIPHQIHLGELHAILRRQEDFYPFLKDNREKIEKILTFRIPYYVGPLARGNSRFAWMTRKSEETITPWNFEEVVDKGASAQSFIERMTNFDKNLPNEKVLPKHSLLYEYFTVYNELTKVKYVTEGMRKPAFLSGEQKKAIVDLLFKTNRKVTVKQLKEDYFKKIECFDSVEISGVEDRFNASLGTYHDLLKIIKDKDFLDNEENEDILEDIVLTLTLFEDREMIEERLKTYAHLFDDKVMKQLKRRRYTGWGRLSRKLINGIRDKQSGKTILDFLKSDGFANRNFMQLIHDDSLTFKEDIQKAQVSGQGDSLHEHIANLAGSPAIKKGILQTVKVVDELVKVMGRHKPENIVIEMARENQTTQKGQKNSRERMKRIEEGIKELGSQILKEHPVENTQLQNEKLYLYYLQNGRDMYVDQELDINRLSDYDVDHIVPQSFLKDDSIDNKVLTRSDKARGKSDNVPSEEVVKKMKNYWRQLLNAKLITQRKFDNLTKAERGGLSELDKAGFIKRQLVETRQITKHVAQILDSRMNTKYDENDKLIREVKVITLKSKLVSDFRKDFQFYKVREINNYHHAHDAYLNAVVGTALIKKYPKLESEFVYGDYKVYDVRKMIAKSEQEIGKATAKYFFYSNIMNFFKTEITLANGEIRKRPLIETNGETGEIVWDKGRDFATVRKVLSMPQVNIVKKTEVQTGGFSKESILPKRNSDKLIARKKDWDPKKYGGFDSPTVAYSVLVVAKVEKGKSKKLKSVKELLGITIMERSSFEKNPIDFLEAKGYKEVKKDLIIKLPKYSLFELENGRKRMLASAGELQKGNELALPSKYVNFLYLASHYEKLKGSPEDNEQKQLFVEQHKHYLDEIIEQISEFSKRVILADANLDKVLSAYNKHRDKPIREQAENIIHLFTLTNLGAPAAFKYFDTTIDRKRYTSTKEVLDATLIHQSITGLYETRIDLSQLGGDGGGSSGSSGSSGGLLGRDLLTKLKAQIQFSTEGPQVTWEDRPAMCLVLNLEEEYRLHEKPVPPSIDPSWLQLFPMVWAEKAGMGLANQVPPVVVELKSDASPVAVRQYPMSKEAREGIRPHIQRFLDLGILVPCQSPWNTPLLPVKKPGTNDYRPVQDLREVNKRVQDIHPTVPNPYNLLSSLPPSHTWYSVLDLKDAFFCLKLHPNSQPLFAFEWRDPEKGNTGQLTWTRLPQGFKNSPTLFNEALHRDLASFRALNPQVVMLQYVDDLLVAAPTYRDCKEGTRRLLQELSKLGYRVSAKKAQLCREEVTYLGYLLKGGKRWLTPARKATVMKIPTPTTPRQVREFLGKAGFCRLFIPGFASLAAPLYPLTRPKVPFTWTEAHQEAFGRIKEALLSAPALALPDLTKPFALYVDEKEGVARGVLTQTLGPWRRPVAYLSKKLDPVASGWPTCLKAIAAVALLLKDADKLTLGQNVLVIAPHNLESIVRQPPDRWMTNARMTHYQSLLLNERVSFAPPAILNPATLLPVESDDTPIHICSEILAEETGTRPDLRDQPLPGVPAWYTDGSSFIMDGRRQAGAAIVDNKRTVWASNLPEGTSAQKAELIALTQALRLAEGKSINIYTDSRYAFATAHVHGAIYKQRGWLTSAGKDIKNKEEILALLEAIHLPKRVAIIHCPGHQRGTDPVATGNRKADEAAKQAAQSTRILTETTKNAGKRTADGSEFEKRTADGSEFESPKKKAKVE

SEQ ID NO: 1715 - protein, 2127 aa, synthetic construct
MPAAKRVKLDGGDKKYSIGLDIGTNSVGWAVITDEYKVPSKKFKVLGNTDRHSIKKNLIGALLFDSGETAEATRLKRTARRRYTRRKNRICYLQEIFSNEMAKVDDSFFHRLEESFLVEEDKKHERHPIFGNIVDEVAYHEKYPTIYHLRKKLVDSTDKADLRLIYLALAHMIKFRGHFLIEGDLNPDNSDVDKLFIQLVQTYNQLFEENPINASGVDAKAILSARLSKSRRLENLIAQLPGEKKNGLFGNLIALSLGLTPNFKSNFDLAEDAKLQLSKDTYDDDLDNLLAQIGDQYADLFLAAKNLSDAILLSDILRVNTEITKAPLSASMIKRYDEHHQDLTLLKALVRQQLPEKYKEIFFDQSKNGYAGYIDGGASQEEFYKFIKPILEKMDGTEELLVKLNREDLLRKQRTFDNGSIPHQIHLGELHAILRRQEDFYPFLKDNREKIEKILTFRIPYYVGPLARGNSRFAWMTRKSEETITPWNFEEVVDKGASAQSFIERMTNFDKNLPNEKVLPKHSLLYEYFTVYNELTKVKYVTEGMRKPAFLSGEQKKAIVDLLFKTNRKVTVKQLKEDYFKKIECFDSVEISGVEDRFNASLGTYHDLLKIIKDKDFLDNEENEDILEDIVLTLTLFEDREMIEERLKTYAHLFDDKVMKQLKRRRYTGWGRLSRKLINGIRDKQSGKTILDFLKSDGFANRNFMQLIHDDSLTFKEDIQKAQVSGQGDSLHEHIANLAGSPAIKKGILQTVKVVDELVKVMGRHKPENIVIEMARENQTTQKGQKNSRERMKRIEEGIKELGSQILKEHPVENTQLQNEKLYLYYLQNGRDMYVDQELDINRLSDYDVDHIVPQSFLKDDSIDNKVLTRSDKARGKSDNVPSEEVVKKMKNYWRQLLNAKLITQRKFDNLTKAERGGLSELDKAGFIKRQLVETRQITKHVAQILDSRMNTKYDENDKLIREVKVITLKSKLVSDFRKDFQFYKVREINNYHHAHDAYLNAVVGTALIKKYPKLESEFVYGDYKVYDVRKMIAKSEQEIGKATAKYFFYSNIMNFFKTEITLANGEIRKRPLIETNGETGEIVWDKGRDFATVRKVLSMPQVNIVKKTEVQTGGFSKESILPKRNSDKLIARKKDWDPKKYGGFDSPTVAYSVLVVAKVEKGKSKKLKSVKELLGITIMERSSFEKNPIDFLEAKGYKEVKKDLIIKLPKYSLFELENGRKRMLASAGELQKGNELALPSKYVNFLYLASHYEKLKGSPEDNEQKQLFVEQHKHYLDEIIEQISEFSKRVILADANLDKVLSAYNKHRDKPIREQAENIIHLFTLTNLGAPAAFKYFDTTIDRKRYTSTKEVLDATLIHQSITGLYETRIDLSQLGGDGGEAAAKGGSGSSGGLLGRDLLTKLKAQIQFSTEGPQVTWEDRPAMCLVLNLEEEYRLHEKPVPPSIDPSWLQLFPMVWAEKAGMGLANQVPPVVVELKSDASPVAVRQYPMSKEAREGIRPHIQRFLDLGILVPCQSPWNTPLLPVKKPGTNDYRPVQDLREVNKRVQDIHPTVPNPYNLLSSLPPSHTWYSVLDLKDAFFCLKLHPNSQPLFAFEWRDPEKGNTGQLTWTRLPQGFKNSPTLFNEALHRDLASFRALNPQVVMLQYVDDLLVAAPTYRDCKEGTRRLLQELSKLGYRVSAKKAQLCREEVTYLGYLLKGGKRWLTPARKATVMKIPTPTTPRQVREFLGKAGFCRLFIPGFASLAAPLYPLTRPKVPFTWTEAHQEAFGRIKEALLSAPALALPDLTKPFALYVDEKEGVARGVLTQTLGPWRRPVAYLSKKLDPVASGWPTCLKAIAAVALLLKDADKLTLGQNVLVIAPHNLESIVRQPPDRWMTNARMTHYQSLLLNERVSFAPPAILNPATLLPVESDDTPIHICSEILAEETGTRPDLRDQPLPGVPAWYTDGSSFIMDGRRQAGAAIVDNKRTVWASNLPEGTSAQKAELIALTQALRLAEGKSINIYTDSRYAFATAHVHGAIYKQRGWLTSAGKDIKNKEEILALLEAIHLPKRVAIIHCPGHQRGTDPVATGNRKADEAAKQAAQSTRILTETTKNAGKRTADGSEFEKRTADGSEFESPKKKAKVE

SEQ ID NO: 1716 - protein, 2127 aa, synthetic construct
MPAAKRVKLDGGDKKYSIGLDIGTNSVGWAVITDEYKVPSKKFKVLGNTDRHSIKKNLIGALLFDSGETAEATRLKRTARRRYTRRKNRICYLQEIFSNEMAKVDDSFFHRLEESFLVEEDKKHERHPIFGNIVDEVAYHEKYPTIYHLRKKLVDSTDKADLRLIYLALAHMIKFRGHFLIEGDLNPDNSDVDKLFIQLVQTYNQLFEENPINASGVDAKAILSARLSKSRRLENLIAQLPGEKKNGLFGNLIALSLGLTPNFKSNFDLAEDAKLQLSKDTYDDDLDNLLAQIGDQYADLFLAAKNLSDAILLSDILRVNTEITKAPLSASMIKRYDEHHQDLTLLKALVRQQLPEKYKEIFFDQSKNGYAGYIDGGASQEEFYKFIKPILEKMDGTEELLVKLNREDLLRKQRTFDNGSIPHQIHLGELHAILRRQEDFYPFLKDNREKIEKILTFRIPYYVGPLARGNSRFAWMTRKSEETITPWNFEEVVDKGASAQSFIERMTNFDKNLPNEKVLPKHSLLYEYFTVYNELTKVKYVTEGMRKPAFLSGEQKKAIVDLLFKTNRKVTVKQLKEDYFKKIECFDSVEISGVEDRFNASLGTYHDLLKIIKDKDFLDNEENEDILEDIVLTLTLFEDREMIEERLKTYAHLFDDKVMKQLKRRRYTGWGRLSRKLINGIRDKQSGKTILDFLKSDGFANRNFMQLIHDDSLTFKEDIQKAQVSGQGDSLHEHIANLAGSPAIKKGILQTVKVVDELVKVMGRHKPENIVIEMARENQTTQKGQKNSRERMKRIEEGIKELGSQILKEHPVENTQLQNEKLYLYYLQNGRDMYVDQELDINRLSDYDVDHIVPQSFLKDDSIDNKVLTRSDKARGKSDNVPSEEVVKKMKNYWRQLLNAKLITQRKFDNLTKAERGGLSELDKAGFIKRQLVETRQITKHVAQILDSRMNTKYDENDKLIREVKVITLKSKLVSDFRKDFQFYKVREINNYHHAHDAYLNAVVGTALIKKYPKLESEFVYGDYKVYDVRKMIAKSEQEIGKATAKYFFYSNIMNFFKTEITLANGEIRKRPLIETNGETGEIVWDKGRDFATVRKVLSMPQVNIVKKTEVQTGGFSKESILPKRNSDKLIARKKDWDPKKYGGFDSPTVAYSVLVVAKVEKGKSKKLKSVKELLGITIMERSSFEKNPIDFLEAKGYKEVKKDLIIKLPKYSLFELENGRKRMLASAGELQKGNELALPSKYVNFLYLASHYEKLKGSPEDNEQKQLFVEQHKHYLDEIIEQISEFSKRVILADANLDKVLSAYNKHRDKPIREQAENIIHLFTLTNLGAPAAFKYFDTTIDRKRYTSTKEVLDATLIHQSITGLYETRIDLSQLGGDGGGGSGSSEAAAKGGLLGRDLLTKLKAQIQFSTEGPQVTWEDRPAMCLVLNLEEEYRLHEKPVPPSIDPSWLQLFPMVWAEKAGMGLANQVPPVVVELKSDASPVAVRQYPMSKEAREGIRPHIQRFLDLGILVPCQSPWNTPLLPVKKPGTNDYRPVQDLREVNKRVQDIHPTVPNPYNLLSSLPPSHTWYSVLDLKDAFFCLKLHPNSQPLFAFEWRDPEKGNTGQLTWTRLPQGFKNSPTLFNEALHRDLASFRALNPQVVMLQYVDDLLVAAPTYRDCKEGTRRLLQELSKLGYRVSAKKAQLCREEVTYLGYLLKGGKRWLTPARKATVMKIPTPTTPRQVREFLGKAGFCRLFIPGFASLAAPLYPLTRPKVPFTWTEAHQEAFGRIKEALLSAPALALPDLTKPFALYVDEKEGVARGVLTQTLGPWRRPVAYLSKKLDPVASGWPTCLKAIAAVALLLKDADKLTLGQNVLVIAPHNLESIVRQPPDRWMTNARMTHYQSLLLNERVSFAPPAILNPATLLPVESDDTPIHICSEILAEETGTRPDLRDQPLPGVPAWYTDGSSFIMDGRRQAGAAIVDNKRTVWASNLPEGTSAQKAELIALTQALRLAEGKSINIYTDSRYAFATAHVHGAIYKQRGWLTSAGKDIKNKEEILALLEAIHLPKRVAIIHCPGHQRGTDPVATGNRKADEAAKQAAQSTRILTETTKNAGKRTADGSEFEKRTADGSEFESPKKKAKVE

SEQ ID NO: 1717 - protein, 2127 aa, synthetic construct
MPAAKRVKLDGGDKKYSIGLDIGTNSVGWAVITDEYKVPSKKFKVLGNTDRHSIKKNLIGALLFDSGETAEATRLKRTARRRYTRRKNRICYLQEIFSNEMAKVDDSFFHRLEESFLVEEDKKHERHPIFGNIVDEVAYHEKYPTIYHLRKKLVDSTDKADLRLIYLALAHMIKFRGHFLIEGDLNPDNSDVDKLFIQLVQTYNQLFEENPINASGVDAKAILSARLSKSRRLENLIAQLPGEKKNGLFGNLIALSLGLTPNFKSNFDLAEDAKLQLSKDTYDDDLDNLLAQIGDQYADLFLAAKNLSDAILLSDILRVNTEITKAPLSASMIKRYDEHHQDLTLLKALVRQQLPEKYKEIFFDQSKNGYAGYIDGGASQEEFYKFIKPILEKMDGTEELLVKLNREDLLRKQRTFDNGSIPHQIHLGELHAILRRQEDFYPFLKDNREKIEKILTFRIPYYVGPLARGNSRFAWMTRKSEETITPWNFEEVVDKGASAQSFIERMTNFDKNLPNEKVLPKHSLLYEYFTVYNELTKVKYVTEGMRKPAFLSGEQKKAIVDLLFKTNRKVTVKQLKEDYFKKIECFDSVEISGVEDRFNASLGTYHDLLKIIKDKDFLDNEENEDILEDIVLTLTLFEDREMIEERLKTYAHLFDDKVMKQLKRRRYTGWGRLSRKLINGIRDKQSGKTILDFLKSDGFANRNFMQLIHDDSLTFKEDIQKAQVSGQGDSLHEHIANLAGSPAIKKGILQTVKVVDELVKVMGRHKPENIVIEMARENQTTQKGQKNSRERMKRIEEGIKELGSQILKEHPVENTQLQNEKLYLYYLQNGRDMYVDQELDINRLSDYDVDHIVPQSFLKDDSIDNKVLTRSDKARGKSDNVPSEEVVKKMKNYWRQLLNAKLITQRKFDNLTKAERGGLSELDKAGFIKRQLVETRQITKHVAQILDSRMNTKYDENDKLIREVKVITLKSKLVSDFRKDFQFYKVREINNYHHAHDAYLNAVVGTALIKKYPKLESEFVYGDYKVYDVRKMIAKSEQEIGKATAKYFFYSNIMNFFKTEITLANGEIRKRPLIETNGETGEIVWDKGRDFATVRKVLSMPQVNIVKKTEVQTGGFSKESILPKRNSDKLIARKKDWDPKKYGGFDSPTVAYSVLVVAKVEKGKSKKLKSVKELLGITIMERSSFEKNPIDFLEAKGYKEVKKDLIIKLPKYSLFELENGRKRMLASAGELQKGNELALPSKYVNFLYLASHYEKLKGSPEDNEQKQLFVEQHKHYLDEIIEQISEFSKRVILADANLDKVLSAYNKHRDKPIREQAENIIHLFTLTNLGAPAAFKYFDTTIDRKRYTSTKEVLDATLIHQSITGLYETRIDLSQLGGDGGGGSEAAAKGGGGGLLGRDLLTKLKAQIQFSTEGPQVTWEDRPAMCLVLNLEEEYRLHEKPVPPSIDPSWLQLFPMVWAEKAGMGLANQVPPVVVELKSDASPVAVRQYPMSKEAREGIRPHIQRFLDLGILVPCQSPWNTPLLPVKKPGTNDYRPVQDLREVNKRVQDIHPTVPNPYNLLSSLPPSHTWYSVLDLKDAFFCLKLHPNSQPLFAFEWRDPEKGNTGQLTWTRLPQGFKNSPTLFNEALHRDLASFRALNPQVVMLQYVDDLLVAAPTYRDCKEGTRRLLQELSKLGYRVSAKKAQLCREEVTYLGYLLKGGKRWLTPARKATVMKIPTPTTPRQVREFLGKAGFCRLFIPGFASLAAPLYPLTRPKVPFTWTEAHQEAFGRIKEALLSAPALALPDLTKPFALYVDEKEGVARGVLTQTLGPWRRPVAYLSKKLDPVASGWPTCLKAIAAVALLLKDADKLTLGQNVLVIAPHNLESIVRQPPDRWMTNARMTHYQSLLLNERVSFAPPAILNPATLLPVESDDTPIHICSEILAEETGTRPDLRDQPLPGVPAWYTDGSSFIMDGRRQAGAAIVDNKRTVWASNLPEGTSAQKAELIALTQALRLAEGKSINIYTDSRYAFATAHVHGAIYKQRGWLTSAGKDIKNKEEILALLEAIHLPKRVAIIHCPGHQRGTDPVATGNRKADEAAKQAAQSTRILTETTKNAGKRTADGSEFEKRTADGSEFESPKKKAKVE

SEQ ID NO: 1718 - protein, 2127 aa, synthetic construct
MPAAKRVKLDGGDKKYSIGLDIGTNSVGWAVITDEYKVPSKKFKVLGNTDRHSIKKNLIGALLFDSGETAEATRLKRTARRRYTRRKNRICYLQEIFSNEMAKVDDSFFHRLEESFLVEEDKKHERHPIFGNIVDEVAYHEKYPTIYHLRKKLVDSTDKADLRLIYLALAHMIKFRGHFLIEGDLNPDNSDVDKLFIQLVQTYNQLFEENPINASGVDAKAILSARLSKSRRLENLIAQLPGEKKNGLFGNLIALSLGLTPNFKSNFDLAEDAKLQLSKDTYDDDLDNLLAQIGDQYADLFLAAKNLSDAILLSDILRVNTEITKAPLSASMIKRYDEHHQDLTLLKALVRQQLPEKYKEIFFDQSKNGYAGYIDGGASQEEFYKFIKPILEKMDGTEELLVKLNREDLLRKQRTFDNGSIPHQIHLGELHAILRRQEDFYPFLKDNREKIEKILTFRIPYYVGPLARGNSRFAWMTRKSEETITPWNFEEVVDKGASAQSFIERMTNFDKNLPNEKVLPKHSLLYEYFTVYNELTKVKYVTEGMRKPAFLSGEQKKAIVDLLFKTNRKVTVKQLKEDYFKKIECFDSVEISGVEDRFNASLGTYHDLLKIIKDKDFLDNEENEDILEDIVLTLTLFEDREMIEERLKTYAHLFDDKVMKQLKRRRYTGWGRLSRKLINGIRDKQSGKTILDFLKSDGFANRNFMQLIHDDSLTFKEDIQKAQVSGQGDSLHEHIANLAGSPAIKKGILQTVKVVDELVKVMGRHKPENIVIEMARENQTTQKGQKNSRERMKRIEEGIKELGSQILKEHPVENTQLQNEKLYLYYLQNGRDMYVDQELDINRLSDYDVDHIVPQSFLKDDSIDNKVLTRSDKARGKSDNVPSEEVVKKMKNYWRQLLNAKLITQRKFDNLTKAERGGLSELDKAGFIKRQLVETRQITKHVAQILDSRMNTKYDENDKLIREVKVITLKSKLVSDFRKDFQFYKVREINNYHHAHDAYLNAVVGTALIKKYPKLESEFVYGDYKVYDVRKMIAKSEQEIGKATAKYFFYSNIMNFFKTEITLANGEIRKRPLIETNGETGEIVWDKGRDFATVRKVLSMPQVNIVKKTEVQTGGFSKESILPKRNSDKLIARKKDWDPKKYGGFDSPTVAYSVLVVAKVEKGKSKKLKSVKELLGITIMERSSFEKNPIDFLEAKGYKEVKKDLIIKLPKYSLFELENGRKRMLASAGELQKGNELALPSKYVNFLYLASHYEKLKGSPEDNEQKQLFVEQHKHYLDEIIEQISEFSKRVILADANLDKVLSAYNKHRDKPIREQAENIIHLFTLTNLGAPAAFKYFDTTIDRKRYTSTKEVLDATLIHQSITGLYETRIDLSQLGGDGGPAPGGSEAAAKGGLLGRDLLTKLKAQIQFSTEGPQVTWEDRPAMCLVLNLEEEYRLHEKPVPPSIDPSWLQLFPMVWAEKAGMGLANQVPPVVVELKSDASPVAVRQYPMSKEAREGIRPHIQRFLDLGILVPCQSPWNTPLLPVKKPGTNDYRPVQDLREVNKRVQDIHPTVPNPYNLLSSLPPSHTWYSVLDLKDAFFCLKLHPNSQPLFAFEWRDPEKGNTGQLTWTRLPQGFKNSPTLFNEALHRDLASFRALNPQVVMLQYVDDLLVAAPTYRDCKEGTRRLLQELSKLGYRVSAKKAQLCREEVTYLGYLLKGGKRWLTPARKATVMKIPTPTTPRQVREFLGKAGFCRLFIPGFASLAAPLYPLTRPKVPFTWTEAHQEAFGRIKEALLSAPALALPDLTKPFALYVDEKEGVARGVLTQTLGPWRRPVAYLSKKLDPVASGWPTCLKAIAAVALLLKDADKLTLGQNVLVIAPHNLESIVRQPPDRWMTNARMTHYQSLLLNERVSFAPPAILNPATLLPVESDDTPIHICSEILAEETGTRPDLRDQPLPGVPAWYTDGSSFIMDGRRQAGAAIVDNKRTVWASNLPEGTSAQKAELIALTQALRLAEGKSINIYTDSRYAFATAHVHGAIYKQRGWLTSAGKDIKNKEEILALLEAIHLPKRVAIIHCPGHQRGTDPVATGNRKADEAAKQAAQSTRILTETTKNAGKRTADGSEFEKRTADGSEFESPKKKAKVE

SEQ ID NO: 1719 - protein, 2125 aa, synthetic construct
MPAAKRVKLDGGDKKYSIGLDIGTNSVGWAVITDEYKVPSKKFKVLGNTDRHSIKKNLIGALLFDSGETAEATRLKRTARRRYTRRKNRICYLQEIFSNEMAKVDDSFFHRLEESFLVEEDKKHERHPIFGNIVDEVAYHEKYPTIYHLRKKLVDSTDKADLRLIYLALAHMIKFRGHFLIEGDLNPDNSDVDKLFIQLVQTYNQLFEENPINASGVDAKAILSARLSKSRRLENLIAQLPGEKKNGLFGNLIALSLGLTPNFKSNFDLAEDAKLQLSKDTYDDDLDNLLAQIGDQYADLFLAAKNLSDAILLSDILRVNTEITKAPLSASMIKRYDEHHQDLTLLKALVRQQLPEKYKEIFFDQSKNGYAGYIDGGASQEEFYKFIKPILEKMDGTEELLVKLNREDLLRKQRTFDNGSIPHQIHLGELHAILRRQEDFYPFLKDNREKIEKILTFRIPYYVGPLARGNSRFAWMTRKSEETITPWNFEEVVDKGASAQSFIERMTNFDKNLPNEKVLPKHSLLYEYFTVYNELTKVKYVTEGMRKPAFLSGEQKKAIVDLLFKTNRKVTVKQLKEDYFKKIECFDSVEISGVEDRFNASLGTYHDLLKIIKDKDFLDNEENEDILEDIVLTLTLFEDREMIEERLKTYAHLFDDKVMKQLKRRRYTGWGRLSRKLINGIRDKQSGKTILDFLKSDGFANRNFMQLIHDDSLTFKEDIQKAQVSGQGDSLHEHIANLAGSPAIKKGILQTVKVVDELVKVMGRHKPENIVIEMARENQTTQKGQKNSRERMKRIEEGIKELGSQILKEHPVENTQLQNEKLYLYYLQNGRDMYVDQELDINRLSDYDVDHIVPQSFLKDDSIDNKVLTRSDKARGKSDNVPSEEVVKKMKNYWRQLLNAKLITQRKFDNLTKAERGGLSELDKAGFIKRQLVETRQITKHVAQILDSRMNTKYDENDKLIREVKVITLKSKLVSDFRKDFQFYKVREINNYHHAHDAYLNAVVGTALIKKYPKLESEFVYGDYKVYDVRKMIAKSEQEIGKATAKYFFYSNIMNFFKTEITLANGEIRKRPLIETNGETGEIVWDKGRDFATVRKVLSMPQVNIVKKTEVQTGGFSKESILPKRNSDKLIARKKDWDPKKYGGFDSPTVAYSVLVVAKVEKGKSKKLKSVKELLGITIMERSSFEKNPIDFLEAKGYKEVKKDLIIKLPKYSLFELENGRKRMLASAGELQKGNELALPSKYVNFLYLASHYEKLKGSPEDNEQKQLFVEQHKHYLDEIIEQISEFSKRVILADANLDKVLSAYNKHRDKPIREQAENIIHLFTLTNLGAPAAFKYFDTTIDRKRYTSTKEVLDATLIHQSITGLYETRIDLSQLGGDGGPAPGSSGGGGGLLGRDLLTKLKAQIQFSTEGPQVTWEDRPAMCLVLNLEEEYRLHEKPVPPSIDPSWLQLFPMVWAEKAGMGLANQVPPVVVELKSDASPVAVRQYPMSKEAREGIRPHIQRFLDLGILVPCQSPWNTPLLPVKKPGTNDYRPVQDLREVNKRVQDIHPTVPNPYNLLSSLPPSHTWYSVLDLKDAFFCLKLHPNSQPLFAFEWRDPEKGNTGQLTWTRLPQGFKNSPTLFNEALHRDLASFRALNPQVVMLQYVDDLLVAAPTYRDCKEGTRRLLQELSKLGYRVSAKKAQLCREEVTYLGYLLKGGKRWLTPARKATVMKIPTPTTPRQVREFLGKAGFCRLFIPGFASLAAPLYPLTRPKVPFTWTEAHQEAFGRIKEALLSAPALALPDLTKPFALYVDEKEGVARGVLTQTLGPWRRPVAYLSKKLDPVASGWPTCLKAIAAVALLLKDADKLTLGQNVLVIAPHNLESIVRQPPDRWMTNARMTHYQSLLLNERVSFAPPAILNPATLLPVESDDTPIHICSEILAEETGTRPDLRDQPLPGVPAWYTDGSSFIMDGRRQAGAAIVDNKRTVWASNLPEGTSAQKAELIALTQALRLAEGKSINIYTDSRYAFATAHVHGAIYKQRGWLTSAGKDIKNKEEILALLEAIHLPKRVAIIHCPGHQRGTDPVATGNRKADEAAKQAAQSTRILTETTKNAGKRTADGSEFEKRTADGSEFESPKKKAKVE

SEQ ID NO: 1720 - protein, 2126 aa, synthetic construct
MPAAKRVKLDGGDKKYSIGLDIGTNSVGWAVITDEYKVPSKKFKVLGNTDRHSIKKNLIGALLFDSGETAEATRLKRTARRRYTRRKNRICYLQEIFSNEMAKVDDSFFHRLEESFLVEEDKKHERHPIFGNIVDEVAYHEKYPTIYHLRKKLVDSTDKADLRLIYLALAHMIKFRGHFLIEGDLNPDNSDVDKLFIQLVQTYNQLFEENPINASGVDAKAILSARLSKSRRLENLIAQLPGEKKNGLFGNLIALSLGLTPNFKSNFDLAEDAKLQLSKDTYDDDLDNLLAQIGDQYADLFLAAKNLSDAILLSDILRVNTEITKAPLSASMIKRYDEHHQDLTLLKALVRQQLPEKYKEIFFDQSKNGYAGYIDGGASQEEFYKFIKPILEKMDGTEELLVKLNREDLLRKQRTFDNGSIPHQIHLGELHAILRRQEDFYPFLKDNREKIEKILTFRIPYYVGPLARGNSRFAWMTRKSEETITPWNFEEVVDKGASAQSFIERMTNFDKNLPNEKVLPKHSLLYEYFTVYNELTKVKYVTEGMRKPAFLSGEQKKAIVDLLFKTNRKVTVKQLKEDYFKKIECFDSVEISGVEDRFNASLGTYHDLLKIIKDKDFLDNEENEDILEDIVLTLTLFEDREMIEERLKTYAHLFDDKVMKQLKRRRYTGWGRLSRKLINGIRDKQSGKTILDFLKSDGFANRNFMQLIHDDSLTFKEDIQKAQVSGQGDSLHEHIANLAGSPAIKKGILQTVKVVDELVKVMGRHKPENIVIEMARENQTTQKGQKNSRERMKRIEEGIKELGSQILKEHPVENTQLQNEKLYLYYLQNGRDMYVDQELDINRLSDYDVDHIVPQSFLKDDSIDNKVLTRSDKARGKSDNVPSEEVVKKMKNYWRQLLNAKLITQRKFDNLTKAERGGLSELDKAGFIKRQLVETRQITKHVAQILDSRMNTKYDENDKLIREVKVITLKSKLVSDFRKDFQFYKVREINNYHHAHDAYLNAVVGTALIKKYPKLESEFVYGDYKVYDVRKMIAKSEQEIGKATAKYFFYSNIMNFFKTEITLANGEIRKRPLIETNGETGEIVWDKGRDFATVRKVLSMPQVNIVKKTEVQTGGFSKESILPKRNSDKLIARKKDWDPKKYGGFDSPTVAYSVLVVAKVEKGKSKKLKSVKELLGITIMERSSFEKNPIDFLEAKGYKEVKKDLIIKLPKYSLFELENGRKRMLASAGELQKGNELALPSKYVNFLYLASHYEKLKGSPEDNEQKQLFVEQHKHYLDEIIEQISEFSKRVILADANLDKVLSAYNKHRDKPIREQAENIIHLFTLTNLGAPAAFKYFDTTIDRKRYTSTKEVLDATLIHQSITGLYETRIDLSQLGGDGGGGGGSGGGGSGGLLGRDLLTKLKAQIQFSTEGPQVTWEDRPAMCLVLNLEEEYRLHEKPVPPSIDPSWLQLFPMVWAEKAGMGLANQVPPVVVELKSDASPVAVRQYPMSKEAREGIRPHIQRFLDLGILVPCQSPWNTPLLPVKKPGTNDYRPVQDLREVNKRVQDIHPTVPNPYNLLSSLPPSHTWYSVLDLKDAFFCLKLHPNSQPLFAFEWRDPEKGNTGQLTWTRLPQGFKNSPTLFNEALHRDLASFRALNPQVVMLQYVDDLLVAAPTYRDCKEGTRRLLQELSKLGYRVSAKKAQLCREEVTYLGYLLKGGKRWLTPARKATVMKIPTPTTPRQVREFLGKAGFCRLFIPGFASLAAPLYPLTRPKVPFTWTEAHQEAFGRIKEALLSAPALALPDLTKPFALYVDEKEGVARGVLTQTLGPWRRPVAYLSKKLDPVASGWPTCLKAIAAVALLLKDADKLTLGQNVLVIAPHNLESIVRQPPDRWMTNARMTHYQSLLLNERVSFAPPAILNPATLLPVESDDTPIHICSEILAEETGTRPDLRDQPLPGVPAWYTDGSSFIMDGRRQAGAAIVDNKRTVWASNLPEGTSAQKAELIALTQALRLAEGKSINIYTDSRYAFATAHVHGAIYKQRGWLTSAGKDIKNKEEILALLEAIHLPKRVAIIHCPGHQRGTDPVATGNRKADEAAKQAAQSTRILTETTKNAGKRTADGSEFEKRTADGSEFESPKKKAKVE

SEQ ID NO: 1721 - protein, 2127 aa, synthetic construct
MPAAKRVKLDGGDKKYSIGLDIGTNSVGWAVITDEYKVPSKKFKVLGNTDRHSIKKNLIGALLFDSGETAEATRLKRTARRRYTRRKNRICYLQEIFSNEMAKVDDSFFHRLEESFLVEEDKKHERHPIFGNIVDEVAYHEKYPTIYHLRKKLVDSTDKADLRLIYLALAHMIKFRGHFLIEGDLNPDNSDVDKLFIQLVQTYNQLFEENPINASGVDAKAILSARLSKSRRLENLIAQLPGEKKNGLFGNLIALSLGLTPNFKSNFDLAEDAKLQLSKDTYDDDLDNLLAQIGDQYADLFLAAKNLSDAILLSDILRVNTEITKAPLSASMIKRYDEHHQDLTLLKALVRQQLPEKYKEIFFDQSKNGYAGYIDGGASQEEFYKFIKPILEKMDGTEELLVKLNREDLLRKQRTFDNGSIPHQIHLGELHAILRRQEDFYPFLKDNREKIEKILTFRIPYYVGPLARGNSRFAWMTRKSEETITPWNFEEVVDKGASAQSFIERMTNFDKNLPNEKVLPKHSLLYEYFTVYNELTKVKYVTEGMRKPAFLSGEQKKAIVDLLFKTNRKVTVKQLKEDYFKKIECFDSVEISGVEDRFNASLGTYHDLLKIIKDKDFLDNEENEDILEDIVLTLTLFEDREMIEERLKTYAHLFDDKVMKQLKRRRYTGWGRLSRKLINGIRDKQSGKTILDFLKSDGFANRNFMQLIHDDSLTFKEDIQKAQVSGQGDSLHEHIANLAGSPAIKKGILQTVKVVDELVKVMGRHKPENIVIEMARENQTTQKGQKNSRERMKRIEEGIKELGSQILKEHPVENTQLQNEKLYLYYLQNGRDMYVDQELDINRLSDYDVDHIVPQSFLKDDSIDNKVLTRSDKARGKSDNVPSEEVVKKMKNYWRQLLNAKLITQRKFDNLTKAERGGLSELDKAGFIKRQLVETRQITKHVAQILDSRMNTKYDENDKLIREVKVITLKSKLVSDFRKDFQFYKVREINNYHHAHDAYLNAVVGTALIKKYPKLESEFVYGDYKVYDVRKMIAKSEQEIGKATAKYFFYSNIMNFFKTEITLANGEIRKRPLIETNGETGEIVWDKGRDFATVRKVLSMPQVNIVKKTEVQTGGFSKESILPKRNSDKLIARKKDWDPKKYGGFDSPTVAYSVLVVAKVEKGKSKKLKSVKELLGITIMERSSFEKNPIDFLEAKGYKEVKKDLIIKLPKYSLFELENGRKRMLASAGELQKGNELALPSKYVNFLYLASHYEKLKGSPEDNEQKQLFVEQHKHYLDEIIEQISEFSKRVILADANLDKVLSAYNKHRDKPIREQAENIIHLFTLTNLGAPAAFKYFDTTIDRKRYTSTKEVLDATLIHQSITGLYETRIDLSQLGGDGGGSSPAPEAAAKGGLLGRDLLTKLKAQIQFSTEGPQVTWEDRPAMCLVLNLEEEYRLHEKPVPPSIDPSWLQLFPMVWAEKAGMGLANQVPPVVVELKSDASPVAVRQYPMSKEAREGIRPHIQRFLDLGILVPCQSPWNTPLLPVKKPGTNDYRPVQDLREVNKRVQDIHPTVPNPYNLLSSLPPSHTWYSVLDLKDAFFCLKLHPNSQPLFAFEWRDPEKGNTGQLTWTRLPQGFKNSPTLFNEALHRDLASFRALNPQVVMLQYVDDLLVAAPTYRDCKEGTRRLLQELSKLGYRVSAKKAQLCREEVTYLGYLLKGGKRWLTPARKATVMKIPTPTTPRQVREFLGKAGFCRLFIPGFASLAAPLYPLTRPKVPFTWTEAHQEAFGRIKEALLSAPALALPDLTKPFALYVDEKEGVARGVLTQTLGPWRRPVAYLSKKLDPVASGWPTCLKAIAAVALLLKDADKLTLGQNVLVIAPHNLESIVRQPPDRWMTNARMTHYQSLLLNERVSFAPPAILNPATLLPVESDDTPIHICSEILAEETGTRPDLRDQPLPGVPAWYTDGSSFIMDGRRQAGAAIVDNKRTVWASNLPEGTSAQKAELIALTQALRLAEGKSINIYTDSRYAFATAHVHGAIYKQRGWLTSAGKDIKNKEEILALLEAIHLPKRVAIIHCPGHQRGTDPVATGNRKADEAAKQAAQSTRILTETTKNAGKRTADGSEFEKRTADGSEFESPKKKAKVE

SEQ ID NO: 1722 - protein, 2127 aa, synthetic construct
MPAAKRVKLDGGDKKYSIGLDIGTNSVGWAVITDEYKVPSKKFKVLGNTDRHSIKKNLIGALLFDSGETAEATRLKRTARRRYTRRKNRICYLQEIFSNEMAKVDDSFFHRLEESFLVEEDKKHERHPIFGNIVDEVAYHEKYPTIYHLRKKLVDSTDKADLRLIYLALAHMIKFRGHFLIEGDLNPDNSDVDKLFIQLVQTYNQLFEENPINASGVDAKAILSARLSKSRRLENLIAQLPGEKKNGLFGNLIALSLGLTPNFKSNFDLAEDAKLQLSKDTYDDDLDNLLAQIGDQYADLFLAAKNLSDAILLSDILRVNTEITKAPLSASMIKRYDEHHQDLTLLKALVRQQLPEKYKEIFFDQSKNGYAGYIDGGASQEEFYKFIKPILEKMDGTEELLVKLNREDLLRKQRTFDNGSIPHQIHLGELHAILRRQEDFYPFLKDNREKIEKILTFRIPYYVGPLARGNSRFAWMTRKSEETITPWNFEEVVDKGASAQSFIERMTNFDKNLPNEKVLPKHSLLYEYFTVYNELTKVKYVTEGMRKPAFLSGEQKKAIVDLLFKTNRKVTVKQLKEDYFKKIECFDSVEISGVEDRFNASLGTYHDLLKIIKDKDFLDNEENEDILEDIVLTLTLFEDREMIEERLKTYAHLFDDKVMKQLKRRRYTGWGRLSRKLINGIRDKQSGKTILDFLKSDGFANRNFMQLIHDDSLTFKEDIQKAQVSGQGDSLHEHIANLAGSPAIKKGILQTVKVVDELVKVMGRHKPENIVIEMARENQTTQKGQKNSRERMKRIEEGIKELGSQILKEHPVENTQLQNEKLYLYYLQNGRDMYVDQELDINRLSDYDVDHIVPQSFLKDDSIDNKVLTRSDKARGKSDNVPSEEVVKKMKNYWRQLLNAKLITQRKFDNLTKAERGGLSELDKAGFIKRQLVETRQITKHVAQILDSRMNTKYDENDKLIREVKVITLKSKLVSDFRKDFQFYKVREINNYHHAHDAYLNAVVGTALIKKYPKLESEFVYGDYKVYDVRKMIAKSEQEIGKATAKYFFYSNIMNFFKTEITLANGEIRKRPLIETNGETGEIVWDKGRDFATVRKVLSMPQVNIVKKTEVQTGGFSKESILPKRNSDKLIARKKDWDPKKYGGFDSPTVAYSVLVVAKVEKGKSKKLKSVKELLGITIMERSSFEKNPIDFLEAKGYKEVKKDLIIKLPKYSLFELENGRKRMLASAGELQKGNELALPSKYVNFLYLASHYEKLKGSPEDNEQKQLFVEQHKHYLDEIIEQISEFSKRVILADANLDKVLSAYNKHRDKPIREQAENIIHLFTLTNLGAPAAFKYFDTTIDRKRYTSTKEVLDATLIHQSITGLYETRIDLSQLGGDGGGGSEAAAKGSSGGLLGRDLLTKLKAQIQFSTEGPQVTWEDRPAMCLVLNLEEEYRLHEKPVPPSIDPSWLQLFPMVWAEKAGMGLANQVPPVVVELKSDASPVAVRQYPMSKEAREGIRPHIQRFLDLGILVPCQSPWNTPLLPVKKPGTNDYRPVQDLREVNKRVQDIHPTVPNPYNLLSSLPPSHTWYSVLDLKDAFFCLKLHPNSQPLFAFEWRDPEKGNTGQLTWTRLPQGFKNSPTLFNEALHRDLASFRALNPQVVMLQYVDDLLVAAPTYRDCKEGTRRLLQELSKLGYRVSAKKAQLCREEVTYLGYLLKGGKRWLTPARKATVMKIPTPTTPRQVREFLGKAGFCRLFIPGFASLAAPLYPLTRPKVPFTWTEAHQEAFGRIKEALLSAPALALPDLTKPFALYVDEKEGVARGVLTQTLGPWRRPVAYLSKKLDPVASGWPTCLKAIAAVALLLKDADKLTLGQNVLVIAPHNLESIVRQPPDRWMTNARMTHYQSLLLNERVSFAPPAILNPATLLPVESDDTPIHICSEILAEETGTRPDLRDQPLPGVPAWYTDGSSFIMDGRRQAGAAIVDNKRTVWASNLPEGTSAQKAELIALTQALRLAEGKSINIYTDSRYAFATAHVHGAIYKQRGWLTSAGKDIKNKEEILALLEAIHLPKRVAIIHCPGHQRGTDPVATGNRKADEAAKQAAQSTRILTETTKNAGKRTADGSEFEKRTADGSEFESPKKKAKVE

SEQ ID NO: 1723 - protein, 2127 aa, synthetic construct
MPAAKRVKLDGGDKKYSIGLDIGTNSVGWAVITDEYKVPSKKFKVLGNTDRHSIKKNLIGALLFDSGETAEATRLKRTARRRYTRRKNRICYLQEIFSNEMAKVDDSFFHRLEESFLVEEDKKHERHPIFGNIVDEVAYHEKYPTIYHLRKKLVDSTDKADLRLIYLALAHMIKFRGHFLIEGDLNPDNSDVDKLFIQLVQTYNQLFEENPINASGVDAKAILSARLSKSRRLENLIAQLPGEKKNGLFGNLIALSLGLTPNFKSNFDLAEDAKLQLSKDTYDDDLDNLLAQIGDQYADLFLAAKNLSDAILLSDILRVNTEITKAPLSASMIKRYDEHHQDLTLLKALVRQQLPEKYKEIFFDQSKNGYAGYIDGGASQEEFYKFIKPILEKMDGTEELLVKLNREDLLRKQRTFDNGSIPHQIHLGELHAILRRQEDFYPFLKDNREKIEKILTFRIPYYVGPLARGNSRFAWMTRKSEETITPWNFEEVVDKGASAQSFIERMTNFDKNLPNEKVLPKHSLLYEYFTVYNELTKVKYVTEGMRKPAFLSGEQKKAIVDLLFKTNRKVTVKQLKEDYFKKIECFDSVEISGVEDRFNASLGTYHDLLKIIKDKDFLDNEENEDILEDIVLTLTLFEDREMIEERLKTYAHLFDDKVMKQLKRRRYTGWGRLSRKLINGIRDKQSGKTILDFLKSDGFANRNFMQLIHDDSLTFKEDIQKAQVSGQGDSLHEHIANLAGSPAIKKGILQTVKVVDELVKVMGRHKPENIVIEMARENQTTQKGQKNSRERMKRIEEGIKELGSQILKEHPVENTQLQNEKLYLYYLQNGRDMYVDQELDINRLSDYDVDHIVPQSFLKDDSIDNKVLTRSDKARGKSDNVPSEEVVKKMKNYWRQLLNAKLITQRKFDNLTKAERGGLSELDKAGFIKRQLVETRQITKHVAQILDSRMNTKYDENDKLIREVKVITLKSKLVSDFRKDFQFYKVREINNYHHAHDAYLNAVVGTALIKKYPKLESEFVYGDYKVYDVRKMIAKSEQEIGKATAKYFFYSNIMNFFKTEITLANGEIRKRPLIETNGETGEIVWDKGRDFATVRKVLSMPQVNIVKKTEVQTGGFSKESILPKRNSDKLIARKKDWDPKKYGGFDSPTVAYSVLVVAKVEKGKSKKLKSVKELLGITIMERSSFEKNPIDFLEAKGYKEVKKDLIIKLPKYSLFELENGRKRMLASAGELQKGNELALPSKYVNFLYLASHYEKLKGSPEDNEQKQLFVEQHKHYLDEIIEQISEFSKRVILADANLDKVLSAYNKHRDKPIREQAENIIHLFTLTNLGAPAAFKYFDTTIDRKRYTSTKEVLDATLIHQSITGLYETRIDLSQLGGDGGEAAAKPAPGGSGGLLGRDLLTKLKAQIQFSTEGPQVTWEDRPAMCLVLNLEEEYRLHEKPVPPSIDPSWLQLFPMVWAEKAGMGLANQVPPVVVELKSDASPVAVRQYPMSKEAREGIRPHIQRFLDLGILVPCQSPWNTPLLPVKKPGTNDYRPVQDLREVNKRVQDIHPTVPNPYNLLSSLPPSHTWYSVLDLKDAFFCLKLHPNSQPLFAFEWRDPEKGNTGQLTWTRLPQGFKNSPTLFNEALHRDLASFRALNPQVVMLQYVDDLLVAAPTYRDCKEGTRRLLQELSKLGYRVSAKKAQLCREEVTYLGYLLKGGKRWLTPARKATVMKIPTPTTPRQVREFLGKAGFCRLFIPGFASLAAPLYPLTRPKVPFTWTEAHQEAFGRIKEALLSAPALALPDLTKPFALYVDEKEGVARGVLTQTLGPWRRPVAYLSKKLDPVASGWPTCLKAIAAVALLLKDADKLTLGQNVLVIAPHNLESIVRQPPDRWMTNARMTHYQSLLLNERVSFAPPAILNPATLLPVESDDTPIHICSEILAEETGTRPDLRDQPLPGVPAWYTDGSSFIMDGRRQAGAAIVDNKRTVWASNLPEGTSAQKAELIALTQALRLAEGKSINIYTDSRYAFATAHVHGAIYKQRGWLTSAGKDIKNKEEILALLEAIHLPKRVAIIHCPGHQRGTDPVATGNRKADEAAKQAAQSTRILTETTKNAGKRTADGSEFEKRTADGSEFESPKKKAKVE

SEQ ID NO: 1724 - protein, 2125 aa, synthetic construct
MPAAKRVKLDGGDKKYSIGLDIGTNSVGWAVITDEYKVPSKKFKVLGNTDRHSIKKNLIGALLFDSGETAEATRLKRTARRRYTRRKNRICYLQEIFSNEMAKVDDSFFHRLEESFLVEEDKKHERHPIFGNIVDEVAYHEKYPTIYHLRKKLVDSTDKADLRLIYLALAHMIKFRGHFLIEGDLNPDNSDVDKLFIQLVQTYNQLFEENPINASGVDAKAILSARLSKSRRLENLIAQLPGEKKNGLFGNLIALSLGLTPNFKSNFDLAEDAKLQLSKDTYDDDLDNLLAQIGDQYADLFLAAKNLSDAILLSDILRVNTEITKAPLSASMIKRYDEHHQDLTLLKALVRQQLPEKYKEIFFDQSKNGYAGYIDGGASQEEFYKFIKPILEKMDGTEELLVKLNREDLLRKQRTFDNGSIPHQIHLGELHAILRRQEDFYPFLKDNREKIEKILTFRIPYYVGPLARGNSRFAWMTRKSEETITPWNFEEVVDKGASAQSFIERMTNFDKNLPNEKVLPKHSLLYEYFTVYNELTKVKYVTEGMRKPAFLSGEQKKAIVDLLFKTNRKVTVKQLKEDYFKKIECFDSVEISGVEDRFNASLGTYHDLLKIIKDKDFLDNEENEDILEDIVLTLTLFEDREMIEERLKTYAHLFDDKVMKQLKRRRYTGWGRLSRKLINGIRDKQSGKTILDFLKSDGFANRNFMQLIHDDSLTFKEDIQKAQVSGQGDSLHEHIANLAGSPAIKKGILQTVKVVDELVKVMGRHKPENIVIEMARENQTTQKGQKNSRERMKRIEEGIKELGSQILKEHPVENTQLQNEKLYLYYLQNGRDMYVDQELDINRLSDYDVDHIVPQSFLKDDSIDNKVLTRSDKARGKSDNVPSEEVVKKMKNYWRQLLNAKLITQRKFDNLTKAERGGLSELDKAGFIKRQLVETRQITKHVAQILDSRMNTKYDENDKLIREVKVITLKSKLVSDFRKDFQFYKVREINNYHHAHDAYLNAVVGTALIKKYPKLESEFVYGDYKVYDVRKMIAKSEQEIGKATAKYFFYSNIMNFFKTEITLANGEIRKRPLIETNGETGEIVWDKGRDFATVRKVLSMPQVNIVKKTEVQTGGFSKESILPKRNSDKLIARKKDWDPKKYGGFDSPTVAYSVLVVAKVEKGKSKKLKSVKELLGITIMERSSFEKNPIDFLEAKGYKEVKKDLIIKLPKYSLFELENGRKRMLASAGELQKGNELALPSKYVNFLYLASHYEKLKGSPEDNEQKQLFVEQHKHYLDEIIEQISEFSKRVILADANLDKVLSAYNKHRDKPIREQAENIIHLFTLTNLGAPAAFKYFDTTIDRKRYTSTKEVLDATLIHQSITGLYETRIDLSQLGGDGGGGSGSSGGGGGLLGRDLLTKLKAQIQFSTEGPQVTWEDRPAMCLVLNLEEEYRLHEKPVPPSIDPSWLQLFPMVWAEKAGMGLANQVPPVVVELKSDASPVAVRQYPMSKEAREGIRPHIQRFLDLGILVPCQSPWNTPLLPVKKPGTNDYRPVQDLREVNKRVQDIHPTVPNPYNLLSSLPPSHTWYSVLDLKDAFFCLKLHPNSQPLFAFEWRDPEKGNTGQLTWTRLPQGFKNSPTLFNEALHRDLASFRALNPQVVMLQYVDDLLVAAPTYRDCKEGTRRLLQELSKLGYRVSAKKAQLCREEVTYLGYLLKGGKRWLTPARKATVMKIPTPTTPRQVREFLGKAGFCRLFIPGFASLAAPLYPLTRPKVPFTWTEAHQEAFGRIKEALLSAPALALPDLTKPFALYVDEKEGVARGVLTQTLGPWRRPVAYLSKKLDPVASGWPTCLKAIAAVALLLKDADKLTLGQNVLVIAPHNLESIVRQPPDRWMTNARMTHYQSLLLNERVSFAPPAILNPATLLPVESDDTPIHICSEILAEETGTRPDLRDQPLPGVPAWYTDGSSFIMDGRRQAGAAIVDNKRTVWASNLPEGTSAQKAELIALTQALRLAEGKSINIYTDSRYAFATAHVHGAIYKQRGWLTSAGKDIKNKEEILALLEAIHLPKRVAIIHCPGHQRGTDPVATGNRKADEAAKQAAQSTRILTETTKNAGKRTADGSEFEKRTADGSEFESPKKKAKVE

SEQ ID NO: 1725 - protein, 2127 aa, synthetic construct
MPAAKRVKLDGGDKKYSIGLDIGTNSVGWAVITDEYKVPSKKFKVLGNTDRHSIKKNLIGALLFDSGETAEATRLKRTARRRYTRRKNRICYLQEIFSNEMAKVDDSFFHRLEESFLVEEDKKHERHPIFGNIVDEVAYHEKYPTIYHLRKKLVDSTDKADLRLIYLALAHMIKFRGHFLIEGDLNPDNSDVDKLFIQLVQTYNQLFEENPINASGVDAKAILSARLSKSRRLENLIAQLPGEKKNGLFGNLIALSLGLTPNFKSNFDLAEDAKLQLSKDTYDDDLDNLLAQIGDQYADLFLAAKNLSDAILLSDILRVNTEITKAPLSASMIKRYDEHHQDLTLLKALVRQQLPEKYKEIFFDQSKNGYAGYIDGGASQEEFYKFIKPILEKMDGTEELLVKLNREDLLRKQRTFDNGSIPHQIHLGELHAILRRQEDFYPFLKDNREKIEKILTFRIPYYVGPLARGNSRFAWMTRKSEETITPWNFEEVVDKGASAQSFIERMTNFDKNLPNEKVLPKHSLLYEYFTVYNELTKVKYVTEGMRKPAFLSGEQKKAIVDLLFKTNRKVTVKQLKEDYFKKIECFDSVEISGVEDRFNASLGTYHDLLKIIKDKDFLDNEENEDILEDIVLTLTLFEDREMIEERLKTYAHLFDDKVMKQLKRRRYTGWGRLSRKLINGIRDKQSGKTILDFLKSDGFANRNFMQLIHDDSLTFKEDIQKAQVSGQGDSLHEHIANLAGSPAIKKGILQTVKVVDELVKVMGRHKPENIVIEMARENQTTQKGQKNSRERMKRIEEGIKELGSQILKEHPVENTQLQNEKLYLYYLQNGRDMYVDQELDINRLSDYDVDHIVPQSFLKDDSIDNKVLTRSDKARGKSDNVPSEEVVKKMKNYWRQLLNAKLITQRKFDNLTKAERGGLSELDKAGFIKRQLVETRQITKHVAQILDSRMNTKYDENDKLIREVKVITLKSKLVSDFRKDFQFYKVREINNYHHAHDAYLNAVVGTALIKKYPKLESEFVYGDYKVYDVRKMIAKSEQEIGKATAKYFFYSNIMNFFKTEITLANGEIRKRPLIETNGETGEIVWDKGRDFATVRKVLSMPQVNIVKKTEVQTGGFSKESILPKRNSDKLIARKKDWDPKKYGGFDSPTVAYSVLVVAKVEKGKSKKLKSVKELLGITIMERSSFEKNPIDFLEAKGYKEVKKDLIIKLPKYSLFELENGRKRMLASAGELQKGNELALPSKYVNFLYLASHYEKLKGSPEDNEQKQLFVEQHKHYLDEIIEQISEFSKRVILADANLDKVLSAYNKHRDKPIREQAENIIHLFTLTNLGAPAAFKYFDTTIDRKRYTSTKEVLDATLIHQSITGLYETRIDLSQLGGDGGGSSEAAAKGGSGGLLGRDLLTKLKAQIQFSTEGPQVTWEDRPAMCLVLNLEEEYRLHEKPVPPSIDPSWLQLFPMVWAEKAGMGLANQVPPVVVELKSDASPVAVRQYPMSKEAREGIRPHIQRFLDLGILVPCQSPWNTPLLPVKKPGTNDYRPVQDLREVNKRVQDIHPTVPNPYNLLSSLPPSHTWYSVLDLKDAFFCLKLHPNSQPLFAFEWRDPEKGNTGQLTWTRLPQGFKNSPTLFNEALHRDLASFRALNPQVVMLQYVDDLLVAAPTYRDCKEGTRRLLQELSKLGYRVSAKKAQLCREEVTYLGYLLKGGKRWLTPARKATVMKIPTPTTPRQVREFLGKAGFCRLFIPGFASLAAPLYPLTRPKVPFTWTEAHQEAFGRIKEALLSAPALALPDLTKPFALYVDEKEGVARGVLTQTLGPWRRPVAYLSKKLDPVASGWPTCLKAIAAVALLLKDADKLTLGQNVLVIAPHNLESIVRQPPDRWMTNARMTHYQSLLLNERVSFAPPAILNPATLLPVESDDTPIHICSEILAEETGTRPDLRDQPLPGVPAWYTDGSSFIMDGRRQAGAAIVDNKRTVWASNLPEGTSAQKAELIALTQALRLAEGKSINIYTDSRYAFATAHVHGAIYKQRGWLTSAGKDIKNKEEILALLEAIHLPKRVAIIHCPGHQRGTDPVATGNRKADEAAKQAAQSTRILTETTKNAGKRTADGSEFEKRTADGSEFESPKKKAKVE

SEQ ID NO: 1726 - protein, 2127 aa, synthetic construct
MPAAKRVKLDGGDKKYSIGLDIGTNSVGWAVITDEYKVPSKKFKVLGNTDRHSIKKNLIGALLFDSGETAEATRLKRTARRRYTRRKNRICYLQEIFSNEMAKVDDSFFHRLEESFLVEEDKKHERHPIFGNIVDEVAYHEKYPTIYHLRKKLVDSTDKADLRLIYLALAHMIKFRGHFLIEGDLNPDNSDVDKLFIQLVQTYNQLFEENPINASGVDAKAILSARLSKSRRLENLIAQLPGEKKNGLFGNLIALSLGLTPNFKSNFDLAEDAKLQLSKDTYDDDLDNLLAQIGDQYADLFLAAKNLSDAILLSDILRVNTEITKAPLSASMIKRYDEHHQDLTLLKALVRQQLPEKYKEIFFDQSKNGYAGYIDGGASQEEFYKFIKPILEKMDGTEELLVKLNREDLLRKQRTFDNGSIPHQIHLGELHAILRRQEDFYPFLKDNREKIEKILTFRIPYYVGPLARGNSRFAWMTRKSEETITPWNFEEVVDKGASAQSFIERMTNFDKNLPNEKVLPKHSLLYEYFTVYNELTKVKYVTEGMRKPAFLSGEQKKAIVDLLFKTNRKVTVKQLKEDYFKKIECFDSVEISGVEDRFNASLGTYHDLLKIIKDKDFLDNEENEDILEDIVLTLTLFEDREMIEERLKTYAHLFDDKVMKQLKRRRYTGWGRLSRKLINGIRDKQSGKTILDFLKSDGFANRNFMQLIHDDSLTFKEDIQKAQVSGQGDSLHEHIANLAGSPAIKKGILQTVKVVDELVKVMGRHKPENIVIEMARENQTTQKGQKNSRERMKRIEEGIKELGSQILKEHPVENTQLQNEKLYLYYLQNGRDMYVDQELDINRLSDYDVDHIVPQSFLKDDSIDNKVLTRSDKARGKSDNVPSEEVVKKMKNYWRQLLNAKLITQRKFDNLTKAERGGLSELDKAGFIKRQLVETRQITKHVAQILDSRMNTKYDENDKLIREVKVITLKSKLVSDFRKDFQFYKVREINNYHHAHDAYLNAVVGTALIKKYPKLESEFVYGDYKVYDVRKMIAKSEQEIGKATAKYFFYSNIMNFFKTEITLANGEIRKRPLIETNGETGEIVWDKGRDFATVRKVLSMPQVNIVKKTEVQTGGFSKESILPKRNSDKLIARKKDWDPKKYGGFDSPTVAYSVLVVAKVEKGKSKKLKSVKELLGITIMERSSFEKNPIDFLEAKGYKEVKKDLIIKLPKYSLFELENGRKRMLASAGELQKGNELALPSKYVNFLYLASHYEKLKGSPEDNEQKQLFVEQHKHYLDEIIEQISEFSKRVILADANLDKVLSAYNKHRDKPIREQAENIIHLFTLTNLGAPAAFKYFDTTIDRKRYTSTKEVLDATLIHQSITGLYETRIDLSQLGGDGGGGGGSSEAAAKGGLLGRDLLTKLKAQIQFSTEGPQVTWEDRPAMCLVLNLEEEYRLHEKPVPPSIDPSWLQLFPMVWAEKAGMGLANQVPPVVVELKSDASPVAVRQYPMSKEAREGIRPHIQRFLDLGILVPCQSPWNTPLLPVKKPGTNDYRPVQDLREVNKRVQDIHPTVPNPYNLLSSLPPSHTWYSVLDLKDAFFCLKLHPNSQPLFAFEWRDPEKGNTGQLTWTRLPQGFKNSPTLFNEALHRDLASFRALNPQVVMLQYVDDLLVAAPTYRDCKEGTRRLLQELSKLGYRVSAKKAQLCREEVTYLGYLLKGGKRWLTPARKATVMKIPTPTTPRQVREFLGKAGFCRLFIPGFASLAAPLYPLTRPKVPFTWTEAHQEAFGRIKEALLSAPALALPDLTKPFALYVDEKEGVARGVLTQTLGPWRRPVAYLSKKLDPVASGWPTCLKAIAAVALLLKDADKLTLGQNVLVIAPHNLESIVRQPPDRWMTNARMTHYQSLLLNERVSFAPPAILNPATLLPVESDDTPIHICSEILAEETGTRPDLRDQPLPGVPAWYTDGSSFIMDGRRQAGAAIVDNKRTVWASNLPEGTSAQKAELIALTQALRLAEGKSINIYTDSRYAFATAHVHGAIYKQRGWLTSAGKDIKNKEEILALLEAIHLPKRVAIIHCPGHQRGTDPVATGNRKADEAAKQAAQSTRILTETTKNAGKRTADGSEFEKRTADGSEFESPKKKAKVE

SEQ ID NO: 1727 - protein, 2121 aa, synthetic construct
MPAAKRVKLDGGDKKYSIGLDIGTNSVGWAVITDEYKVPSKKFKVLGNTDRHSIKKNLIGALLFDSGETAEATRLKRTARRRYTRRKNRICYLQEIFSNEMAKVDDSFFHRLEESFLVEEDKKHERHPIFGNIVDEVAYHEKYPTIYHLRKKLVDSTDKADLRLIYLALAHMIKFRGHFLIEGDLNPDNSDVDKLFIQLVQTYNQLFEENPINASGVDAKAILSARLSKSRRLENLIAQLPGEKKNGLFGNLIALSLGLTPNFKSNFDLAEDAKLQLSKDTYDDDLDNLLAQIGDQYADLFLAAKNLSDAILLSDILRVNTEITKAPLSASMIKRYDEHHQDLTLLKALVRQQLPEKYKEIFFDQSKNGYAGYIDGGASQEEFYKFIKPILEKMDGTEELLVKLNREDLLRKQRTFDNGSIPHQIHLGELHAILRRQEDFYPFLKDNREKIEKILTFRIPYYVGPLARGNSRFAWMTRKSEETITPWNFEEVVDKGASAQSFIERMTNFDKNLPNEKVLPKHSLLYEYFTVYNELTKVKYVTEGMRKPAFLSGEQKKAIVDLLFKTNRKVTVKQLKEDYFKKIECFDSVEISGVEDRFNASLGTYHDLLKIIKDKDFLDNEENEDILEDIVLTLTLFEDREMIEERLKTYAHLFDDKVMKQLKRRRYTGWGRLSRKLINGIRDKQSGKTILDFLKSDGFANRNFMQLIHDDSLTFKEDIQKAQVSGQGDSLHEHIANLAGSPAIKKGILQTVKVVDELVKVMGRHKPENIVIEMARENQTTQKGQKNSRERMKRIEEGIKELGSQILKEHPVENTQLQNEKLYLYYLQNGRDMYVDQELDINRLSDYDVDHIVPQSFLKDDSIDNKVLTRSDKARGKSDNVPSEEVVKKMKNYWRQLLNAKLITQRKFDNLTKAERGGLSELDKAGFIKRQLVETRQITKHVAQILDSRMNTKYDENDKLIREVKVITLKSKLVSDFRKDFQFYKVREINNYHHAHDAYLNAVVGTALIKKYPKLESEFVYGDYKVYDVRKMIAKSEQEIGKATAKYFFYSNIMNFFKTEITLANGEIRKRPLIETNGETGEIVWDKGRDFATVRKVLSMPQVNIVKKTEVQTGGFSKESILPKRNSDKLIARKKDWDPKKYGGFDSPTVAYSVLVVAKVEKGKSKKLKSVKELLGITIMERSSFEKNPIDFLEAKGYKEVKKDLIIKLPKYSLFELENGRKRMLASAGELQKGNELALPSKYVNFLYLASHYEKLKGSPEDNEQKQLFVEQHKHYLDEIIEQISEFSKRVILADANLDKVLSAYNKHRDKPIREQAENIIHLFTLTNLGAPAAFKYFDTTIDRKRYTSTKEVLDATLIHQSITGLYETRIDLSQLGGDGGPAPAPGGLLGRDLLTKLKAQIQFSTEGPQVTWEDRPAMCLVLNLEEEYRLHEKPVPPSIDPSWLQLFPMVWAEKAGMGLANQVPPVVVELKSDASPVAVRQYPMSKEAREGIRPHIQRFLDLGILVPCQSPWNTPLLPVKKPGTNDYRPVQDLREVNKRVQDIHPTVPNPYNLLSSLPPSHTWYSVLDLKDAFFCLKLHPNSQPLFAFEWRDPEKGNTGQLTWTRLPQGFKNSPTLFNEALHRDLASFRALNPQVVMLQYVDDLLVAAPTYRDCKEGTRRLLQELSKLGYRVSAKKAQLCREEVTYLGYLLKGGKRWLTPARKATVMKIPTPTTPRQVREFLGKAGFCRLFIPGFASLAAPLYPLTRPKVPFTWTEAHQEAFGRIKEALLSAPALALPDLTKPFALYVDEKEGVARGVLTQTLGPWRRPVAYLSKKLDPVASGWPTCLKAIAAVALLLKDADKLTLGQNVLVIAPHNLESIVRQPPDRWMTNARMTHYQSLLLNERVSFAPPAILNPATLLPVESDDTPIHICSEILAEETGTRPDLRDQPLPGVPAWYTDGSSFIMDGRRQAGAAIVDNKRTVWASNLPEGTSAQKAELIALTQALRLAEGKSINIYTDSRYAFATAHVHGAIYKQRGWLTSAGKDIKNKEEILALLEAIHLPKRVAIIHCPGHQRGTDPVATGNRKADEAAKQAAQSTRILTETTKNAGKRTADGSEFEKRTADGSEFESPKKKAKVE

SEQ ID NO: 1728 - protein, 2122 aa, synthetic construct
MPAAKRVKLDGGDKKYSIGLDIGTNSVGWAVITDEYKVPSKKFKVLGNTDRHSIKKNLIGALLFDSGETAEATRLKRTARRRYTRRKNRICYLQEIFSNEMAKVDDSFFHRLEESFLVEEDKKHERHPIFGNIVDEVAYHEKYPTIYHLRKKLVDSTDKADLRLIYLALAHMIKFRGHFLIEGDLNPDNSDVDKLFIQLVQTYNQLFEENPINASGVDAKAILSARLSKSRRLENLIAQLPGEKKNGLFGNLIALSLGLTPNFKSNFDLAEDAKLQLSKDTYDDDLDNLLAQIGDQYADLFLAAKNLSDAILLSDILRVNTEITKAPLSASMIKRYDEHHQDLTLLKALVRQQLPEKYKEIFFDQSKNGYAGYIDGGASQEEFYKFIKPILEKMDGTEELLVKLNREDLLRKQRTFDNGSIPHQIHLGELHAILRRQEDFYPFLKDNREKIEKILTFRIPYYVGPLARGNSRFAWMTRKSEETITPWNFEEVVDKGASAQSFIERMTNFDKNLPNEKVLPKHSLLYEYFTVYNELTKVKYVTEGMRKPAFLSGEQKKAIVDLLFKTNRKVTVKQLKEDYFKKIECFDSVEISGVEDRFNASLGTYHDLLKIIKDKDFLDNEENEDILEDIVLTLTLFEDREMIEERLKTYAHLFDDKVMKQLKRRRYTGWGRLSRKLINGIRDKQSGKTILDFLKSDGFANRNFMQLIHDDSLTFKEDIQKAQVSGQGDSLHEHIANLAGSPAIKKGILQTVKVVDELVKVMGRHKPENIVIEMARENQTTQKGQKNSRERMKRIEEGIKELGSQILKEHPVENTQLQNEKLYLYYLQNGRDMYVDQELDINRLSDYDVDHIVPQSFLKDDSIDNKVLTRSDKARGKSDNVPSEEVVKKMKNYWRQLLNAKLITQRKFDNLTKAERGGLSELDKAGFIKRQLVETRQITKHVAQILDSRMNTKYDENDKLIREVKVITLKSKLVSDFRKDFQFYKVREINNYHHAHDAYLNAVVGTALIKKYPKLESEFVYGDYKVYDVRKMIAKSEQEIGKATAKYFFYSNIMNFFKTEITLANGEIRKRPLIETNGETGEIVWDKGRDFATVRKVLSMPQVNIVKKTEVQTGGFSKESILPKRNSDKLIARKKDWDPKKYGGFDSPTVAYSVLVVAKVEKGKSKKLKSVKELLGITIMERSSFEKNPIDFLEAKGYKEVKKDLIIKLPKYSLFELENGRKRMLASAGELQKGNELALPSKYVNFLYLASHYEKLKGSPEDNEQKQLFVEQHKHYLDEIIEQISEFSKRVILADANLDKVLSAYNKHRDKPIREQAENIIHLFTLTNLGAPAAFKYFDTTIDRKRYTSTKEVLDATLIHQSITGLYETRIDLSQLGGDGGPAPGGSGGLLGRDLLTKLKAQIQFSTEGPQVTWEDRPAMCLVLNLEEEYRLHEKPVPPSIDPSWLQLFPMVWAEKAGMGLANQVPPVVVELKSDASPVAVRQYPMSKEAREGIRPHIQRFLDLGILVPCQSPWNTPLLPVKKPGTNDYRPVQDLREVNKRVQDIHPTVPNPYNLLSSLPPSHTWYSVLDLKDAFFCLKLHPNSQPLFAFEWRDPEKGNTGQLTWTRLPQGFKNSPTLFNEALHRDLASFRALNPQVVMLQYVDDLLVAAPTYRDCKEGTRRLLQELSKLGYRVSAKKAQLCREEVTYLGYLLKGGKRWLTPARKATVMKIPTPTTPRQVREFLGKAGFCRLFIPGFASLAAPLYPLTRPKVPFTWTEAHQEAFGRIKEALLSAPALALPDLTKPFALYVDEKEGVARGVLTQTLGPWRRPVAYLSKKLDPVASGWPTCLKAIAAVALLLKDADKLTLGQNVLVIAPHNLESIVRQPPDRWMTNARMTHYQSLLLNERVSFAPPAILNPATLLPVESDDTPIHICSEILAEETGTRPDLRDQPLPGVPAWYTDGSSFIMDGRRQAGAAIVDNKRTVWASNLPEGTSAQKAELIALTQALRLAEGKSINIYTDSRYAFATAHVHGAIYKQRGWLTSAGKDIKNKEEILALLEAIHLPKRVAIIHCPGHQRGTDPVATGNRKADEAAKQAAQSTRILTETTKNAGKRTADGSEFEKRTADGSEFESPKKKAKVE

SEQ ID NO: 1729 - protein, 2131 aa, synthetic construct
MPAAKRVKLDGGDKKYSIGLDIGTNSVGWAVITDEYKVPSKKFKVLGNTDRHSIKKNLIGALLFDSGETAEATRLKRTARRRYTRRKNRICYLQEIFSNEMAKVDDSFFHRLEESFLVEEDKKHERHPIFGNIVDEVAYHEKYPTIYHLRKKLVDSTDKADLRLIYLALAHMIKFRGHFLIEGDLNPDNSDVDKLFIQLVQTYNQLFEENPINASGVDAKAILSARLSKSRRLENLIAQLPGEKKNGLFGNLIALSLGLTPNFKSNFDLAEDAKLQLSKDTYDDDLDNLLAQIGDQYADLFLAAKNLSDAILLSDILRVNTEITKAPLSASMIKRYDEHHQDLTLLKALVRQQLPEKYKEIFFDQSKNGYAGYIDGGASQEEFYKFIKPILEKMDGTEELLVKLNREDLLRKQRTFDNGSIPHQIHLGELHAILRRQEDFYPFLKDNREKIEKILTFRIPYYVGPLARGNSRFAWMTRKSEETITPWNFEEVVDKGASAQSFIERMTNFDKNLPNEKVLPKHSLLYEYFTVYNELTKVKYVTEGMRKPAFLSGEQKKAIVDLLFKTNRKVTVKQLKEDYFKKIECFDSVEISGVEDRFNASLGTYHDLLKIIKDKDFLDNEENEDILEDIVLTLTLFEDREMIEERLKTYAHLFDDKVMKQLKRRRYTGWGRLSRKLINGIRDKQSGKTILDFLKSDGFANRNFMQLIHDDSLTFKEDIQKAQVSGQGDSLHEHIANLAGSPAIKKGILQTVKVVDELVKVMGRHKPENIVIEMARENQTTQKGQKNSRERMKRIEEGIKELGSQILKEHPVENTQLQNEKLYLYYLQNGRDMYVDQELDINRLSDYDVDHIVPQSFLKDDSIDNKVLTRSDKARGKSDNVPSEEVVKKMKNYWRQLLNAKLITQRKFDNLTKAERGGLSELDKAGFIKRQLVETRQITKHVAQILDSRMNTKYDENDKLIREVKVITLKSKLVSDFRKDFQFYKVREINNYHHAHDAYLNAVVGTALIKKYPKLESEFVYGDYKVYDVRKMIAKSEQEIGKATAKYFFYSNIMNFFKTEITLANGEIRKRPLIETNGETGEIVWDKGRDFATVRKVLSMPQVNIVKKTEVQTGGFSKESILPKRNSDKLIARKKDWDPKKYGGFDSPTVAYSVLVVAKVEKGKSKKLKSVKELLGITIMERSSFEKNPIDFLEAKGYKEVKKDLIIKLPKYSLFELENGRKRMLASAGELQKGNELALPSKYVNFLYLASHYEKLKGSPEDNEQKQLFVEQHKHYLDEIIEQISEFSKRVILADANLDKVLSAYNKHRDKPIREQAENIIHLFTLTNLGAPAAFKYFDTTIDRKRYTSTKEVLDATLIHQSITGLYETRIDLSQLGGDGGGGGGSGGGGSGGGGSGGLLGRDLLTKLKAQIQFSTEGPQVTWEDRPAMCLVLNLEEEYRLHEKPVPPSIDPSWLQLFPMVWAEKAGMGLANQVPPVVVELKSDASPVAVRQYPMSKEAREGIRPHIQRFLDLGILVPCQSPWNTPLLPVKKPGTNDYRPVQDLREVNKRVQDIHPTVPNPYNLLSSLPPSHTWYSVLDLKDAFFCLKLHPNSQPLFAFEWRDPEKGNTGQLTWTRLPQGFKNSPTLFNEALHRDLASFRALNPQVVMLQYVDDLLVAAPTYRDCKEGTRRLLQELSKLGYRVSAKKAQLCREEVTYLGYLLKGGKRWLTPARKATVMKIPTPTTPRQVREFLGKAGFCRLFIPGFASLAAPLYPLTRPKVPFTWTEAHQEAFGRIKEALLSAPALALPDLTKPFALYVDEKEGVARGVLTQTLGPWRRPVAYLSKKLDPVASGWPTCLKAIAAVALLLKDADKLTLGQNVLVIAPHNLESIVRQPPDRWMTNARMTHYQSLLLNERVSFAPPAILNPATLLPVESDDTPIHICSEILAEETGTRPDLRDQPLPGVPAWYTDGSSFIMDGRRQAGAAIVDNKRTVWASNLPEGTSAQKAELIALTQALRLAEGKSINIYTDSRYAFATAHVHGAIYKQRGWLTSAGKDIKNKEEILALLEAIHLPKRVAIIHCPGHQRGTDPVATGNRKADEAAKQAAQSTRILTETTKNAGKRTADGSEFEKRTADGSEFESPKKKAKVE

SEQ ID NO: 1730 - protein, 2125 aa, synthetic construct
MPAAKRVKLDGGDKKYSIGLDIGTNSVGWAVITDEYKVPSKKFKVLGNTDRHSIKKNLIGALLFDSGETAEATRLKRTARRRYTRRKNRICYLQEIFSNEMAKVDDSFFHRLEESFLVEEDKKHERHPIFGNIVDEVAYHEKYPTIYHLRKKLVDSTDKADLRLIYLALAHMIKFRGHFLIEGDLNPDNSDVDKLFIQLVQTYNQLFEENPINASGVDAKAILSARLSKSRRLENLIAQLPGEKKNGLFGNLIALSLGLTPNFKSNFDLAEDAKLQLSKDTYDDDLDNLLAQIGDQYADLFLAAKNLSDAILLSDILRVNTEITKAPLSASMIKRYDEHHQDLTLLKALVRQQLPEKYKEIFFDQSKNGYAGYIDGGASQEEFYKFIKPILEKMDGTEELLVKLNREDLLRKQRTFDNGSIPHQIHLGELHAILRRQEDFYPFLKDNREKIEKILTFRIPYYVGPLARGNSRFAWMTRKSEETITPWNFEEVVDKGASAQSFIERMTNFDKNLPNEKVLPKHSLLYEYFTVYNELTKVKYVTEGMRKPAFLSGEQKKAIVDLLFKTNRKVTVKQLKEDYFKKIECFDSVEISGVEDRFNASLGTYHDLLKIIKDKDFLDNEENEDILEDIVLTLTLFEDREMIEERLKTYAHLFDDKVMKQLKRRRYTGWGRLSRKLINGIRDKQSGKTILDFLKSDGFANRNFMQLIHDDSLTFKEDIQKAQVSGQGDSLHEHIANLAGSPAIKKGILQTVKVVDELVKVMGRHKPENIVIEMARENQTTQKGQKNSRERMKRIEEGIKELGSQILKEHPVENTQLQNEKLYLYYLQNGRDMYVDQELDINRLSDYDVDHIVPQSFLKDDSIDNKVLTRSDKARGKSDNVPSEEVVKKMKNYWRQLLNAKLITQRKFDNLTKAERGGLSELDKAGFIKRQLVETRQITKHVAQILDSRMNTKYDENDKLIREVKVITLKSKLVSDFRKDFQFYKVREINNYHHAHDAYLNAVVGTALIKKYPKLESEFVYGDYKVYDVRKMIAKSEQEIGKATAKYFFYSNIMNFFKTEITLANGEIRKRPLIETNGETGEIVWDKGRDFATVRKVLSMPQVNIVKKTEVQTGGFSKESILPKRNSDKLIARKKDWDPKKYGGFDSPTVAYSVLVVAKVEKGKSKKLKSVKELLGITIMERSSFEKNPIDFLEAKGYKEVKKDLIIKLPKYSLFELENGRKRMLASAGELQKGNELALPSKYVNFLYLASHYEKLKGSPEDNEQKQLFVEQHKHYLDEIIEQISEFSKRVILADANLDKVLSAYNKHRDKPIREQAENIIHLFTLTNLGAPAAFKYFDTTIDRKRYTSTKEVLDATLIHQSITGLYETRIDLSQLGGDGGGGSPAPGGGGGLLGRDLLTKLKAQIQFSTEGPQVTWEDRPAMCLVLNLEEEYRLHEKPVPPSIDPSWLQLFPMVWAEKAGMGLANQVPPVVVELKSDASPVAVRQYPMSKEAREGIRPHIQRFLDLGILVPCQSPWNTPLLPVKKPGTNDYRPVQDLREVNKRVQDIHPTVPNPYNLLSSLPPSHTWYSVLDLKDAFFCLKLHPNSQPLFAFEWRDPEKGNTGQLTWTRLPQGFKNSPTLFNEALHRDLASFRALNPQVVMLQYVDDLLVAAPTYRDCKEGTRRLLQELSKLGYRVSAKKAQLCREEVTYLGYLLKGGKRWLTPARKATVMKIPTPTTPRQVREFLGKAGFCRLFIPGFASLAAPLYPLTRPKVPFTWTEAHQEAFGRIKEALLSAPALALPDLTKPFALYVDEKEGVARGVLTQTLGPWRRPVAYLSKKLDPVASGWPTCLKAIAAVALLLKDADKLTLGQNVLVIAPHNLESIVRQPPDRWMTNARMTHYQSLLLNERVSFAPPAILNPATLLPVESDDTPIHICSEILAEETGTRPDLRDQPLPGVPAWYTDGSSFIMDGRRQAGAAIVDNKRTVWASNLPEGTSAQKAELIALTQALRLAEGKSINIYTDSRYAFATAHVHGAIYKQRGWLTSAGKDIKNKEEILALLEAIHLPKRVAIIHCPGHQRGTDPVATGNRKADEAAKQAAQSTRILTETTKNAGKRTADGSEFEKRTADGSEFESPKKKAKVE

SEQ ID NO: 1731 - protein, 2122 aa, synthetic construct
MPAAKRVKLDGGDKKYSIGLDIGTNSVGWAVITDEYKVPSKKFKVLGNTDRHSIKKNLIGALLFDSGETAEATRLKRTARRRYTRRKNRICYLQEIFSNEMAKVDDSFFHRLEESFLVEEDKKHERHPIFGNIVDEVAYHEKYPTIYHLRKKLVDSTDKADLRLIYLALAHMIKFRGHFLIEGDLNPDNSDVDKLFIQLVQTYNQLFEENPINASGVDAKAILSARLSKSRRLENLIAQLPGEKKNGLFGNLIALSLGLTPNFKSNFDLAEDAKLQLSKDTYDDDLDNLLAQIGDQYADLFLAAKNLSDAILLSDILRVNTEITKAPLSASMIKRYDEHHQDLTLLKALVRQQLPEKYKEIFFDQSKNGYAGYIDGGASQEEFYKFIKPILEKMDGTEELLVKLNREDLLRKQRTFDNGSIPHQIHLGELHAILRRQEDFYPFLKDNREKIEKILTFRIPYYVGPLARGNSRFAWMTRKSEETITPWNFEEVVDKGASAQSFIERMTNFDKNLPNEKVLPKHSLLYEYFTVYNELTKVKYVTEGMRKPAFLSGEQKKAIVDLLFKTNRKVTVKQLKEDYFKKIECFDSVEISGVEDRFNASLGTYHDLLKIIKDKDFLDNEENEDILEDIVLTLTLFEDREMIEERLKTYAHLFDDKVMKQLKRRRYTGWGRLSRKLINGIRDKQSGKTILDFLKSDGFANRNFMQLIHDDSLTFKEDIQKAQVSGQGDSLHEHIANLAGSPAIKKGILQTVKVVDELVKVMGRHKPENIVIEMARENQTTQKGQKNSRERMKRIEEGIKELGSQILKEHPVENTQLQNEKLYLYYLQNGRDMYVDQELDINRLSDYDVDHIVPQSFLKDDSIDNKVLTRSDKARGKSDNVPSEEVVKKMKNYWRQLLNAKLITQRKFDNLTKAERGGLSELDKAGFIKRQLVETRQITKHVAQILDSRMNTKYDENDKLIREVKVITLKSKLVSDFRKDFQFYKVREINNYHHAHDAYLNAVVGTALIKKYPKLESEFVYGDYKVYDVRKMIAKSEQEIGKATAKYFFYSNIMNFFKTEITLANGEIRKRPLIETNGETGEIVWDKGRDFATVRKVLSMPQVNIVKKTEVQTGGFSKESILPKRNSDKLIARKKDWDPKKYGGFDSPTVAYSVLVVAKVEKGKSKKLKSVKELLGITIMERSSFEKNPIDFLEAKGYKEVKKDLIIKLPKYSLFELENGRKRMLASAGELQKGNELALPSKYVNFLYLASHYEKLKGSPEDNEQKQLFVEQHKHYLDEIIEQISEFSKRVILADANLDKVLSAYNKHRDKPIREQAENIIHLFTLTNLGAPAAFKYFDTTIDRKRYTSTKEVLDATLIHQSITGLYETRIDLSQLGGDGGGSSPAPGGLLGRDLLTKLKAQIQFSTEGPQVTWEDRPAMCLVLNLEEEYRLHEKPVPPSIDPSWLQLFPMVWAEKAGMGLANQVPPVVVELKSDASPVAVRQYPMSKEAREGIRPHIQRFLDLGILVPCQSPWNTPLLPVKKPGTNDYRPVQDLREVNKRVQDIHPTVPNPYNLLSSLPPSHTWYSVLDLKDAFFCLKLHPNSQPLFAFEWRDPEKGNTGQLTWTRLPQGFKNSPTLFNEALHRDLASFRALNPQVVMLQYVDDLLVAAPTYRDCKEGTRRLLQELSKLGYRVSAKKAQLCREEVTYLGYLLKGGKRWLTPARKATVMKIPTPTTPRQVREFLGKAGFCRLFIPGFASLAAPLYPLTRPKVPFTWTEAHQEAFGRIKEALLSAPALALPDLTKPFALYVDEKEGVARGVLTQTLGPWRRPVAYLSKKLDPVASGWPTCLKAIAAVALLLKDADKLTLGQNVLVIAPHNLESIVRQPPDRWMTNARMTHYQSLLLNERVSFAPPAILNPATLLPVESDDTPIHICSEILAEETGTRPDLRDQPLPGVPAWYTDGSSFIMDGRRQAGAAIVDNKRTVWASNLPEGTSAQKAELIALTQALRLAEGKSINIYTDSRYAFATAHVHGAIYKQRGWLTSAGKDIKNKEEILALLEAIHLPKRVAIIHCPGHQRGTDPVATGNRKADEAAKQAAQSTRILTETTKNAGKRTADGSEFEKRTADGSEFESPKKKAKVE

SEQ ID NO: 1732 - protein, 2125 aa, synthetic construct
MPAAKRVKLDGGDKKYSIGLDIGTNSVGWAVITDEYKVPSKKFKVLGNTDRHSIKKNLIGALLFDSGETAEATRLKRTARRRYTRRKNRICYLQEIFSNEMAKVDDSFFHRLEESFLVEEDKKHERHPIFGNIVDEVAYHEKYPTIYHLRKKLVDSTDKADLRLIYLALAHMIKFRGHFLIEGDLNPDNSDVDKLFIQLVQTYNQLFEENPINASGVDAKAILSARLSKSRRLENLIAQLPGEKKNGLFGNLIALSLGLTPNFKSNFDLAEDAKLQLSKDTYDDDLDNLLAQIGDQYADLFLAAKNLSDAILLSDILRVNTEITKAPLSASMIKRYDEHHQDLTLLKALVRQQLPEKYKEIFFDQSKNGYAGYIDGGASQEEFYKFIKPILEKMDGTEELLVKLNREDLLRKQRTFDNGSIPHQIHLGELHAILRRQEDFYPFLKDNREKIEKILTFRIPYYVGPLARGNSRFAWMTRKSEETITPWNFEEVVDKGASAQSFIERMTNFDKNLPNEKVLPKHSLLYEYFTVYNELTKVKYVTEGMRKPAFLSGEQKKAIVDLLFKTNRKVTVKQLKEDYFKKIECFDSVEISGVEDRFNASLGTYHDLLKIIKDKDFLDNEENEDILEDIVLTLTLFEDREMIEERLKTYAHLFDDKVMKQLKRRRYTGWGRLSRKLINGIRDKQSGKTILDFLKSDGFANRNFMQLIHDDSLTFKEDIQKAQVSGQGDSLHEHIANLAGSPAIKKGILQTVKVVDELVKVMGRHKPENIVIEMARENQTTQKGQKNSRERMKRIEEGIKELGSQILKEHPVENTQLQNEKLYLYYLQNGRDMYVDQELDINRLSDYDVDHIVPQSFLKDDSIDNKVLTRSDKARGKSDNVPSEEVVKKMKNYWRQLLNAKLITQRKFDNLTKAERGGLSELDKAGFIKRQLVETRQITKHVAQILDSRMNTKYDENDKLIREVKVITLKSKLVSDFRKDFQFYKVREINNYHHAHDAYLNAVVGTALIKKYPKLESEFVYGDYKVYDVRKMIAKSEQEIGKATAKYFFYSNIMNFFKTEITLANGEIRKRPLIETNGETGEIVWDKGRDFATVRKVLSMPQVNIVKKTEVQTGGFSKESILPKRNSDKLIARKKDWDPKKYGGFDSPTVAYSVLVVAKVEKGKSKKLKSVKELLGITIMERSSFEKNPIDFLEAKGYKEVKKDLIIKLPKYSLFELENGRKRMLASAGELQKGNELALPSKYVNFLYLASHYEKLKGSPEDNEQKQLFVEQHKHYLDEIIEQISEFSKRVILADANLDKVLSAYNKHRDKPIREQAENIIHLFTLTNLGAPAAFKYFDTTIDRKRYTSTKEVLDATLIHQSITGLYETRIDLSQLGGDGGGGSPAPGSSGGLLGRDLLTKLKAQIQFSTEGPQVTWEDRPAMCLVLNLEEEYRLHEKPVPPSIDPSWLQLFPMVWAEKAGMGLANQVPPVVVELKSDASPVAVRQYPMSKEAREGIRPHIQRFLDLGILVPCQSPWNTPLLPVKKPGTNDYRPVQDLREVNKRVQDIHPTVPNPYNLLSSLPPSHTWYSVLDLKDAFFCLKLHPNSQPLFAFEWRDPEKGNTGQLTWTRLPQGFKNSPTLFNEALHRDLASFRALNPQVVMLQYVDDLLVAAPTYRDCKEGTRRLLQELSKLGYRVSAKKAQLCREEVTYLGYLLKGGKRWLTPARKATVMKIPTPTTPRQVREFLGKAGFCRLFIPGFASLAAPLYPLTRPKVPFTWTEAHQEAFGRIKEALLSAPALALPDLTKPFALYVDEKEGVARGVLTQTLGPWRRPVAYLSKKLDPVASGWPTCLKAIAAVALLLKDADKLTLGQNVLVIAPHNLESIVRQPPDRWMTNARMTHYQSLLLNERVSFAPPAILNPATLLPVESDDTPIHICSEILAEETGTRPDLRDQPLPGVPAWYTDGSSFIMDGRRQAGAAIVDNKRTVWASNLPEGTSAQKAELIALTQALRLAEGKSINIYTDSRYAFATAHVHGAIYKQRGWLTSAGKDIKNKEEILALLEAIHLPKRVAIIHCPGHQRGTDPVATGNRKADEAAKQAAQSTRILTETTKNAGKRTADGSEFEKRTADGSEFESPKKKAKVE

SEQ ID NO: 1733 - protein, 2122 aa, synthetic construct
MPAAKRVKLDGGDKKYSIGLDIGTNSVGWAVITDEYKVPSKKFKVLGNTDRHSIKKNLIGALLFDSGETAEATRLKRTARRRYTRRKNRICYLQEIFSNEMAKVDDSFFHRLEESFLVEEDKKHERHPIFGNIVDEVAYHEKYPTIYHLRKKLVDSTDKADLRLIYLALAHMIKFRGHFLIEGDLNPDNSDVDKLFIQLVQTYNQLFEENPINASGVDAKAILSARLSKSRRLENLIAQLPGEKKNGLFGNLIALSLGLTPNFKSNFDLAEDAKLQLSKDTYDDDLDNLLAQIGDQYADLFLAAKNLSDAILLSDILRVNTEITKAPLSASMIKRYDEHHQDLTLLKALVRQQLPEKYKEIFFDQSKNGYAGYIDGGASQEEFYKFIKPILEKMDGTEELLVKLNREDLLRKQRTFDNGSIPHQIHLGELHAILRRQEDFYPFLKDNREKIEKILTFRIPYYVGPLARGNSRFAWMTRKSEETITPWNFEEVVDKGASAQSFIERMTNFDKNLPNEKVLPKHSLLYEYFTVYNELTKVKYVTEGMRKPAFLSGEQKKAIVDLLFKTNRKVTVKQLKEDYFKKIECFDSVEISGVEDRFNASLGTYHDLLKIIKDKDFLDNEENEDILEDIVLTLTLFEDREMIEERLKTYAHLFDDKVMKQLKRRRYTGWGRLSRKLINGIRDKQSGKTILDFLKSDGFANRNFMQLIHDDSLTFKEDIQKAQVSGQGDSLHEHIANLAGSPAIKKGILQTVKVVDELVKVMGRHKPENIVIEMARENQTTQKGQKNSRERMKRIEEGIKELGSQILKEHPVENTQLQNEKLYLYYLQNGRDMYVDQELDINRLSDYDVDHIVPQSFLKDDSIDNKVLTRSDKARGKSDNVPSEEVVKKMKNYWRQLLNAKLITQRKFDNLTKAERGGLSELDKAGFIKRQLVETRQITKHVAQILDSRMNTKYDENDKLIREVKVITLKSKLVSDFRKDFQFYKVREINNYHHAHDAYLNAVVGTALIKKYPKLESEFVYGDYKVYDVRKMIAKSEQEIGKATAKYFFYSNIMNFFKTEITLANGEIRKRPLIETNGETGEIVWDKGRDFATVRKVLSMPQVNIVKKTEVQTGGFSKESILPKRNSDKLIARKKDWDPKKYGGFDSPTVAYSVLVVAKVEKGKSKKLKSVKELLGITIMERSSFEKNPIDFLEAKGYKEVKKDLIIKLPKYSLFELENGRKRMLASAGELQKGNELALPSKYVNFLYLASHYEKLKGSPEDNEQKQLFVEQHKHYLDEIIEQISEFSKRVILADANLDKVLSAYNKHRDKPIREQAENIIHLFTLTNLGAPAAFKYFDTTIDRKRYTSTKEVLDATLIHQSITGLYETRIDLSQLGGDGGGGSGSSGGLLGRDLLTKLKAQIQFSTEGPQVTWEDRPAMCLVLNLEEEYRLHEKPVPPSIDPSWLQLFPMVWAEKAGMGLANQVPPVVVELKSDASPVAVRQYPMSKEAREGIRPHIQRFLDLGILVPCQSPWNTPLLPVKKPGTNDYRPVQDLREVNKRVQDIHPTVPNPYNLLSSLPPSHTWYSVLDLKDAFFCLKLHPNSQPLFAFEWRDPEKGNTGQLTWTRLPQGFKNSPTLFNEALHRDLASFRALNPQVVMLQYVDDLLVAAPTYRDCKEGTRRLLQELSKLGYRVSAKKAQLCREEVTYLGYLLKGGKRWLTPARKATVMKIPTPTTPRQVREFLGKAGFCRLFIPGFASLAAPLYPLTRPKVPFTWTEAHQEAFGRIKEALLSAPALALPDLTKPFALYVDEKEGVARGVLTQTLGPWRRPVAYLSKKLDPVASGWPTCLKAIAAVALLLKDADKLTLGQNVLVIAPHNLESIVRQPPDRWMTNARMTHYQSLLLNERVSFAPPAILNPATLLPVESDDTPIHICSEILAEETGTRPDLRDQPLPGVPAWYTDGSSFIMDGRRQAGAAIVDNKRTVWASNLPEGTSAQKAELIALTQALRLAEGKSINIYTDSRYAFATAHVHGAIYKQRGWLTSAGKDIKNKEEILALLEAIHLPKRVAIIHCPGHQRGTDPVATGNRKADEAAKQAAQSTRILTETTKNAGKRTADGSEFEKRTADGSEFESPKKKAKVE

SEQ ID NO: 1734 - protein, 2125 aa, synthetic construct
MPAAKRVKLDGGDKKYSIGLDIGTNSVGWAVITDEYKVPSKKFKVLGNTDRHSIKKNLIGALLFDSGETAEATRLKRTARRRYTRRKNRICYLQEIFSNEMAKVDDSFFHRLEESFLVEEDKKHERHPIFGNIVDEVAYHEKYPTIYHLRKKLVDSTDKADLRLIYLALAHMIKFRGHFLIEGDLNPDNSDVDKLFIQLVQTYNQLFEENPINASGVDAKAILSARLSKSRRLENLIAQLPGEKKNGLFGNLIALSLGLTPNFKSNFDLAEDAKLQLSKDTYDDDLDNLLAQIGDQYADLFLAAKNLSDAILLSDILRVNTEITKAPLSASMIKRYDEHHQDLTLLKALVRQQLPEKYKEIFFDQSKNGYAGYIDGGASQEEFYKFIKPILEKMDGTEELLVKLNREDLLRKQRTFDNGSIPHQIHLGELHAILRRQEDFYPFLKDNREKIEKILTFRIPYYVGPLARGNSRFAWMTRKSEETITPWNFEEVVDKGASAQSFIERMTNFDKNLPNEKVLPKHSLLYEYFTVYNELTKVKYVTEGMRKPAFLSGEQKKAIVDLLFKTNRKVTVKQLKEDYFKKIECFDSVEISGVEDRFNASLGTYHDLLKIIKDKDFLDNEENEDILEDIVLTLTLFEDREMIEERLKTYAHLFDDKVMKQLKRRRYTGWGRLSRKLINGIRDKQSGKTILDFLKSDGFANRNFMQLIHDDSLTFKEDIQKAQVSGQGDSLHEHIANLAGSPAIKKGILQTVKVVDELVKVMGRHKPENIVIEMARENQTTQKGQKNSRERMKRIEEGIKELGSQILKEHPVENTQLQNEKLYLYYLQNGRDMYVDQELDINRLSDYDVDHIVPQSFLKDDSIDNKVLTRSDKARGKSDNVPSEEVVKKMKNYWRQLLNAKLITQRKFDNLTKAERGGLSELDKAGFIKRQLVETRQITKHVAQILDSRMNTKYDENDKLIREVKVITLKSKLVSDFRKDFQFYKVREINNYHHAHDAYLNAVVGTALIKKYPKLESEFVYGDYKVYDVRKMIAKSEQEIGKATAKYFFYSNIMNFFKTEITLANGEIRKRPLIETNGETGEIVWDKGRDFATVRKVLSMPQVNIVKKTEVQTGGFSKESILPKRNSDKLIARKKDWDPKKYGGFDSPTVAYSVLVVAKVEKGKSKKLKSVKELLGITIMERSSFEKNPIDFLEAKGYKEVKKDLIIKLPKYSLFELENGRKRMLASAGELQKGNELALPSKYVNFLYLASHYEKLKGSPEDNEQKQLFVEQHKHYLDEIIEQISEFSKRVILADANLDKVLSAYNKHRDKPIREQAENIIHLFTLTNLGAPAAFKYFDTTIDRKRYTSTKEVLDATLIHQSITGLYETRIDLSQLGGDGGGGGGSSPAPGGLLGRDLLTKLKAQIQFSTEGPQVTWEDRPAMCLVLNLEEEYRLHEKPVPPSIDPSWLQLFPMVWAEKAGMGLANQVPPVVVELKSDASPVAVRQYPMSKEAREGIRPHIQRFLDLGILVPCQSPWNTPLLPVKKPGTNDYRPVQDLREVNKRVQDIHPTVPNPYNLLSSLPPSHTWYSVLDLKDAFFCLKLHPNSQPLFAFEWRDPEKGNTGQLTWTRLPQGFKNSPTLFNEALHRDLASFRALNPQVVMLQYVDDLLVAAPTYRDCKEGTRRLLQELSKLGYRVSAKKAQLCREEVTYLGYLLKGGKRWLTPARKATVMKIPTPTTPRQVREFLGKAGFCRLFIPGFASLAAPLYPLTRPKVPFTWTEAHQEAFGRIKEALLSAPALALPDLTKPFALYVDEKEGVARGVLTQTLGPWRRPVAYLSKKLDPVASGWPTCLKAIAAVALLLKDADKLTLGQNVLVIAPHNLESIVRQPPDRWMTNARMTHYQSLLLNERVSFAPPAILNPATLLPVESDDTPIHICSEILAEETGTRPDLRDQPLPGVPAWYTDGSSFIMDGRRQAGAAIVDNKRTVWASNLPEGTSAQKAELIALTQALRLAEGKSINIYTDSRYAFATAHVHGAIYKQRGWLTSAGKDIKNKEEILALLEAIHLPKRVAIIHCPGHQRGTDPVATGNRKADEAAKQAAQSTRILTETTKNAGKRTADGSEFEKRTADGSEFESPKKKAKVE

SEQ ID NO: 1735 - protein, 2125 aa, synthetic construct
MPAAKRVKLDGGDKKYSIGLDIGTNSVGWAVITDEYKVPSKKFKVLGNTDRHSIKKNLIGALLFDSGETAEATRLKRTARRRYTRRKNRICYLQEIFSNEMAKVDDSFFHRLEESFLVEEDKKHERHPIFGNIVDEVAYHEKYPTIYHLRKKLVDSTDKADLRLIYLALAHMIKFRGHFLIEGDLNPDNSDVDKLFIQLVQTYNQLFEENPINASGVDAKAILSARLSKSRRLENLIAQLPGEKKNGLFGNLIALSLGLTPNFKSNFDLAEDAKLQLSKDTYDDDLDNLLAQIGDQYADLFLAAKNLSDAILLSDILRVNTEITKAPLSASMIKRYDEHHQDLTLLKALVRQQLPEKYKEIFFDQSKNGYAGYIDGGASQEEFYKFIKPILEKMDGTEELLVKLNREDLLRKQRTFDNGSIPHQIHLGELHAILRRQEDFYPFLKDNREKIEKILTFRIPYYVGPLARGNSRFAWMTRKSEETITPWNFEEVVDKGASAQSFIERMTNFDKNLPNEKVLPKHSLLYEYFTVYNELTKVKYVTEGMRKPAFLSGEQKKAIVDLLFKTNRKVTVKQLKEDYFKKIECFDSVEISGVEDRFNASLGTYHDLLKIIKDKDFLDNEENEDILEDIVLTLTLFEDREMIEERLKTYAHLFDDKVMKQLKRRRYTGWGRLSRKLINGIRDKQSGKTILDFLKSDGFANRNFMQLIHDDSLTFKEDIQKAQVSGQGDSLHEHIANLAGSPAIKKGILQTVKVVDELVKVMGRHKPENIVIEMARENQTTQKGQKNSRERMKRIEEGIKELGSQILKEHPVENTQLQNEKLYLYYLQNGRDMYVDQELDINRLSDYDVDHIVPQSFLKDDSIDNKVLTRSDKARGKSDNVPSEEVVKKMKNYWRQLLNAKLITQRKFDNLTKAERGGLSELDKAGFIKRQLVETRQITKHVAQILDSRMNTKYDENDKLIREVKVITLKSKLVSDFRKDFQFYKVREINNYHHAHDAYLNAVVGTALIKKYPKLESEFVYGDYKVYDVRKMIAKSEQEIGKATAKYFFYSNIMNFFKTEITLANGEIRKRPLIETNGETGEIVWDKGRDFATVRKVLSMPQVNIVKKTEVQTGGFSKESILPKRNSDKLIARKKDWDPKKYGGFDSPTVAYSVLVVAKVEKGKSKKLKSVKELLGITIMERSSFEKNPIDFLEAKGYKEVKKDLIIKLPKYSLFELENGRKRMLASAGELQKGNELALPSKYVNFLYLASHYEKLKGSPEDNEQKQLFVEQHKHYLDEIIEQISEFSKRVILADANLDKVLSAYNKHRDKPIREQAENIIHLFTLTNLGAPAAFKYFDTTIDRKRYTSTKEVLDATLIHQSITGLYETRIDLSQLGGDGGGSSGGSPAPGGLLGRDLLTKLKAQIQFSTEGPQVTWEDRPAMCLVLNLEEEYRLHEKPVPPSIDPSWLQLFPMVWAEKAGMGLANQVPPVVVELKSDASPVAVRQYPMSKEAREGIRPHIQRFLDLGILVPCQSPWNTPLLPVKKPGTNDYRPVQDLREVNKRVQDIHPTVPNPYNLLSSLPPSHTWYSVLDLKDAFFCLKLHPNSQPLFAFEWRDPEKGNTGQLTWTRLPQGFKNSPTLFNEALHRDLASFRALNPQVVMLQYVDDLLVAAPTYRDCKEGTRRLLQELSKLGYRVSAKKAQLCREEVTYLGYLLKGGKRWLTPARKATVMKIPTPTTPRQVREFLGKAGFCRLFIPGFASLAAPLYPLTRPKVPFTWTEAHQEAFGRIKEALLSAPALALPDLTKPFALYVDEKEGVARGVLTQTLGPWRRPVAYLSKKLDPVASGWPTCLKAIAAVALLLKDADKLTLGQNVLVIAPHNLESIVRQPPDRWMTNARMTHYQSLLLNERVSFAPPAILNPATLLPVESDDTPIHICSEILAEETGTRPDLRDQPLPGVPAWYTDGSSFIMDGRRQAGAAIVDNKRTVWASNLPEGTSAQKAELIALTQALRLAEGKSINIYTDSRYAFATAHVHGAIYKQRGWLTSAGKDIKNKEEILALLEAIHLPKRVAIIHCPGHQRGTDPVATGNRKADEAAKQAAQSTRILTETTKNAGKRTADGSEFEKRTADGSEFESPKKKAKVE

SEQ ID NO: 1736 - protein, 2127 aa, synthetic construct
MPAAKRVKLDGGDKKYSIGLDIGTNSVGWAVITDEYKVPSKKFKVLGNTDRHSIKKNLIGALLFDSGETAEATRLKRTARRRYTRRKNRICYLQEIFSNEMAKVDDSFFHRLEESFLVEEDKKHERHPIFGNIVDEVAYHEKYPTIYHLRKKLVDSTDKADLRLIYLALAHMIKFRGHFLIEGDLNPDNSDVDKLFIQLVQTYNQLFEENPINASGVDAKAILSARLSKSRRLENLIAQLPGEKKNGLFGNLIALSLGLTPNFKSNFDLAEDAKLQLSKDTYDDDLDNLLAQIGDQYADLFLAAKNLSDAILLSDILRVNTEITKAPLSASMIKRYDEHHQDLTLLKALVRQQLPEKYKEIFFDQSKNGYAGYIDGGASQEEFYKFIKPILEKMDGTEELLVKLNREDLLRKQRTFDNGSIPHQIHLGELHAILRRQEDFYPFLKDNREKIEKILTFRIPYYVGPLARGNSRFAWMTRKSEETITPWNFEEVVDKGASAQSFIERMTNFDKNLPNEKVLPKHSLLYEYFTVYNELTKVKYVTEGMRKPAFLSGEQKKAIVDLLFKTNRKVTVKQLKEDYFKKIECFDSVEISGVEDRFNASLGTYHDLLKIIKDKDFLDNEENEDILEDIVLTLTLFEDREMIEERLKTYAHLFDDKVMKQLKRRRYTGWGRLSRKLINGIRDKQSGKTILDFLKSDGFANRNFMQLIHDDSLTFKEDIQKAQVSGQGDSLHEHIANLAGSPAIKKGILQTVKVVDELVKVMGRHKPENIVIEMARENQTTQKGQKNSRERMKRIEEGIKELGSQILKEHPVENTQLQNEKLYLYYLQNGRDMYVDQELDINRLSDYDVDHIVPQSFLKDDSIDNKVLTRSDKARGKSDNVPSEEVVKKMKNYWRQLLNAKLITQRKFDNLTKAERGGLSELDKAGFIKRQLVETRQITKHVAQILDSRMNTKYDENDKLIREVKVITLKSKLVSDFRKDFQFYKVREINNYHHAHDAYLNAVVGTALIKKYPKLESEFVYGDYKVYDVRKMIAKSEQEIGKATAKYFFYSNIMNFFKTEITLANGEIRKRPLIETNGETGEIVWDKGRDFATVRKVLSMPQVNIVKKTEVQTGGFSKESILPKRNSDKLIARKKDWDPKKYGGFDSPTVAYSVLVVAKVEKGKSKKLKSVKELLGITIMERSSFEKNPIDFLEAKGYKEVKKDLIIKLPKYSLFELENGRKRMLASAGELQKGNELALPSKYVNFLYLASHYEKLKGSPEDNEQKQLFVEQHKHYLDEIIEQISEFSKRVILADANLDKVLSAYNKHRDKPIREQAENIIHLFTLTNLGAPAAFKYFDTTIDRKRYTSTKEVLDATLIHQSITGLYETRIDLSQLGGDGGEAAAKGGGGGSGGLLGRDLLTKLKAQIQFSTEGPQVTWEDRPAMCLVLNLEEEYRLHEKPVPPSIDPSWLQLFPMVWAEKAGMGLANQVPPVVVELKSDASPVAVRQYPMSKEAREGIRPHIQRFLDLGILVPCQSPWNTPLLPVKKPGTNDYRPVQDLREVNKRVQDIHPTVPNPYNLLSSLPPSHTWYSVLDLKDAFFCLKLHPNSQPLFAFEWRDPEKGNTGQLTWTRLPQGFKNSPTLFNEALHRDLASFRALNPQVVMLQYVDDLLVAAPTYRDCKEGTRRLLQELSKLGYRVSAKKAQLCREEVTYLGYLLKGGKRWLTPARKATVMKIPTPTTPRQVREFLGKAGFCRLFIPGFASLAAPLYPLTRPKVPFTWTEAHQEAFGRIKEALLSAPALALPDLTKPFALYVDEKEGVARGVLTQTLGPWRRPVAYLSKKLDPVASGWPTCLKAIAAVALLLKDADKLTLGQNVLVIAPHNLESIVRQPPDRWMTNARMTHYQSLLLNERVSFAPPAILNPATLLPVESDDTPIHICSEILAEETGTRPDLRDQPLPGVPAWYTDGSSFIMDGRRQAGAAIVDNKRTVWASNLPEGTSAQKAELIALTQALRLAEGKSINIYTDSRYAFATAHVHGAIYKQRGWLTSAGKDIKNKEEILALLEAIHLPKRVAIIHCPGHQRGTDPVATGNRKADEAAKQAAQSTRILTETTKNAGKRTADGSEFEKRTADGSEFESPKKKAKVE

SEQ ID NO: 1737 - protein, 2127 aa, synthetic construct
MPAAKRVKLDGGDKKYSIGLDIGTNSVGWAVITDEYKVPSKKFKVLGNTDRHSIKKNLIGALLFDSGETAEATRLKRTARRRYTRRKNRICYLQEIFSNEMAKVDDSFFHRLEESFLVEEDKKHERHPIFGNIVDEVAYHEKYPTIYHLRKKLVDSTDKADLRLIYLALAHMIKFRGHFLIEGDLNPDNSDVDKLFIQLVQTYNQLFEENPINASGVDAKAILSARLSKSRRLENLIAQLPGEKKNGLFGNLIALSLGLTPNFKSNFDLAEDAKLQLSKDTYDDDLDNLLAQIGDQYADLFLAAKNLSDAILLSDILRVNTEITKAPLSASMIKRYDEHHQDLTLLKALVRQQLPEKYKEIFFDQSKNGYAGYIDGGASQEEFYKFIKPILEKMDGTEELLVKLNREDLLRKQRTFDNGSIPHQIHLGELHAILRRQEDFYPFLKDNREKIEKILTFRIPYYVGPLARGNSRFAWMTRKSEETITPWNFEEVVDKGASAQSFIERMTNFDKNLPNEKVLPKHSLLYEYFTVYNELTKVKYVTEGMRKPAFLSGEQKKAIVDLLFKTNRKVTVKQLKEDYFKKIECFDSVEISGVEDRFNASLGTYHDLLKIIKDKDFLDNEENEDILEDIVLTLTLFEDREMIEERLKTYAHLFDDKVMKQLKRRRYTGWGRLSRKLINGIRDKQSGKTILDFLKSDGFANRNFMQLIHDDSLTFKEDIQKAQVSGQGDSLHEHIANLAGSPAIKKGILQTVKVVDELVKVMGRHKPENIVIEMARENQTTQKGQKNSRERMKRIEEGIKELGSQILKEHPVENTQLQNEKLYLYYLQNGRDMYVDQELDINRLSDYDVDHIVPQSFLKDDSIDNKVLTRSDKARGKSDNVPSEEVVKKMKNYWRQLLNAKLITQRKFDNLTKAERGGLSELDKAGFIKRQLVETRQITKHVAQILDSRMNTKYDENDKLIREVKVITLKSKLVSDFRKDFQFYKVREINNYHHAHDAYLNAVVGTALIKKYPKLESEFVYGDYKVYDVRKMIAKSEQEIGKATAKYFFYSNIMNFFKTEITLANGEIRKRPLIETNGETGEIVWDKGRDFATVRKVLSMPQVNIVKKTEVQTGGFSKESILPKRNSDKLIARKKDWDPKKYGGFDSPTVAYSVLVVAKVEKGKSKKLKSVKELLGITIMERSSFEKNPIDFLEAKGYKEVKKDLIIKLPKYSLFELENGRKRMLASAGELQKGNELALPSKYVNFLYLASHYEKLKGSPEDNEQKQLFVEQHKHYLDEIIEQISEFSKRVILADANLDKVLSAYNKHRDKPIREQAENIIHLFTLTNLGAPAAFKYFDTTIDRKRYTSTKEVLDATLIHQSITGLYETRIDLSQLGGDGGGSSEAAAKGGGGGLLGRDLLTKLKAQIQFSTEGPQVTWEDRPAMCLVLNLEEEYRLHEKPVPPSIDPSWLQLFPMVWAEKAGMGLANQVPPVVVELKSDASPVAVRQYPMSKEAREGIRPHIQRFLDLGILVPCQSPWNTPLLPVKKPGTNDYRPVQDLREVNKRVQDIHPTVPNPYNLLSSLPPSHTWYSVLDLKDAFFCLKLHPNSQPLFAFEWRDPEKGNTGQLTWTRLPQGFKNSPTLFNEALHRDLASFRALNPQVVMLQYVDDLLVAAPTYRDCKEGTRRLLQELSKLGYRVSAKKAQLCREEVTYLGYLLKGGKRWLTPARKATVMKIPTPTTPRQVREFLGKAGFCRLFIPGFASLAAPLYPLTRPKVPFTWTEAHQEAFGRIKEALLSAPALALPDLTKPFALYVDEKEGVARGVLTQTLGPWRRPVAYLSKKLDPVASGWPTCLKAIAAVALLLKDADKLTLGQNVLVIAPHNLESIVRQPPDRWMTNARMTHYQSLLLNERVSFAPPAILNPATLLPVESDDTPIHICSEILAEETGTRPDLRDQPLPGVPAWYTDGSSFIMDGRRQAGAAIVDNKRTVWASNLPEGTSAQKAELIALTQALRLAEGKSINIYTDSRYAFATAHVHGAIYKQRGWLTSAGKDIKNKEEILALLEAIHLPKRVAIIHCPGHQRGTDPVATGNRKADEAAKQAAQSTRILTETTKNAGKRTADGSEFEKRTADGSEFESPKKKAKVE

SEQ ID NO: 1738 - protein, 2125 aa, synthetic construct
MPAAKRVKLDGGDKKYSIGLDIGTNSVGWAVITDEYKVPSKKFKVLGNTDRHSIKKNLIGALLFDSGETAEATRLKRTARRRYTRRKNRICYLQEIFSNEMAKVDDSFFHRLEESFLVEEDKKHERHPIFGNIVDEVAYHEKYPTIYHLRKKLVDSTDKADLRLIYLALAHMIKFRGHFLIEGDLNPDNSDVDKLFIQLVQTYNQLFEENPINASGVDAKAILSARLSKSRRLENLIAQLPGEKKNGLFGNLIALSLGLTPNFKSNFDLAEDAKLQLSKDTYDDDLDNLLAQIGDQYADLFLAAKNLSDAILLSDILRVNTEITKAPLSASMIKRYDEHHQDLTLLKALVRQQLPEKYKEIFFDQSKNGYAGYIDGGASQEEFYKFIKPILEKMDGTEELLVKLNREDLLRKQRTFDNGSIPHQIHLGELHAILRRQEDFYPFLKDNREKIEKILTFRIPYYVGPLARGNSRFAWMTRKSEETITPWNFEEVVDKGASAQSFIERMTNFDKNLPNEKVLPKHSLLYEYFTVYNELTKVKYVTEGMRKPAFLSGEQKKAIVDLLFKTNRKVTVKQLKEDYFKKIECFDSVEISGVEDRFNASLGTYHDLLKIIKDKDFLDNEENEDILEDIVLTLTLFEDREMIEERLKTYAHLFDDKVMKQLKRRRYTGWGRLSRKLINGIRDKQSGKTILDFLKSDGFANRNFMQLIHDDSLTFKEDIQKAQVSGQGDSLHEHIANLAGSPAIKKGILQTVKVVDELVKVMGRHKPENIVIEMARENQTTQKGQKNSRERMKRIEEGIKELGSQILKEHPVENTQLQNEKLYLYYLQNGRDMYVDQELDINRLSDYDVDHIVPQSFLKDDSIDNKVLTRSDKARGKSDNVPSEEVVKKMKNYWRQLLNAKLITQRKFDNLTKAERGGLSELDKAGFIKRQLVETRQITKHVAQILDSRMNTKYDENDKLIREVKVITLKSKLVSDFRKDFQFYKVREINNYHHAHDAYLNAVVGTALIKKYPKLESEFVYGDYKVYDVRKMIAKSEQEIGKATAKYFFYSNIMNFFKTEITLANGEIRKRPLIETNGETGEIVWDKGRDFATVRKVLSMPQVNIVKKTEVQTGGFSKESILPKRNSDKLIARKKDWDPKKYGGFDSPTVAYSVLVVAKVEKGKSKKLKSVKELLGITIMERSSFEKNPIDFLEAKGYKEVKKDLIIKLPKYSLFELENGRKRMLASAGELQKGNELALPSKYVNFLYLASHYEKLKGSPEDNEQKQLFVEQHKHYLDEIIEQISEFSKRVILADANLDKVLSAYNKHRDKPIREQAENIIHLFTLTNLGAPAAFKYFDTTIDRKRYTSTKEVLDATLIHQSITGLYETRIDLSQLGGDGGGSSPAPGGSGGLLGRDLLTKLKAQIQFSTEGPQVTWEDRPAMCLVLNLEEEYRLHEKPVPPSIDPSWLQLFPMVWAEKAGMGLANQVPPVVVELKSDASPVAVRQYPMSKEAREGIRPHIQRFLDLGILVPCQSPWNTPLLPVKKPGTNDYRPVQDLREVNKRVQDIHPTVPNPYNLLSSLPPSHTWYSVLDLKDAFFCLKLHPNSQPLFAFEWRDPEKGNTGQLTWTRLPQGFKNSPTLFNEALHRDLASFRALNPQVVMLQYVDDLLVAAPTYRDCKEGTRRLLQELSKLGYRVSAKKAQLCREEVTYLGYLLKGGKRWLTPARKATVMKIPTPTTPRQVREFLGKAGFCRLFIPGFASLAAPLYPLTRPKVPFTWTEAHQEAFGRIKEALLSAPALALPDLTKPFALYVDEKEGVARGVLTQTLGPWRRPVAYLSKKLDPVASGWPTCLKAIAAVALLLKDADKLTLGQNVLVIAPHNLESIVRQPPDRWMTNARMTHYQSLLLNERVSFAPPAILNPATLLPVESDDTPIHICSEILAEETGTRPDLRDQPLPGVPAWYTDGSSFIMDGRRQAGAAIVDNKRTVWASNLPEGTSAQKAELIALTQALRLAEGKSINIYTDSRYAFATAHVHGAIYKQRGWLTSAGKDIKNKEEILALLEAIHLPKRVAIIHCPGHQRGTDPVATGNRKADEAAKQAAQSTRILTETTKNAGKRTADGSEFEKRTADGSEFESPKKKAKVE

SEQ ID NO: 1739 - protein, 2131 aa, synthetic construct
MPAAKRVKLDGGDKKYSIGLDIGTNSVGWAVITDEYKVPSKKFKVLGNTDRHSIKKNLIGALLFDSGETAEATRLKRTARRRYTRRKNRICYLQEIFSNEMAKVDDSFFHRLEESFLVEEDKKHERHPIFGNIVDEVAYHEKYPTIYHLRKKLVDSTDKADLRLIYLALAHMIKFRGHFLIEGDLNPDNSDVDKLFIQLVQTYNQLFEENPINASGVDAKAILSARLSKSRRLENLIAQLPGEKKNGLFGNLIALSLGLTPNFKSNFDLAEDAKLQLSKDTYDDDLDNLLAQIGDQYADLFLAAKNLSDAILLSDILRVNTEITKAPLSASMIKRYDEHHQDLTLLKALVRQQLPEKYKEIFFDQSKNGYAGYIDGGASQEEFYKFIKPILEKMDGTEELLVKLNREDLLRKQRTFDNGSIPHQIHLGELHAILRRQEDFYPFLKDNREKIEKILTFRIPYYVGPLARGNSRFAWMTRKSEETITPWNFEEVVDKGASAQSFIERMTNFDKNLPNEKVLPKHSLLYEYFTVYNELTKVKYVTEGMRKPAFLSGEQKKAIVDLLFKTNRKVTVKQLKEDYFKKIECFDSVEISGVEDRFNASLGTYHDLLKIIKDKDFLDNEENEDILEDIVLTLTLFEDREMIEERLKTYAHLFDDKVMKQLKRRRYTGWGRLSRKLINGIRDKQSGKTILDFLKSDGFANRNFMQLIHDDSLTFKEDIQKAQVSGQGDSLHEHIANLAGSPAIKKGILQTVKVVDELVKVMGRHKPENIVIEMARENQTTQKGQKNSRERMKRIEEGIKELGSQILKEHPVENTQLQNEKLYLYYLQNGRDMYVDQELDINRLSDYDVDHIVPQSFLKDDSIDNKVLTRSDKARGKSDNVPSEEVVKKMKNYWRQLLNAKLITQRKFDNLTKAERGGLSELDKAGFIKRQLVETRQITKHVAQILDSRMNTKYDENDKLIREVKVITLKSKLVSDFRKDFQFYKVREINNYHHAHDAYLNAVVGTALIKKYPKLESEFVYGDYKVYDVRKMIAKSEQEIGKATAKYFFYSNIMNFFKTEITLANGEIRKRPLIETNGETGEIVWDKGRDFATVRKVLSMPQVNIVKKTEVQTGGFSKESILPKRNSDKLIARKKDWDPKKYGGFDSPTVAYSVLVVAKVEKGKSKKLKSVKELLGITIMERSSFEKNPIDFLEAKGYKEVKKDLIIKLPKYSLFELENGRKRMLASAGELQKGNELALPSKYVNFLYLASHYEKLKGSPEDNEQKQLFVEQHKHYLDEIIEQISEFSKRVILADANLDKVLSAYNKHRDKPIREQAENIIHLFTLTNLGAPAAFKYFDTTIDRKRYTSTKEVLDATLIHQSITGLYETRIDLSQLGGDGGGGGGSEAAAKGGGGSGGLLGRDLLTKLKAQIQFSTEGPQVTWEDRPAMCLVLNLEEEYRLHEKPVPPSIDPSWLQLFPMVWAEKAGMGLANQVPPVVVELKSDASPVAVRQYPMSKEAREGIRPHIQRFLDLGILVPCQSPWNTPLLPVKKPGTNDYRPVQDLREVNKRVQDIHPTVPNPYNLLSSLPPSHTWYSVLDLKDAFFCLKLHPNSQPLFAFEWRDPEKGNTGQLTWTRLPQGFKNSPTLFNEALHRDLASFRALNPQVVMLQYVDDLLVAAPTYRDCKEGTRRLLQELSKLGYRVSAKKAQLCREEVTYLGYLLKGGKRWLTPARKATVMKIPTPTTPRQVREFLGKAGFCRLFIPGFASLAAPLYPLTRPKVPFTWTEAHQEAFGRIKEALLSAPALALPDLTKPFALYVDEKEGVARGVLTQTLGPWRRPVAYLSKKLDPVASGWPTCLKAIAAVALLLKDADKLTLGQNVLVIAPHNLESIVRQPPDRWMTNARMTHYQSLLLNERVSFAPPAILNPATLLPVESDDTPIHICSEILAEETGTRPDLRDQPLPGVPAWYTDGSSFIMDGRRQAGAAIVDNKRTVWASNLPEGTSAQKAELIALTQALRLAEGKSINIYTDSRYAFATAHVHGAIYKQRGWLTSAGKDIKNKEEILALLEAIHLPKRVAIIHCPGHQRGTDPVATGNRKADEAAKQAAQSTRILTETTKNAGKRTADGSEFEKRTADGSEFESPKKKAKVE

SEQ ID NO: 1740 - protein, 2125 aa, synthetic construct
MPAAKRVKLDGGDKKYSIGLDIGTNSVGWAVITDEYKVPSKKFKVLGNTDRHSIKKNLIGALLFDSGETAEATRLKRTARRRYTRRKNRICYLQEIFSNEMAKVDDSFFHRLEESFLVEEDKKHERHPIFGNIVDEVAYHEKYPTIYHLRKKLVDSTDKADLRLIYLALAHMIKFRGHFLIEGDLNPDNSDVDKLFIQLVQTYNQLFEENPINASGVDAKAILSARLSKSRRLENLIAQLPGEKKNGLFGNLIALSLGLTPNFKSNFDLAEDAKLQLSKDTYDDDLDNLLAQIGDQYADLFLAAKNLSDAILLSDILRVNTEITKAPLSASMIKRYDEHHQDLTLLKALVRQQLPEKYKEIFFDQSKNGYAGYIDGGASQEEFYKFIKPILEKMDGTEELLVKLNREDLLRKQRTFDNGSIPHQIHLGELHAILRRQEDFYPFLKDNREKIEKILTFRIPYYVGPLARGNSRFAWMTRKSEETITPWNFEEVVDKGASAQSFIERMTNFDKNLPNEKVLPKHSLLYEYFTVYNELTKVKYVTEGMRKPAFLSGEQKKAIVDLLFKTNRKVTVKQLKEDYFKKIECFDSVEISGVEDRFNASLGTYHDLLKIIKDKDFLDNEENEDILEDIVLTLTLFEDREMIEERLKTYAHLFDDKVMKQLKRRRYTGWGRLSRKLINGIRDKQSGKTILDFLKSDGFANRNFMQLIHDDSLTFKEDIQKAQVSGQGDSLHEHIANLAGSPAIKKGILQTVKVVDELVKVMGRHKPENIVIEMARENQTTQKGQKNSRERMKRIEEGIKELGSQILKEHPVENTQLQNEKLYLYYLQNGRDMYVDQELDINRLSDYDVDHIVPQSFLKDDSIDNKVLTRSDKARGKSDNVPSEEVVKKMKNYWRQLLNAKLITQRKFDNLTKAERGGLSELDKAGFIKRQLVETRQITKHVAQILDSRMNTKYDENDKLIREVKVITLKSKLVSDFRKDFQFYKVREINNYHHAHDAYLNAVVGTALIKKYPKLESEFVYGDYKVYDVRKMIAKSEQEIGKATAKYFFYSNIMNFFKTEITLANGEIRKRPLIETNGETGEIVWDKGRDFATVRKVLSMPQVNIVKKTEVQTGGFSKESILPKRNSDKLIARKKDWDPKKYGGFDSPTVAYSVLVVAKVEKGKSKKLKSVKELLGITIMERSSFEKNPIDFLEAKGYKEVKKDLIIKLPKYSLFELENGRKRMLASAGELQKGNELALPSKYVNFLYLASHYEKLKGSPEDNEQKQLFVEQHKHYLDEIIEQISEFSKRVILADANLDKVLSAYNKHRDKPIREQAENIIHLFTLTNLGAPAAFKYFDTTIDRKRYTSTKEVLDATLIHQSITGLYETRIDLSQLGGDGGPAPGGSGGGGGLLGRDLLTKLKAQIQFSTEGPQVTWEDRPAMCLVLNLEEEYRLHEKPVPPSIDPSWLQLFPMVWAEKAGMGLANQVPPVVVELKSDASPVAVRQYPMSKEAREGIRPHIQRFLDLGILVPCQSPWNTPLLPVKKPGTNDYRPVQDLREVNKRVQDIHPTVPNPYNLLSSLPPSHTWYSVLDLKDAFFCLKLHPNSQPLFAFEWRDPEKGNTGQLTWTRLPQGFKNSPTLFNEALHRDLASFRALNPQVVMLQYVDDLLVAAPTYRDCKEGTRRLLQELSKLGYRVSAKKAQLCREEVTYLGYLLKGGKRWLTPARKATVMKIPTPTTPRQVREFLGKAGFCRLFIPGFASLAAPLYPLTRPKVPFTWTEAHQEAFGRIKEALLSAPALALPDLTKPFALYVDEKEGVARGVLTQTLGPWRRPVAYLSKKLDPVASGWPTCLKAIAAVALLLKDADKLTLGQNVLVIAPHNLESIVRQPPDRWMTNARMTHYQSLLLNERVSFAPPAILNPATLLPVESDDTPIHICSEILAEETGTRPDLRDQPLPGVPAWYTDGSSFIMDGRRQAGAAIVDNKRTVWASNLPEGTSAQKAELIALTQALRLAEGKSINIYTDSRYAFATAHVHGAIYKQRGWLTSAGKDIKNKEEILALLEAIHLPKRVAIIHCPGHQRGTDPVATGNRKADEAAKQAAQSTRILTETTKNAGKRTADGSEFEKRTADGSEFESPKKKAKVE

SEQ ID NO: 1741 - protein, 2127 aa, synthetic construct
MPAAKRVKLDGGDKKYSIGLDIGTNSVGWAVITDEYKVPSKKFKVLGNTDRHSIKKNLIGALLFDSGETAEATRLKRTARRRYTRRKNRICYLQEIFSNEMAKVDDSFFHRLEESFLVEEDKKHERHPIFGNIVDEVAYHEKYPTIYHLRKKLVDSTDKADLRLIYLALAHMIKFRGHFLIEGDLNPDNSDVDKLFIQLVQTYNQLFEENPINASGVDAKAILSARLSKSRRLENLIAQLPGEKKNGLFGNLIALSLGLTPNFKSNFDLAEDAKLQLSKDTYDDDLDNLLAQIGDQYADLFLAAKNLSDAILLSDILRVNTEITKAPLSASMIKRYDEHHQDLTLLKALVRQQLPEKYKEIFFDQSKNGYAGYIDGGASQEEFYKFIKPILEKMDGTEELLVKLNREDLLRKQRTFDNGSIPHQIHLGELHAILRRQEDFYPFLKDNREKIEKILTFRIPYYVGPLARGNSRFAWMTRKSEETITPWNFEEVVDKGASAQSFIERMTNFDKNLPNEKVLPKHSLLYEYFTVYNELTKVKYVTEGMRKPAFLSGEQKKAIVDLLFKTNRKVTVKQLKEDYFKKIECFDSVEISGVEDRFNASLGTYHDLLKIIKDKDFLDNEENEDILEDIVLTLTLFEDREMIEERLKTYAHLFDDKVMKQLKRRRYTGWGRLSRKLINGIRDKQSGKTILDFLKSDGFANRNFMQLIHDDSLTFKEDIQKAQVSGQGDSLHEHIANLAGSPAIKKGILQTVKVVDELVKVMGRHKPENIVIEMARENQTTQKGQKNSRERMKRIEEGIKELGSQILKEHPVENTQLQNEKLYLYYLQNGRDMYVDQELDINRLSDYDVDHIVPQSFLKDDSIDNKVLTRSDKARGKSDNVPSEEVVKKMKNYWRQLLNAKLITQRKFDNLTKAERGGLSELDKAGFIKRQLVETRQITKHVAQILDSRMNTKYDENDKLIREVKVITLKSKLVSDFRKDFQFYKVREINNYHHAHDAYLNAVVGTALIKKYPKLESEFVYGDYKVYDVRKMIAKSEQEIGKATAKYFFYSNIMNFFKTEITLANGEIRKRPLIETNGETGEIVWDKGRDFATVRKVLSMPQVNIVKKTEVQTGGFSKESILPKRNSDKLIARKKDWDPKKYGGFDSPTVAYSVLVVAKVEKGKSKKLKSVKELLGITIMERSSFEKNPIDFLEAKGYKEVKKDLIIKLPKYSLFELENGRKRMLASAGELQKGNELALPSKYVNFLYLASHYEKLKGSPEDNEQKQLFVEQHKHYLDEIIEQISEFSKRVILADANLDKVLSAYNKHRDKPIREQAENIIHLFTLTNLGAPAAFKYFDTTIDRKRYTSTKEVLDATLIHQSITGLYETRIDLSQLGGDGGGGSGGGEAAAKGGLLGRDLLTKLKAQIQFSTEGPQVTWEDRPAMCLVLNLEEEYRLHEKPVPPSIDPSWLQLFPMVWAEKAGMGLANQVPPVVVELKSDASPVAVRQYPMSKEAREGIRPHIQRFLDLGILVPCQSPWNTPLLPVKKPGTNDYRPVQDLREVNKRVQDIHPTVPNPYNLLSSLPPSHTWYSVLDLKDAFFCLKLHPNSQPLFAFEWRDPEKGNTGQLTWTRLPQGFKNSPTLFNEALHRDLASFRALNPQVVMLQYVDDLLVAAPTYRDCKEGTRRLLQELSKLGYRVSAKKAQLCREEVTYLGYLLKGGKRWLTPARKATVMKIPTPTTPRQVREFLGKAGFCRLFIPGFASLAAPLYPLTRPKVPFTWTEAHQEAFGRIKEALLSAPALALPDLTKPFALYVDEKEGVARGVLTQTLGPWRRPVAYLSKKLDPVASGWPTCLKAIAAVALLLKDADKLTLGQNVLVIAPHNLESIVRQPPDRWMTNARMTHYQSLLLNERVSFAPPAILNPATLLPVESDDTPIHICSEILAEETGTRPDLRDQPLPGVPAWYTDGSSFIMDGRRQAGAAIVDNKRTVWASNLPEGTSAQKAELIALTQALRLAEGKSINIYTDSRYAFATAHVHGAIYKQRGWLTSAGKDIKNKEEILALLEAIHLPKRVAIIHCPGHQRGTDPVATGNRKADEAAKQAAQSTRILTETTKNAGKRTADGSEFEKRTADGSEFESPKKKAKVE

SEQ ID NO: 1742 - protein, 2122 aa, synthetic construct
MPAAKRVKLDGGDKKYSIGLDIGTNSVGWAVITDEYKVPSKKFKVLGNTDRHSIKKNLIGALLFDSGETAEATRLKRTARRRYTRRKNRICYLQEIFSNEMAKVDDSFFHRLEESFLVEEDKKHERHPIFGNIVDEVAYHEKYPTIYHLRKKLVDSTDKADLRLIYLALAHMIKFRGHFLIEGDLNPDNSDVDKLFIQLVQTYNQLFEENPINASGVDAKAILSARLSKSRRLENLIAQLPGEKKNGLFGNLIALSLGLTPNFKSNFDLAEDAKLQLSKDTYDDDLDNLLAQIGDQYADLFLAAKNLSDAILLSDILRVNTEITKAPLSASMIKRYDEHHQDLTLLKALVRQQLPEKYKEIFFDQSKNGYAGYIDGGASQEEFYKFIKPILEKMDGTEELLVKLNREDLLRKQRTFDNGSIPHQIHLGELHAILRRQEDFYPFLKDNREKIEKILTFRIPYYVGPLARGNSRFAWMTRKSEETITPWNFEEVVDKGASAQSFIERMTNFDKNLPNEKVLPKHSLLYEYFTVYNELTKVKYVTEGMRKPAFLSGEQKKAIVDLLFKTNRKVTVKQLKEDYFKKIECFDSVEISGVEDRFNASLGTYHDLLKIIKDKDFLDNEENEDILEDIVLTLTLFEDREMIEERLKTYAHLFDDKVMKQLKRRRYTGWGRLSRKLINGIRDKQSGKTILDFLKSDGFANRNFMQLIHDDSLTFKEDIQKAQVSGQGDSLHEHIANLAGSPAIKKGILQTVKVVDELVKVMGRHKPENIVIEMARENQTTQKGQKNSRERMKRIEEGIKELGSQILKEHPVENTQLQNEKLYLYYLQNGRDMYVDQELDINRLSDYDVDHIVPQSFLKDDSIDNKVLTRSDKARGKSDNVPSEEVVKKMKNYWRQLLNAKLITQRKFDNLTKAERGGLSELDKAGFIKRQLVETRQITKHVAQILDSRMNTKYDENDKLIREVKVITLKSKLVSDFRKDFQFYKVREINNYHHAHDAYLNAVVGTALIKKYPKLESEFVYGDYKVYDVRKMIAKSEQEIGKATAKYFFYSNIMNFFKTEITLANGEIRKRPLIETNGETGEIVWDKGRDFATVRKVLSMPQVNIVKKTEVQTGGFSKESILPKRNSDKLIARKKDWDPKKYGGFDSPTVAYSVLVVAKVEKGKSKKLKSVKELLGITIMERSSFEKNPIDFLEAKGYKEVKKDLIIKLPKYSLFELENGRKRMLASAGELQKGNELALPSKYVNFLYLASHYEKLKGSPEDNEQKQLFVEQHKHYLDEIIEQISEFSKRVILADANLDKVLSAYNKHRDKPIREQAENIIHLFTLTNLGAPAAFKYFDTTIDRKRYTSTKEVLDATLIHQSITGLYETRIDLSQLGGDGGGSSGGSGGLLGRDLLTKLKAQIQFSTEGPQVTWEDRPAMCLVLNLEEEYRLHEKPVPPSIDPSWLQLFPMVWAEKAGMGLANQVPPVVVELKSDASPVAVRQYPMSKEAREGIRPHIQRFLDLGILVPCQSPWNTPLLPVKKPGTNDYRPVQDLREVNKRVQDIHPTVPNPYNLLSSLPPSHTWYSVLDLKDAFFCLKLHPNSQPLFAFEWRDPEKGNTGQLTWTRLPQGFKNSPTLFNEALHRDLASFRALNPQVVMLQYVDDLLVAAPTYRDCKEGTRRLLQELSKLGYRVSAKKAQLCREEVTYLGYLLKGGKRWLTPARKATVMKIPTPTTPRQVREFLGKAGFCRLFIPGFASLAAPLYPLTRPKVPFTWTEAHQEAFGRIKEALLSAPALALPDLTKPFALYVDEKEGVARGVLTQTLGPWRRPVAYLSKKLDPVASGWPTCLKAIAAVALLLKDADKLTLGQNVLVIAPHNLESIVRQPPDRWMTNARMTHYQSLLLNERVSFAPPAILNPATLLPVESDDTPIHICSEILAEETGTRPDLRDQPLPGVPAWYTDGSSFIMDGRRQAGAAIVDNKRTVWASNLPEGTSAQKAELIALTQALRLAEGKSINIYTDSRYAFATAHVHGAIYKQRGWLTSAGKDIKNKEEILALLEAIHLPKRVAIIHCPGHQRGTDPVATGNRKADEAAKQAAQSTRILTETTKNAGKRTADGSEFEKRTADGSEFESPKKKAKVE

SEQ ID NO: 1743 - protein, 2124 aa, synthetic construct
MPAAKRVKLDGGDKKYSIGLDIGTNSVGWAVITDEYKVPSKKFKVLGNTDRHSIKKNLIGALLFDSGETAEATRLKRTARRRYTRRKNRICYLQEIFSNEMAKVDDSFFHRLEESFLVEEDKKHERHPIFGNIVDEVAYHEKYPTIYHLRKKLVDSTDKADLRLIYLALAHMIKFRGHFLIEGDLNPDNSDVDKLFIQLVQTYNQLFEENPINASGVDAKAILSARLSKSRRLENLIAQLPGEKKNGLFGNLIALSLGLTPNFKSNFDLAEDAKLQLSKDTYDDDLDNLLAQIGDQYADLFLAAKNLSDAILLSDILRVNTEITKAPLSASMIKRYDEHHQDLTLLKALVRQQLPEKYKEIFFDQSKNGYAGYIDGGASQEEFYKFIKPILEKMDGTEELLVKLNREDLLRKQRTFDNGSIPHQIHLGELHAILRRQEDFYPFLKDNREKIEKILTFRIPYYVGPLARGNSRFAWMTRKSEETITPWNFEEVVDKGASAQSFIERMTNFDKNLPNEKVLPKHSLLYEYFTVYNELTKVKYVTEGMRKPAFLSGEQKKAIVDLLFKTNRKVTVKQLKEDYFKKIECFDSVEISGVEDRFNASLGTYHDLLKIIKDKDFLDNEENEDILEDIVLTLTLFEDREMIEERLKTYAHLFDDKVMKQLKRRRYTGWGRLSRKLINGIRDKQSGKTILDFLKSDGFANRNFMQLIHDDSLTFKEDIQKAQVSGQGDSLHEHIANLAGSPAIKKGILQTVKVVDELVKVMGRHKPENIVIEMARENQTTQKGQKNSRERMKRIEEGIKELGSQILKEHPVENTQLQNEKLYLYYLQNGRDMYVDQELDINRLSDYDVDHIVPQSFLKDDSIDNKVLTRSDKARGKSDNVPSEEVVKKMKNYWRQLLNAKLITQRKFDNLTKAERGGLSELDKAGFIKRQLVETRQITKHVAQILDSRMNTKYDENDKLIREVKVITLKSKLVSDFRKDFQFYKVREINNYHHAHDAYLNAVVGTALIKKYPKLESEFVYGDYKVYDVRKMIAKSEQEIGKATAKYFFYSNIMNFFKTEITLANGEIRKRPLIETNGETGEIVWDKGRDFATVRKVLSMPQVNIVKKTEVQTGGFSKESILPKRNSDKLIARKKDWDPKKYGGFDSPTVAYSVLVVAKVEKGKSKKLKSVKELLGITIMERSSFEKNPIDFLEAKGYKEVKKDLIIKLPKYSLFELENGRKRMLASAGELQKGNELALPSKYVNFLYLASHYEKLKGSPEDNEQKQLFVEQHKHYLDEIIEQISEFSKRVILADANLDKVLSAYNKHRDKPIREQAENIIHLFTLTNLGAPAAFKYFDTTIDRKRYTSTKEVLDATLIHQSITGLYETRIDLSQLGGDGGGGSEAAAKGGLLGRDLLTKLKAQIQFSTEGPQVTWEDRPAMCLVLNLEEEYRLHEKPVPPSIDPSWLQLFPMVWAEKAGMGLANQVPPVVVELKSDASPVAVRQYPMSKEAREGIRPHIQRFLDLGILVPCQSPWNTPLLPVKKPGTNDYRPVQDLREVNKRVQDIHPTVPNPYNLLSSLPPSHTWYSVLDLKDAFFCLKLHPNSQPLFAFEWRDPEKGNTGQLTWTRLPQGFKNSPTLFNEALHRDLASFRALNPQVVMLQYVDDLLVAAPTYRDCKEGTRRLLQELSKLGYRVSAKKAQLCREEVTYLGYLLKGGKRWLTPARKATVMKIPTPTTPRQVREFLGKAGFCRLFIPGFASLAAPLYPLTRPKVPFTWTEAHQEAFGRIKEALLSAPALALPDLTKPFALYVDEKEGVARGVLTQTLGPWRRPVAYLSKKLDPVASGWPTCLKAIAAVALLLKDADKLTLGQNVLVIAPHNLESIVRQPPDRWMTNARMTHYQSLLLNERVSFAPPAILNPATLLPVESDDTPIHICSEILAEETGTRPDLRDQPLPGVPAWYTDGSSFIMDGRRQAGAAIVDNKRTVWASNLPEGTSAQKAELIALTQALRLAEGKSINIYTDSRYAFATAHVHGAIYKQRGWLTSAGKDIKNKEEILALLEAIHLPKRVAIIHCPGHQRGTDPVATGNRKADEAAKQAAQSTRILTETTKNAGKRTADGSEFEKRTADGSEFESPKKKAKVE

SEQ ID NO: 1744 - protein, 2141 aa, synthetic construct
MPAAKRVKLDGGDKKYSIGLDIGTNSVGWAVITDEYKVPSKKFKVLGNTDRHSIKKNLIGALLFDSGETAEATRLKRTARRRYTRRKNRICYLQEIFSNEMAKVDDSFFHRLEESFLVEEDKKHERHPIFGNIVDEVAYHEKYPTIYHLRKKLVDSTDKADLRLIYLALAHMIKFRGHFLIEGDLNPDNSDVDKLFIQLVQTYNQLFEENPINASGVDAKAILSARLSKSRRLENLIAQLPGEKKNGLFGNLIALSLGLTPNFKSNFDLAEDAKLQLSKDTYDDDLDNLLAQIGDQYADLFLAAKNLSDAILLSDILRVNTEITKAPLSASMIKRYDEHHQDLTLLKALVRQQLPEKYKEIFFDQSKNGYAGYIDGGASQEEFYKFIKPILEKMDGTEELLVKLNREDLLRKQRTFDNGSIPHQIHLGELHAILRRQEDFYPFLKDNREKIEKILTFRIPYYVGPLARGNSRFAWMTRKSEETITPWNFEEVVDKGASAQSFIERMTNFDKNLPNEKVLPKHSLLYEYFTVYNELTKVKYVTEGMRKPAFLSGEQKKAIVDLLFKTNRKVTVKQLKEDYFKKIECFDSVEISGVEDRFNASLGTYHDLLKIIKDKDFLDNEENEDILEDIVLTLTLFEDREMIEERLKTYAHLFDDKVMKQLKRRRYTGWGRLSRKLINGIRDKQSGKTILDFLKSDGFANRNFMQLIHDDSLTFKEDIQKAQVSGQGDSLHEHIANLAGSPAIKKGILQTVKVVDELVKVMGRHKPENIVIEMARENQTTQKGQKNSRERMKRIEEGIKELGSQILKEHPVENTQLQNEKLYLYYLQNGRDMYVDQELDINRLSDYDVDHIVPQSFLKDDSIDNKVLTRSDKARGKSDNVPSEEVVKKMKNYWRQLLNAKLITQRKFDNLTKAERGGLSELDKAGFIKRQLVETRQITKHVAQILDSRMNTKYDENDKLIREVKVITLKSKLVSDFRKDFQFYKVREINNYHHAHDAYLNAVVGTALIKKYPKLESEFVYGDYKVYDVRKMIAKSEQEIGKATAKYFFYSNIMNFFKTEITLANGEIRKRPLIETNGETGEIVWDKGRDFATVRKVLSMPQVNIVKKTEVQTGGFSKESILPKRNSDKLIARKKDWDPKKYGGFDSPTVAYSVLVVAKVEKGKSKKLKSVKELLGITIMERSSFEKNPIDFLEAKGYKEVKKDLIIKLPKYSLFELENGRKRMLASAGELQKGNELALPSKYVNFLYLASHYEKLKGSPEDNEQKQLFVEQHKHYLDEIIEQISEFSKRVILADANLDKVLSAYNKHRDKPIREQAENIIHLFTLTNLGAPAAFKYFDTTIDRKRYTSTKEVLDATLIHQSITGLYETRIDLSQLGGDGGEAAAKEAAAKEAAAKEAAAKEAAAKGGLLGRDLLTKLKAQIQFSTEGPQVTWEDRPAMCLVLNLEEEYRLHEKPVPPSIDPSWLQLFPMVWAEKAGMGLANQVPPVVVELKSDASPVAVRQYPMSKEAREGIRPHIQRFLDLGILVPCQSPWNTPLLPVKKPGTNDYRPVQDLREVNKRVQDIHPTVPNPYNLLSSLPPSHTWYSVLDLKDAFFCLKLHPNSQPLFAFEWRDPEKGNTGQLTWTRLPQGFKNSPTLFNEALHRDLASFRALNPQVVMLQYVDDLLVAAPTYRDCKEGTRRLLQELSKLGYRVSAKKAQLCREEVTYLGYLLKGGKRWLTPARKATVMKIPTPTTPRQVREFLGKAGFCRLFIPGFASLAAPLYPLTRPKVPFTWTEAHQEAFGRIKEALLSAPALALPDLTKPFALYVDEKEGVARGVLTQTLGPWRRPVAYLSKKLDPVASGWPTCLKAIAAVALLLKDADKLTLGQNVLVIAPHNLESIVRQPPDRWMTNARMTHYQSLLLNERVSFAPPAILNPATLLPVESDDTPIHICSEILAEETGTRPDLRDQPLPGVPAWYTDGSSFIMDGRRQAGAAIVDNKRTVWASNLPEGTSAQKAELIALTQALRLAEGKSINIYTDSRYAFATAHVHGAIYKQRGWLTSAGKDIKNKEEILALLEAIHLPKRVAIIHCPGHQRGTDPVATGNRKADEAAKQAAQSTRILTETTKNAGKRTADGSEFEKRTADGSEFESPKKKAKVE

SEQ ID NO: 1745 - protein, 2125 aa, synthetic construct
MPAAKRVKLDGGDKKYSIGLDIGTNSVGWAVITDEYKVPSKKFKVLGNTDRHSIKKNLIGALLFDSGETAEATRLKRTARRRYTRRKNRICYLQEIFSNEMAKVDDSFFHRLEESFLVEEDKKHERHPIFGNIVDEVAYHEKYPTIYHLRKKLVDSTDKADLRLIYLALAHMIKFRGHFLIEGDLNPDNSDVDKLFIQLVQTYNQLFEENPINASGVDAKAILSARLSKSRRLENLIAQLPGEKKNGLFGNLIALSLGLTPNFKSNFDLAEDAKLQLSKDTYDDDLDNLLAQIGDQYADLFLAAKNLSDAILLSDILRVNTEITKAPLSASMIKRYDEHHQDLTLLKALVRQQLPEKYKEIFFDQSKNGYAGYIDGGASQEEFYKFIKPILEKMDGTEELLVKLNREDLLRKQRTFDNGSIPHQIHLGELHAILRRQEDFYPFLKDNREKIEKILTFRIPYYVGPLARGNSRFAWMTRKSEETITPWNFEEVVDKGASAQSFIERMTNFDKNLPNEKVLPKHSLLYEYFTVYNELTKVKYVTEGMRKPAFLSGEQKKAIVDLLFKTNRKVTVKQLKEDYFKKIECFDSVEISGVEDRFNASLGTYHDLLKIIKDKDFLDNEENEDILEDIVLTLTLFEDREMIEERLKTYAHLFDDKVMKQLKRRRYTGWGRLSRKLINGIRDKQSGKTILDFLKSDGFANRNFMQLIHDDSLTFKEDIQKAQVSGQGDSLHEHIANLAGSPAIKKGILQTVKVVDELVKVMGRHKPENIVIEMARENQTTQKGQKNSRERMKRIEEGIKELGSQILKEHPVENTQLQNEKLYLYYLQNGRDMYVDQELDINRLSDYDVDHIVPQSFLKDDSIDNKVLTRSDKARGKSDNVPSEEVVKKMKNYWRQLLNAKLITQRKFDNLTKAERGGLSELDKAGFIKRQLVETRQITKHVAQILDSRMNTKYDENDKLIREVKVITLKSKLVSDFRKDFQFYKVREINNYHHAHDAYLNAVVGTALIKKYPKLESEFVYGDYKVYDVRKMIAKSEQEIGKATAKYFFYSNIMNFFKTEITLANGEIRKRPLIETNGETGEIVWDKGRDFATVRKVLSMPQVNIVKKTEVQTGGFSKESILPKRNSDKLIARKKDWDPKKYGGFDSPTVAYSVLVVAKVEKGKSKKLKSVKELLGITIMERSSFEKNPIDFLEAKGYKEVKKDLIIKLPKYSLFELENGRKRMLASAGELQKGNELALPSKYVNFLYLASHYEKLKGSPEDNEQKQLFVEQHKHYLDEIIEQISEFSKRVILADANLDKVLSAYNKHRDKPIREQAENIIHLFTLTNLGAPAAFKYFDTTIDRKRYTSTKEVLDATLIHQSITGLYETRIDLSQLGGDGGGGGGGSPAPGGLLGRDLLTKLKAQIQFSTEGPQVTWEDRPAMCLVLNLEEEYRLHEKPVPPSIDPSWLQLFPMVWAEKAGMGLANQVPPVVVELKSDASPVAVRQYPMSKEAREGIRPHIQRFLDLGILVPCQSPWNTPLLPVKKPGTNDYRPVQDLREVNKRVQDIHPTVPNPYNLLSSLPPSHTWYSVLDLKDAFFCLKLHPNSQPLFAFEWRDPEKGNTGQLTWTRLPQGFKNSPTLFNEALHRDLASFRALNPQVVMLQYVDDLLVAAPTYRDCKEGTRRLLQELSKLGYRVSAKKAQLCREEVTYLGYLLKGGKRWLTPARKATVMKIPTPTTPRQVREFLGKAGFCRLFIPGFASLAAPLYPLTRPKVPFTWTEAHQEAFGRIKEALLSAPALALPDLTKPFALYVDEKEGVARGVLTQTLGPWRRPVAYLSKKLDPVASGWPTCLKAIAAVALLLKDADKLTLGQNVLVIAPHNLESIVRQPPDRWMTNARMTHYQSLLLNERVSFAPPAILNPATLLPVESDDTPIHICSEILAEETGTRPDLRDQPLPGVPAWYTDGSSFIMDGRRQAGAAIVDNKRTVWASNLPEGTSAQKAELIALTQALRLAEGKSINIYTDSRYAFATAHVHGAIYKQRGWLTSAGKDIKNKEEILALLEAIHLPKRVAIIHCPGHQRGTDPVATGNRKADEAAKQAAQSTRILTETTKNAGKRTADGSEFEKRTADGSEFESPKKKAKVE

SEQ ID NO: 1746 - protein, 2124 aa, synthetic construct
MPAAKRVKLDGGDKKYSIGLDIGTNSVGWAVITDEYKVPSKKFKVLGNTDRHSIKKNLIGALLFDSGETAEATRLKRTARRRYTRRKNRICYLQEIFSNEMAKVDDSFFHRLEESFLVEEDKKHERHPIFGNIVDEVAYHEKYPTIYHLRKKLVDSTDKADLRLIYLALAHMIKFRGHFLIEGDLNPDNSDVDKLFIQLVQTYNQLFEENPINASGVDAKAILSARLSKSRRLENLIAQLPGEKKNGLFGNLIALSLGLTPNFKSNFDLAEDAKLQLSKDTYDDDLDNLLAQIGDQYADLFLAAKNLSDAILLSDILRVNTEITKAPLSASMIKRYDEHHQDLTLLKALVRQQLPEKYKEIFFDQSKNGYAGYIDGGASQEEFYKFIKPILEKMDGTEELLVKLNREDLLRKQRTFDNGSIPHQIHLGELHAILRRQEDFYPFLKDNREKIEKILTFRIPYYVGPLARGNSRFAWMTRKSEETITPWNFEEVVDKGASAQSFIERMTNFDKNLPNEKVLPKHSLLYEYFTVYNELTKVKYVTEGMRKPAFLSGEQKKAIVDLLFKTNRKVTVKQLKEDYFKKIECFDSVEISGVEDRFNASLGTYHDLLKIIKDKDFLDNEENEDILEDIVLTLTLFEDREMIEERLKTYAHLFDDKVMKQLKRRRYTGWGRLSRKLINGIRDKQSGKTILDFLKSDGFANRNFMQLIHDDSLTFKEDIQKAQVSGQGDSLHEHIANLAGSPAIKKGILQTVKVVDELVKVMGRHKPENIVIEMARENQTTQKGQKNSRERMKRIEEGIKELGSQILKEHPVENTQLQNEKLYLYYLQNGRDMYVDQELDINRLSDYDVDHIVPQSFLKDDSIDNKVLTRSDKARGKSDNVPSEEVVKKMKNYWRQLLNAKLITQRKFDNLTKAERGGLSELDKAGFIKRQLVETRQITKHVAQILDSRMNTKYDENDKLIREVKVITLKSKLVSDFRKDFQFYKVREINNYHHAHDAYLNAVVGTALIKKYPKLESEFVYGDYKVYDVRKMIAKSEQEIGKATAKYFFYSNIMNFFKTEITLANGEIRKRPLIETNGETGEIVWDKGRDFATVRKVLSMPQVNIVKKTEVQTGGFSKESILPKRNSDKLIARKKDWDPKKYGGFDSPTVAYSVLVVAKVEKGKSKKLKSVKELLGITIMERSSFEKNPIDFLEAKGYKEVKKDLIIKLPKYSLFELENGRKRMLASAGELQKGNELALPSKYVNFLYLASHYEKLKGSPEDNEQKQLFVEQHKHYLDEIIEQISEFSKRVILADANLDKVLSAYNKHRDKPIREQAENIIHLFTLTNLGAPAAFKYFDTTIDRKRYTSTKEVLDATLIHQSITGLYETRIDLSQLGGDGGEAAAKGGGGGLLGRDLLTKLKAQIQFSTEGPQVTWEDRPAMCLVLNLEEEYRLHEKPVPPSIDPSWLQLFPMVWAEKAGMGLANQVPPVVVELKSDASPVAVRQYPMSKEAREGIRPHIQRFLDLGILVPCQSPWNTPLLPVKKPGTNDYRPVQDLREVNKRVQDIHPTVPNPYNLLSSLPPSHTWYSVLDLKDAFFCLKLHPNSQPLFAFEWRDPEKGNTGQLTWTRLPQGFKNSPTLFNEALHRDLASFRALNPQVVMLQYVDDLLVAAPTYRDCKEGTRRLLQELSKLGYRVSAKKAQLCREEVTYLGYLLKGGKRWLTPARKATVMKIPTPTTPRQVREFLGKAGFCRLFIPGFASLAAPLYPLTRPKVPFTWTEAHQEAFGRIKEALLSAPALALPDLTKPFALYVDEKEGVARGVLTQTLGPWRRPVAYLSKKLDPVASGWPTCLKAIAAVALLLKDADKLTLGQNVLVIAPHNLESIVRQPPDRWMTNARMTHYQSLLLNERVSFAPPAILNPATLLPVESDDTPIHICSEILAEETGTRPDLRDQPLPGVPAWYTDGSSFIMDGRRQAGAAIVDNKRTVWASNLPEGTSAQKAELIALTQALRLAEGKSINIYTDSRYAFATAHVHGAIYKQRGWLTSAGKDIKNKEEILALLEAIHLPKRVAIIHCPGHQRGTDPVATGNRKADEAAKQAAQSTRILTETTKNAGKRTADGSEFEKRTADGSEFESPKKKAKVE

SEQ ID NO: 1747 - protein, 2122 aa, synthetic construct
MPAAKRVKLDGGDKKYSIGLDIGTNSVGWAVITDEYKVPSKKFKVLGNTDRHSIKKNLIGALLFDSGETAEATRLKRTARRRYTRRKNRICYLQEIFSNEMAKVDDSFFHRLEESFLVEEDKKHERHPIFGNIVDEVAYHEKYPTIYHLRKKLVDSTDKADLRLIYLALAHMIKFRGHFLIEGDLNPDNSDVDKLFIQLVQTYNQLFEENPINASGVDAKAILSARLSKSRRLENLIAQLPGEKKNGLFGNLIALSLGLTPNFKSNFDLAEDAKLQLSKDTYDDDLDNLLAQIGDQYADLFLAAKNLSDAILLSDILRVNTEITKAPLSASMIKRYDEHHQDLTLLKALVRQQLPEKYKEIFFDQSKNGYAGYIDGGASQEEFYKFIKPILEKMDGTEELLVKLNREDLLRKQRTFDNGSIPHQIHLGELHAILRRQEDFYPFLKDNREKIEKILTFRIPYYVGPLARGNSRFAWMTRKSEETITPWNFEEVVDKGASAQSFIERMTNFDKNLPNEKVLPKHSLLYEYFTVYNELTKVKYVTEGMRKPAFLSGEQKKAIVDLLFKTNRKVTVKQLKEDYFKKIECFDSVEISGVEDRFNASLGTYHDLLKIIKDKDFLDNEENEDILEDIVLTLTLFEDREMIEERLKTYAHLFDDKVMKQLKRRRYTGWGRLSRKLINGIRDKQSGKTILDFLKSDGFANRNFMQLIHDDSLTFKEDIQKAQVSGQGDSLHEHIANLAGSPAIKKGILQTVKVVDELVKVMGRHKPENIVIEMARENQTTQKGQKNSRERMKRIEEGIKELGSQILKEHPVENTQLQNEKLYLYYLQNGRDMYVDQELDINRLSDYDVDHIVPQSFLKDDSIDNKVLTRSDKARGKSDNVPSEEVVKKMKNYWRQLLNAKLITQRKFDNLTKAERGGLSELDKAGFIKRQLVETRQITKHVAQILDSRMNTKYDENDKLIREVKVITLKSKLVSDFRKDFQFYKVREINNYHHAHDAYLNAVVGTALIKKYPKLESEFVYGDYKVYDVRKMIAKSEQEIGKATAKYFFYSNIMNFFKTEITLANGEIRKRPLIETNGETGEIVWDKGRDFATVRKVLSMPQVNIVKKTEVQTGGFSKESILPKRNSDKLIARKKDWDPKKYGGFDSPTVAYSVLVVAKVEKGKSKKLKSVKELLGITIMERSSFEKNPIDFLEAKGYKEVKKDLIIKLPKYSLFELENGRKRMLASAGELQKGNELALPSKYVNFLYLASHYEKLKGSPEDNEQKQLFVEQHKHYLDEIIEQISEFSKRVILADANLDKVLSAYNKHRDKPIREQAENIIHLFTLTNLGAPAAFKYFDTTIDRKRYTSTKEVLDATLIHQSITGLYETRIDLSQLGGDGGGSSGSSGGLLGRDLLTKLKAQIQFSTEGPQVTWEDRPAMCLVLNLEEEYRLHEKPVPPSIDPSWLQLFPMVWAEKAGMGLANQVPPVVVELKSDASPVAVRQYPMSKEAREGIRPHIQRFLDLGILVPCQSPWNTPLLPVKKPGTNDYRPVQDLREVNKRVQDIHPTVPNPYNLLSSLPPSHTWYSVLDLKDAFFCLKLHPNSQPLFAFEWRDPEKGNTGQLTWTRLPQGFKNSPTLFNEALHRDLASFRALNPQVVMLQYVDDLLVAAPTYRDCKEGTRRLLQELSKLGYRVSAKKAQLCREEVTYLGYLLKGGKRWLTPARKATVMKIPTPTTPRQVREFLGKAGFCRLFIPGFASLAAPLYPLTRPKVPFTWTEAHQEAFGRIKEALLSAPALALPDLTKPFALYVDEKEGVARGVLTQTLGPWRRPVAYLSKKLDPVASGWPTCLKAIAAVALLLKDADKLTLGQNVLVIAPHNLESIVRQPPDRWMTNARMTHYQSLLLNERVSFAPPAILNPATLLPVESDDTPIHICSEILAEETGTRPDLRDQPLPGVPAWYTDGSSFIMDGRRQAGAAIVDNKRTVWASNLPEGTSAQKAELIALTQALRLAEGKSINIYTDSRYAFATAHVHGAIYKQRGWLTSAGKDIKNKEEILALLEAIHLPKRVAIIHCPGHQRGTDPVATGNRKADEAAKQAAQSTRILTETTKNAGKRTADGSEFEKRTADGSEFESPKKKAKVE

SEQ ID NO: 1748 - protein, 2122 aa, synthetic construct
MPAAKRVKLDGGDKKYSIGLDIGTNSVGWAVITDEYKVPSKKFKVLGNTDRHSIKKNLIGALLFDSGETAEATRLKRTARRRYTRRKNRICYLQEIFSNEMAKVDDSFFHRLEESFLVEEDKKHERHPIFGNIVDEVAYHEKYPTIYHLRKKLVDSTDKADLRLIYLALAHMIKFRGHFLIEGDLNPDNSDVDKLFIQLVQTYNQLFEENPINASGVDAKAILSARLSKSRRLENLIAQLPGEKKNGLFGNLIALSLGLTPNFKSNFDLAEDAKLQLSKDTYDDDLDNLLAQIGDQYADLFLAAKNLSDAILLSDILRVNTEITKAPLSASMIKRYDEHHQDLTLLKALVRQQLPEKYKEIFFDQSKNGYAGYIDGGASQEEFYKFIKPILEKMDGTEELLVKLNREDLLRKQRTFDNGSIPHQIHLGELHAILRRQEDFYPFLKDNREKIEKILTFRIPYYVGPLARGNSRFAWMTRKSEETITPWNFEEVVDKGASAQSFIERMTNFDKNLPNEKVLPKHSLLYEYFTVYNELTKVKYVTEGMRKPAFLSGEQKKAIVDLLFKTNRKVTVKQLKEDYFKKIECFDSVEISGVEDRFNASLGTYHDLLKIIKDKDFLDNEENEDILEDIVLTLTLFEDREMIEERLKTYAHLFDDKVMKQLKRRRYTGWGRLSRKLINGIRDKQSGKTILDFLKSDGFANRNFMQLIHDDSLTFKEDIQKAQVSGQGDSLHEHIANLAGSPAIKKGILQTVKVVDELVKVMGRHKPENIVIEMARENQTTQKGQKNSRERMKRIEEGIKELGSQILKEHPVENTQLQNEKLYLYYLQNGRDMYVDQELDINRLSDYDVDHIVPQSFLKDDSIDNKVLTRSDKARGKSDNVPSEEVVKKMKNYWRQLLNAKLITQRKFDNLTKAERGGLSELDKAGFIKRQLVETRQITKHVAQILDSRMNTKYDENDKLIREVKVITLKSKLVSDFRKDFQFYKVREINNYHHAHDAYLNAVVGTALIKKYPKLESEFVYGDYKVYDVRKMIAKSEQEIGKATAKYFFYSNIMNFFKTEITLANGEIRKRPLIETNGETGEIVWDKGRDFATVRKVLSMPQVNIVKKTEVQTGGFSKESILPKRNSDKLIARKKDWDPKKYGGFDSPTVAYSVLVVAKVEKGKSKKLKSVKELLGITIMERSSFEKNPIDFLEAKGYKEVKKDLIIKLPKYSLFELENGRKRMLASAGELQKGNELALPSKYVNFLYLASHYEKLKGSPEDNEQKQLFVEQHKHYLDEIIEQISEFSKRVILADANLDKVLSAYNKHRDKPIREQAENIIHLFTLTNLGAPAAFKYFDTTIDRKRYTSTKEVLDATLIHQSITGLYETRIDLSQLGGDGGGGGGGSGGLLGRDLLTKLKAQIQFSTEGPQVTWEDRPAMCLVLNLEEEYRLHEKPVPPSIDPSWLQLFPMVWAEKAGMGLANQVPPVVVELKSDASPVAVRQYPMSKEAREGIRPHIQRFLDLGILVPCQSPWNTPLLPVKKPGTNDYRPVQDLREVNKRVQDIHPTVPNPYNLLSSLPPSHTWYSVLDLKDAFFCLKLHPNSQPLFAFEWRDPEKGNTGQLTWTRLPQGFKNSPTLFNEALHRDLASFRALNPQVVMLQYVDDLLVAAPTYRDCKEGTRRLLQELSKLGYRVSAKKAQLCREEVTYLGYLLKGGKRWLTPARKATVMKIPTPTTPRQVREFLGKAGFCRLFIPGFASLAAPLYPLTRPKVPFTWTEAHQEAFGRIKEALLSAPALALPDLTKPFALYVDEKEGVARGVLTQTLGPWRRPVAYLSKKLDPVASGWPTCLKAIAAVALLLKDADKLTLGQNVLVIAPHNLESIVRQPPDRWMTNARMTHYQSLLLNERVSFAPPAILNPATLLPVESDDTPIHICSEILAEETGTRPDLRDQPLPGVPAWYTDGSSFIMDGRRQAGAAIVDNKRTVWASNLPEGTSAQKAELIALTQALRLAEGKSINIYTDSRYAFATAHVHGAIYKQRGWLTSAGKDIKNKEEILALLEAIHLPKRVAIIHCPGHQRGTDPVATGNRKADEAAKQAAQSTRILTETTKNAGKRTADGSEFEKRTADGSEFESPKKKAKVE

SEQ ID NO: 1749 - protein, 2125 aa, synthetic construct
MPAAKRVKLDGGDKKYSIGLDIGTNSVGWAVITDEYKVPSKKFKVLGNTDRHSIKKNLIGALLFDSGETAEATRLKRTARRRYTRRKNRICYLQEIFSNEMAKVDDSFFHRLEESFLVEEDKKHERHPIFGNIVDEVAYHEKYPTIYHLRKKLVDSTDKADLRLIYLALAHMIKFRGHFLIEGDLNPDNSDVDKLFIQLVQTYNQLFEENPINASGVDAKAILSARLSKSRRLENLIAQLPGEKKNGLFGNLIALSLGLTPNFKSNFDLAEDAKLQLSKDTYDDDLDNLLAQIGDQYADLFLAAKNLSDAILLSDILRVNTEITKAPLSASMIKRYDEHHQDLTLLKALVRQQLPEKYKEIFFDQSKNGYAGYIDGGASQEEFYKFIKPILEKMDGTEELLVKLNREDLLRKQRTFDNGSIPHQIHLGELHAILRRQEDFYPFLKDNREKIEKILTFRIPYYVGPLARGNSRFAWMTRKSEETITPWNFEEVVDKGASAQSFIERMTNFDKNLPNEKVLPKHSLLYEYFTVYNELTKVKYVTEGMRKPAFLSGEQKKAIVDLLFKTNRKVTVKQLKEDYFKKIECFDSVEISGVEDRFNASLGTYHDLLKIIKDKDFLDNEENEDILEDIVLTLTLFEDREMIEERLKTYAHLFDDKVMKQLKRRRYTGWGRLSRKLINGIRDKQSGKTILDFLKSDGFANRNFMQLIHDDSLTFKEDIQKAQVSGQGDSLHEHIANLAGSPAIKKGILQTVKVVDELVKVMGRHKPENIVIEMARENQTTQKGQKNSRERMKRIEEGIKELGSQILKEHPVENTQLQNEKLYLYYLQNGRDMYVDQELDINRLSDYDVDHIVPQSFLKDDSIDNKVLTRSDKARGKSDNVPSEEVVKKMKNYWRQLLNAKLITQRKFDNLTKAERGGLSELDKAGFIKRQLVETRQITKHVAQILDSRMNTKYDENDKLIREVKVITLKSKLVSDFRKDFQFYKVREINNYHHAHDAYLNAVVGTALIKKYPKLESEFVYGDYKVYDVRKMIAKSEQEIGKATAKYFFYSNIMNFFKTEITLANGEIRKRPLIETNGETGEIVWDKGRDFATVRKVLSMPQVNIVKKTEVQTGGFSKESILPKRNSDKLIARKKDWDPKKYGGFDSPTVAYSVLVVAKVEKGKSKKLKSVKELLGITIMERSSFEKNPIDFLEAKGYKEVKKDLIIKLPKYSLFELENGRKRMLASAGELQKGNELALPSKYVNFLYLASHYEKLKGSPEDNEQKQLFVEQHKHYLDEIIEQISEFSKRVILADANLDKVLSAYNKHRDKPIREQAENIIHLFTLTNLGAPAAFKYFDTTIDRKRYTSTKEVLDATLIHQSITGLYETRIDLSQLGGDGGPAPGSSGGSGGLLGRDLLTKLKAQIQFSTEGPQVTWEDRPAMCLVLNLEEEYRLHEKPVPPSIDPSWLQLFPMVWAEKAGMGLANQVPPVVVELKSDASPVAVRQYPMSKEAREGIRPHIQRFLDLGILVPCQSPWNTPLLPVKKPGTNDYRPVQDLREVNKRVQDIHPTVPNPYNLLSSLPPSHTWYSVLDLKDAFFCLKLHPNSQPLFAFEWRDPEKGNTGQLTWTRLPQGFKNSPTLFNEALHRDLASFRALNPQVVMLQYVDDLLVAAPTYRDCKEGTRRLLQELSKLGYRVSAKKAQLCREEVTYLGYLLKGGKRWLTPARKATVMKIPTPTTPRQVREFLGKAGFCRLFIPGFASLAAPLYPLTRPKVPFTWTEAHQEAFGRIKEALLSAPALALPDLTKPFALYVDEKEGVARGVLTQTLGPWRRPVAYLSKKLDPVASGWPTCLKAIAAVALLLKDADKLTLGQNVLVIAPHNLESIVRQPPDRWMTNARMTHYQSLLLNERVSFAPPAILNPATLLPVESDDTPIHICSEILAEETGTRPDLRDQPLPGVPAWYTDGSSFIMDGRRQAGAAIVDNKRTVWASNLPEGTSAQKAELIALTQALRLAEGKSINIYTDSRYAFATAHVHGAIYKQRGWLTSAGKDIKNKEEILALLEAIHLPKRVAIIHCPGHQRGTDPVATGNRKADEAAKQAAQSTRILTETTKNAGKRTADGSEFEKRTADGSEFESPKKKAKVE

SEQ ID NO: 1750 - protein, 2122 aa, synthetic construct
MPAAKRVKLDGGDKKYSIGLDIGTNSVGWAVITDEYKVPSKKFKVLGNTDRHSIKKNLIGALLFDSGETAEATRLKRTARRRYTRRKNRICYLQEIFSNEMAKVDDSFFHRLEESFLVEEDKKHERHPIFGNIVDEVAYHEKYPTIYHLRKKLVDSTDKADLRLIYLALAHMIKFRGHFLIEGDLNPDNSDVDKLFIQLVQTYNQLFEENPINASGVDAKAILSARLSKSRRLENLIAQLPGEKKNGLFGNLIALSLGLTPNFKSNFDLAEDAKLQLSKDTYDDDLDNLLAQIGDQYADLFLAAKNLSDAILLSDILRVNTEITKAPLSASMIKRYDEHHQDLTLLKALVRQQLPEKYKEIFFDQSKNGYAGYIDGGASQEEFYKFIKPILEKMDGTEELLVKLNREDLLRKQRTFDNGSIPHQIHLGELHAILRRQEDFYPFLKDNREKIEKILTFRIPYYVGPLARGNSRFAWMTRKSEETITPWNFEEVVDKGASAQSFIERMTNFDKNLPNEKVLPKHSLLYEYFTVYNELTKVKYVTEGMRKPAFLSGEQKKAIVDLLFKTNRKVTVKQLKEDYFKKIECFDSVEISGVEDRFNASLGTYHDLLKIIKDKDFLDNEENEDILEDIVLTLTLFEDREMIEERLKTYAHLFDDKVMKQLKRRRYTGWGRLSRKLINGIRDKQSGKTILDFLKSDGFANRNFMQLIHDDSLTFKEDIQKAQVSGQGDSLHEHIANLAGSPAIKKGILQTVKVVDELVKVMGRHKPENIVIEMARENQTTQKGQKNSRERMKRIEEGIKELGSQILKEHPVENTQLQNEKLYLYYLQNGRDMYVDQELDINRLSDYDVDHIVPQSFLKDDSIDNKVLTRSDKARGKSDNVPSEEVVKKMKNYWRQLLNAKLITQRKFDNLTKAERGGLSELDKAGFIKRQLVETRQITKHVAQILDSRMNTKYDENDKLIREVKVITLKSKLVSDFRKDFQFYKVREINNYHHAHDAYLNAVVGTALIKKYPKLESEFVYGDYKVYDVRKMIAKSEQEIGKATAKYFFYSNIMNFFKTEITLANGEIRKRPLIETNGETGEIVWDKGRDFATVRKVLSMPQVNIVKKTEVQTGGFSKESILPKRNSDKLIARKKDWDPKKYGGFDSPTVAYSVLVVAKVEKGKSKKLKSVKELLGITIMERSSFEKNPIDFLEAKGYKEVKKDLIIKLPKYSLFELENGRKRMLASAGELQKGNELALPSKYVNFLYLASHYEKLKGSPEDNEQKQLFVEQHKHYLDEIIEQISEFSKRVILADANLDKVLSAYNKHRDKPIREQAENIIHLFTLTNLGAPAAFKYFDTTIDRKRYTSTKEVLDATLIHQSITGLYETRIDLSQLGGDGGGGSGGSGGLLGRDLLTKLKAQIQFSTEGPQVTWEDRPAMCLVLNLEEEYRLHEKPVPPSIDPSWLQLFPMVWAEKAGMGLANQVPPVVVELKSDASPVAVRQYPMSKEAREGIRPHIQRFLDLGILVPCQSPWNTPLLPVKKPGTNDYRPVQDLREVNKRVQDIHPTVPNPYNLLSSLPPSHTWYSVLDLKDAFFCLKLHPNSQPLFAFEWRDPEKGNTGQLTWTRLPQGFKNSPTLFNEALHRDLASFRALNPQVVMLQYVDDLLVAAPTYRDCKEGTRRLLQELSKLGYRVSAKKAQLCREEVTYLGYLLKGGKRWLTPARKATVMKIPTPTTPRQVREFLGKAGFCRLFIPGFASLAAPLYPLTRPKVPFTWTEAHQEAFGRIKEALLSAPALALPDLTKPFALYVDEKEGVARGVLTQTLGPWRRPVAYLSKKLDPVASGWPTCLKAIAAVALLLKDADKLTLGQNVLVIAPHNLESIVRQPPDRWMTNARMTHYQSLLLNERVSFAPPAILNPATLLPVESDDTPIHICSEILAEETGTRPDLRDQPLPGVPAWYTDGSSFIMDGRRQAGAAIVDNKRTVWASNLPEGTSAQKAELIALTQALRLAEGKSINIYTDSRYAFATAHVHGAIYKQRGWLTSAGKDIKNKEEILALLEAIHLPKRVAIIHCPGHQRGTDPVATGNRKADEAAKQAAQSTRILTETTKNAGKRTADGSEFEKRTADGSEFESPKKKAKVE

SEQ ID NO: 1751 - protein, 2216 aa, synthetic construct
MPAAKRVKLDGGDKKYSIGLDIGTNSVGWAVITDEYKVPSKKFKVLGNTDRHSIKKNLIGALLFDSGETAEATRLKRTARRRYTRRKNRICYLQEIFSNEMAKVDDSFFHRLEESFLVEEDKKHERHPIFGNIVDEVAYHEKYPTIYHLRKKLVDSTDKADLRLIYLALAHMIKFRGHFLIEGDLNPDNSDVDKLFIQLVQTYNQLFEENPINASGVDAKAILSARLSKSRRLENLIAQLPGEKKNGLFGNLIALSLGLTPNFKSNFDLAEDAKLQLSKDTYDDDLDNLLAQIGDQYADLFLAAKNLSDAILLSDILRVNTEITKAPLSASMIKRYDEHHQDLTLLKALVRQQLPEKYKEIFFDQSKNGYAGYIDGGASQEEFYKFIKPILEKMDGTEELLVKLNREDLLRKQRTFDNGSIPHQIHLGELHAILRRQEDFYPFLKDNREKIEKILTFRIPYYVGPLARGNSRFAWMTRKSEETITPWNFEEVVDKGASAQSFIERMTNFDKNLPNEKVLPKHSLLYEYFTVYNELTKVKYVTEGMRKPAFLSGEQKKAIVDLLFKTNRKVTVKQLKEDYFKKIECFDSVEISGVEDRFNASLGTYHDLLKIIKDKDFLDNEENEDILEDIVLTLTLFEDREMIEERLKTYAHLFDDKVMKQLKRRRYTGWGRLSRKLINGIRDKQSGKTILDFLKSDGFANRNFMQLIHDDSLTFKEDIQKAQVSGQGDSLHEHIANLAGSPAIKKGILQTVKVVDELVKVMGRHKPENIVIEMARENQTTQKGQKNSRERMKRIEEGIKELGSQILKEHPVENTQLQNEKLYLYYLQNGRDMYVDQELDINRLSDYDVDHIVPQSFLKDDSIDNKVLTRSDKARGKSDNVPSEEVVKKMKNYWRQLLNAKLITQRKFDNLTKAERGGLSELDKAGFIKRQLVETRQITKHVAQILDSRMNTKYDENDKLIREVKVITLKSKLVSDFRKDFQFYKVREINNYHHAHDAYLNAVVGTALIKKYPKLESEFVYGDYKVYDVRKMIAKSEQEIGKATAKYFFYSNIMNFFKTEITLANGEIRKRPLIETNGETGEIVWDKGRDFATVRKVLSMPQVNIVKKTEVQTGGFSKESILPKRNSDKLIARKKDWDPKKYGGFDSPTVAYSVLVVAKVEKGKSKKLKSVKELLGITIMERSSFEKNPIDFLEAKGYKEVKKDLIIKLPKYSLFELENGRKRMLASAGELQKGNELALPSKYVNFLYLASHYEKLKGSPEDNEQKQLFVEQHKHYLDEIIEQISEFSKRVILADANLDKVLSAYNKHRDKPIREQAENIIHLFTLTNLGAPAAFKYFDTTIDRKRYTSTKEVLDATLIHQSITGLYETRIDLSQLGGDGGGGGGGSGSSGGTLGDQGSRGSDPLPEPRVTLTVEGIPTEFLVNTGAEHSVLTKPMGKMGSKRTVVAGATGSKVYPWTTKRLLKIGQKQVTHSFLVIPECPAPLLGRDLLTKLKAQIQFSTEGPQVTWEDRPAMCLVLNLEEEYRLHEKPVPPSIDPSWLQLFPMVWAEKAGMGLANQVPPVVVELKSDASPVAVRQYPMSKEAREGIRPHIQRFLDLGILVPCQSPWNTPLLPVKKPGTNDYRPVQDLREVNKRVQDIHPTVPNPYNLLSSLPPSHTWYSVLDLKDAFFCLKLHPNSQPLFAFEWRDPEKGNTGQLTWTRLPQGFKNSPTLFNEALHRDLASFRALNPQVVMLQYVDDLLVAAPTYRDCKEGTRRLLQELSKLGYRVSAKKAQLCREEVTYLGYLLKGGKRWLTPARKATVMKIPTPTTPRQVREFLGTAGFCRLWIPGFASLAAPLYPLTRPKVPFTWTEAHQEAFGRIKEALLSAPALALPDLTKPFALYVDEKEGVARGVLTQTLGPWRRPVAYLSKKLDPVASGWPTCLKAIAAVALLLKDADKLTLGQNVLVIAPHNLESIVRQPPDRWMTNARMTHYQSLLLNERVSFAPPAILNPATLLPVESDDTPIHICSEILAEETGTRPDLRDQPLPGVPAWYTDGSSFIMDGRRQAGAAIVDNKRTVWASNLPEGTSAQKAELIALTQALRLAEGKSINIYTDSRYAFATAHVHGAIYKQRGWLTSAGKDIKNKEEILALLEAIHLPKRVAIIHCPGHQRGTDPVATGNRKADEAAKQAAQSTRILTETTKNAGKRTADGSEFEKRTADGSEFESPKKKAKVE

SEQ ID NO: 1752 - protein, 2237 aa, synthetic construct
MPAAKRVKLDGGDKKYSIGLDIGTNSVGWAVITDEYKVPSKKFKVLGNTDRHSIKKNLIGALLFDSGETAEATRLKRTARRRYTRRKNRICYLQEIFSNEMAKVDDSFFHRLEESFLVEEDKKHERHPIFGNIVDEVAYHEKYPTIYHLRKKLVDSTDKADLRLIYLALAHMIKFRGHFLIEGDLNPDNSDVDKLFIQLVQTYNQLFEENPINASGVDAKAILSARLSKSRRLENLIAQLPGEKKNGLFGNLIALSLGLTPNFKSNFDLAEDAKLQLSKDTYDDDLDNLLAQIGDQYADLFLAAKNLSDAILLSDILRVNTEITKAPLSASMIKRYDEHHQDLTLLKALVRQQLPEKYKEIFFDQSKNGYAGYIDGGASQEEFYKFIKPILEKMDGTEELLVKLNREDLLRKQRTFDNGSIPHQIHLGELHAILRRQEDFYPFLKDNREKIEKILTFRIPYYVGPLARGNSRFAWMTRKSEETITPWNFEEVVDKGASAQSFIERMTNFDKNLPNEKVLPKHSLLYEYFTVYNELTKVKYVTEGMRKPAFLSGEQKKAIVDLLFKTNRKVTVKQLKEDYFKKIECFDSVEISGVEDRFNASLGTYHDLLKIIKDKDFLDNEENEDILEDIVLTLTLFEDREMIEERLKTYAHLFDDKVMKQLKRRRYTGWGRLSRKLINGIRDKQSGKTILDFLKSDGFANRNFMQLIHDDSLTFKEDIQKAQVSGQGDSLHEHIANLAGSPAIKKGILQTVKVVDELVKVMGRHKPENIVIEMARENQTTQKGQKNSRERMKRIEEGIKELGSQILKEHPVENTQLQNEKLYLYYLQNGRDMYVDQELDINRLSDYDVDHIVPQSFLKDDSIDNKVLTRSDKARGKSDNVPSEEVVKKMKNYWRQLLNAKLITQRKFDNLTKAERGGLSELDKAGFIKRQLVETRQITKHVAQILDSRMNTKYDENDKLIREVKVITLKSKLVSDFRKDFQFYKVREINNYHHAHDAYLNAVVGTALIKKYPKLESEFVYGDYKVYDVRKMIAKSEQEIGKATAKYFFYSNIMNFFKTEITLANGEIRKRPLIETNGETGEIVWDKGRDFATVRKVLSMPQVNIVKKTEVQTGGFSKESILPKRNSDKLIARKKDWDPKKYGGFDSPTVAYSVLVVAKVEKGKSKKLKSVKELLGITIMERSSFEKNPIDFLEAKGYKEVKKDLIIKLPKYSLFELENGRKRMLASAGELQKGNELALPSKYVNFLYLASHYEKLKGSPEDNEQKQLFVEQHKHYLDEIIEQISEFSKRVILADANLDKVLSAYNKHRDKPIREQAENIIHLFTLTNLGAPAAFKYFDTTIDRKRYTSTKEVLDATLIHQSITGLYETRIDLSQLGGDGGGGGGSGGGGSGGGGSGGGGSGGGGSGGGGSGGTLGDQGSRGSDPLPEPRVTLTVEGIPTEFLVNTGAEHSVLTKPMGKMGSKRTVVAGATGSKVYPWTTKRLLKIGQKQVTHSFLVIPECPAPLLGRDLLTKLKAQIQFSTEGPQVTWEDRPAMCLVLNLEEEYRLHEKPVPPSIDPSWLQLFPMVWAEKAGMGLANQVPPVVVELKSDASPVAVRQYPMSKEAREGIRPHIQRFLDLGILVPCQSPWNTPLLPVKKPGTNDYRPVQDLREVNKRVQDIHPTVPNPYNLLSSLPPSHTWYSVLDLKDAFFCLKLHPNSQPLFAFEWRDPEKGNTGQLTWTRLPQGFKNSPTLFNEALHRDLASFRALNPQVVMLQYVDDLLVAAPTYRDCKEGTRRLLQELSKLGYRVSAKKAQLCREEVTYLGYLLKGGKRWLTPARKATVMKIPTPTTPRQVREFLGTAGFCRLWIPGFASLAAPLYPLTRPKVPFTWTEAHQEAFGRIKEALLSAPALALPDLTKPFALYVDEKEGVARGVLTQTLGPWRRPVAYLSKKLDPVASGWPTCLKAIAAVALLLKDADKLTLGQNVLVIAPHNLESIVRQPPDRWMTNARMTHYQSLLLNERVSFAPPAILNPATLLPVESDDTPIHICSEILAEETGTRPDLRDQPLPGVPAWYTDGSSFIMDGRRQAGAAIVDNKRTVWASNLPEGTSAQKAELIALTQALRLAEGKSINIYTDSRYAFATAHVHGAIYKQRGWLTSAGKDIKNKEEILALLEAIHLPKRVAIIHCPGHQRGTDPVATGNRKADEAAKQAAQSTRILTETTKNAGKRTADGSEFEKRTADGSEFESPKKKAKVE

SEQ ID NO: 1753 - protein, 2218 aa, synthetic construct
MPAAKRVKLDGGDKKYSIGLDIGTNSVGWAVITDEYKVPSKKFKVLGNTDRHSIKKNLIGALLFDSGETAEATRLKRTARRRYTRRKNRICYLQEIFSNEMAKVDDSFFHRLEESFLVEEDKKHERHPIFGNIVDEVAYHEKYPTIYHLRKKLVDSTDKADLRLIYLALAHMIKFRGHFLIEGDLNPDNSDVDKLFIQLVQTYNQLFEENPINASGVDAKAILSARLSKSRRLENLIAQLPGEKKNGLFGNLIALSLGLTPNFKSNFDLAEDAKLQLSKDTYDDDLDNLLAQIGDQYADLFLAAKNLSDAILLSDILRVNTEITKAPLSASMIKRYDEHHQDLTLLKALVRQQLPEKYKEIFFDQSKNGYAGYIDGGASQEEFYKFIKPILEKMDGTEELLVKLNREDLLRKQRTFDNGSIPHQIHLGELHAILRRQEDFYPFLKDNREKIEKILTFRIPYYVGPLARGNSRFAWMTRKSEETITPWNFEEVVDKGASAQSFIERMTNFDKNLPNEKVLPKHSLLYEYFTVYNELTKVKYVTEGMRKPAFLSGEQKKAIVDLLFKTNRKVTVKQLKEDYFKKIECFDSVEISGVEDRFNASLGTYHDLLKIIKDKDFLDNEENEDILEDIVLTLTLFEDREMIEERLKTYAHLFDDKVMKQLKRRRYTGWGRLSRKLINGIRDKQSGKTILDFLKSDGFANRNFMQLIHDDSLTFKEDIQKAQVSGQGDSLHEHIANLAGSPAIKKGILQTVKVVDELVKVMGRHKPENIVIEMARENQTTQKGQKNSRERMKRIEEGIKELGSQILKEHPVENTQLQNEKLYLYYLQNGRDMYVDQELDINRLSDYDVDHIVPQSFLKDDSIDNKVLTRSDKARGKSDNVPSEEVVKKMKNYWRQLLNAKLITQRKFDNLTKAERGGLSELDKAGFIKRQLVETRQITKHVAQILDSRMNTKYDENDKLIREVKVITLKSKLVSDFRKDFQFYKVREINNYHHAHDAYLNAVVGTALIKKYPKLESEFVYGDYKVYDVRKMIAKSEQEIGKATAKYFFYSNIMNFFKTEITLANGEIRKRPLIETNGETGEIVWDKGRDFATVRKVLSMPQVNIVKKTEVQTGGFSKESILPKRNSDKLIARKKDWDPKKYGGFDSPTVAYSVLVVAKVEKGKSKKLKSVKELLGITIMERSSFEKNPIDFLEAKGYKEVKKDLIIKLPKYSLFELENGRKRMLASAGELQKGNELALPSKYVNFLYLASHYEKLKGSPEDNEQKQLFVEQHKHYLDEIIEQISEFSKRVILADANLDKVLSAYNKHRDKPIREQAENIIHLFTLTNLGAPAAFKYFDTTIDRKRYTSTKEVLDATLIHQSITGLYETRIDLSQLGGDGGEAAAKGGGPAPGGTLGDQGSRGSDPLPEPRVTLTVEGIPTEFLVNTGAEHSVLTKPMGKMGSKRTVVAGATGSKVYPWTTKRLLKIGQKQVTHSFLVIPECPAPLLGRDLLTKLKAQIQFSTEGPQVTWEDRPAMCLVLNLEEEYRLHEKPVPPSIDPSWLQLFPMVWAEKAGMGLANQVPPVVVELKSDASPVAVRQYPMSKEAREGIRPHIQRFLDLGILVPCQSPWNTPLLPVKKPGTNDYRPVQDLREVNKRVQDIHPTVPNPYNLLSSLPPSHTWYSVLDLKDAFFCLKLHPNSQPLFAFEWRDPEKGNTGQLTWTRLPQGFKNSPTLFNEALHRDLASFRALNPQVVMLQYVDDLLVAAPTYRDCKEGTRRLLQELSKLGYRVSAKKAQLCREEVTYLGYLLKGGKRWLTPARKATVMKIPTPTTPRQVREFLGTAGFCRLWIPGFASLAAPLYPLTRPKVPFTWTEAHQEAFGRIKEALLSAPALALPDLTKPFALYVDEKEGVARGVLTQTLGPWRRPVAYLSKKLDPVASGWPTCLKAIAAVALLLKDADKLTLGQNVLVIAPHNLESIVRQPPDRWMTNARMTHYQSLLLNERVSFAPPAILNPATLLPVESDDTPIHICSEILAEETGTRPDLRDQPLPGVPAWYTDGSSFIMDGRRQAGAAIVDNKRTVWASNLPEGTSAQKAELIALTQALRLAEGKSINIYTDSRYAFATAHVHGAIYKQRGWLTSAGKDIKNKEEILALLEAIHLPKRVAIIHCPGHQRGTDPVATGNRKADEAAKQAAQSTRILTETTKNAGKRTADGSEFEKRTADGSEFESPKKKAKVE

SEQ ID NO: 1754 - protein, 2218 aa, synthetic construct
MPAAKRVKLDGGDKKYSIGLDIGTNSVGWAVITDEYKVPSKKFKVLGNTDRHSIKKNLIGALLFDSGETAEATRLKRTARRRYTRRKNRICYLQEIFSNEMAKVDDSFFHRLEESFLVEEDKKHERHPIFGNIVDEVAYHEKYPTIYHLRKKLVDSTDKADLRLIYLALAHMIKFRGHFLIEGDLNPDNSDVDKLFIQLVQTYNQLFEENPINASGVDAKAILSARLSKSRRLENLIAQLPGEKKNGLFGNLIALSLGLTPNFKSNFDLAEDAKLQLSKDTYDDDLDNLLAQIGDQYADLFLAAKNLSDAILLSDILRVNTEITKAPLSASMIKRYDEHHQDLTLLKALVRQQLPEKYKEIFFDQSKNGYAGYIDGGASQEEFYKFIKPILEKMDGTEELLVKLNREDLLRKQRTFDNGSIPHQIHLGELHAILRRQEDFYPFLKDNREKIEKILTFRIPYYVGPLARGNSRFAWMTRKSEETITPWNFEEVVDKGASAQSFIERMTNFDKNLPNEKVLPKHSLLYEYFTVYNELTKVKYVTEGMRKPAFLSGEQKKAIVDLLFKTNRKVTVKQLKEDYFKKIECFDSVEISGVEDRFNASLGTYHDLLKIIKDKDFLDNEENEDILEDIVLTLTLFEDREMIEERLKTYAHLFDDKVMKQLKRRRYTGWGRLSRKLINGIRDKQSGKTILDFLKSDGFANRNFMQLIHDDSLTFKEDIQKAQVSGQGDSLHEHIANLAGSPAIKKGILQTVKVVDELVKVMGRHKPENIVIEMARENQTTQKGQKNSRERMKRIEEGIKELGSQILKEHPVENTQLQNEKLYLYYLQNGRDMYVDQELDINRLSDYDVDHIVPQSFLKDDSIDNKVLTRSDKARGKSDNVPSEEVVKKMKNYWRQLLNAKLITQRKFDNLTKAERGGLSELDKAGFIKRQLVETRQITKHVAQILDSRMNTKYDENDKLIREVKVITLKSKLVSDFRKDFQFYKVREINNYHHAHDAYLNAVVGTALIKKYPKLESEFVYGDYKVYDVRKMIAKSEQEIGKATAKYFFYSNIMNFFKTEITLANGEIRKRPLIETNGETGEIVWDKGRDFATVRKVLSMPQVNIVKKTEVQTGGFSKESILPKRNSDKLIARKKDWDPKKYGGFDSPTVAYSVLVVAKVEKGKSKKLKSVKELLGITIMERSSFEKNPIDFLEAKGYKEVKKDLIIKLPKYSLFELENGRKRMLASAGELQKGNELALPSKYVNFLYLASHYEKLKGSPEDNEQKQLFVEQHKHYLDEIIEQISEFSKRVILADANLDKVLSAYNKHRDKPIREQAENIIHLFTLTNLGAPAAFKYFDTTIDRKRYTSTKEVLDATLIHQSITGLYETRIDLSQLGGDGGPAPGGSEAAAKGGTLGDQGSRGSDPLPEPRVTLTVEGIPTEFLVNTGAEHSVLTKPMGKMGSKRTVVAGATGSKVYPWTTKRLLKIGQKQVTHSFLVIPECPAPLLGRDLLTKLKAQIQFSTEGPQVTWEDRPAMCLVLNLEEEYRLHEKPVPPSIDPSWLQLFPMVWAEKAGMGLANQVPPVVVELKSDASPVAVRQYPMSKEAREGIRPHIQRFLDLGILVPCQSPWNTPLLPVKKPGTNDYRPVQDLREVNKRVQDIHPTVPNPYNLLSSLPPSHTWYSVLDLKDAFFCLKLHPNSQPLFAFEWRDPEKGNTGQLTWTRLPQGFKNSPTLFNEALHRDLASFRALNPQVVMLQYVDDLLVAAPTYRDCKEGTRRLLQELSKLGYRVSAKKAQLCREEVTYLGYLLKGGKRWLTPARKATVMKIPTPTTPRQVREFLGTAGFCRLWIPGFASLAAPLYPLTRPKVPFTWTEAHQEAFGRIKEALLSAPALALPDLTKPFALYVDEKEGVARGVLTQTLGPWRRPVAYLSKKLDPVASGWPTCLKAIAAVALLLKDADKLTLGQNVLVIAPHNLESIVRQPPDRWMTNARMTHYQSLLLNERVSFAPPAILNPATLLPVESDDTPIHICSEILAEETGTRPDLRDQPLPGVPAWYTDGSSFIMDGRRQAGAAIVDNKRTVWASNLPEGTSAQKAELIALTQALRLAEGKSINIYTDSRYAFATAHVHGAIYKQRGWLTSAGKDIKNKEEILALLEAIHLPKRVAIIHCPGHQRGTDPVATGNRKADEAAKQAAQSTRILTETTKNAGKRTADGSEFEKRTADGSEFESPKKKAKVE

SEQ ID NO: 1755 - protein, 2219 aa, synthetic construct
MPAAKRVKLDGGDKKYSIGLDIGTNSVGWAVITDEYKVPSKKFKVLGNTDRHSIKKNLIGALLFDSGETAEATRLKRTARRRYTRRKNRICYLQEIFSNEMAKVDDSFFHRLEESFLVEEDKKHERHPIFGNIVDEVAYHEKYPTIYHLRKKLVDSTDKADLRLIYLALAHMIKFRGHFLIEGDLNPDNSDVDKLFIQLVQTYNQLFEENPINASGVDAKAILSARLSKSRRLENLIAQLPGEKKNGLFGNLIALSLGLTPNFKSNFDLAEDAKLQLSKDTYDDDLDNLLAQIGDQYADLFLAAKNLSDAILLSDILRVNTEITKAPLSASMIKRYDEHHQDLTLLKALVRQQLPEKYKEIFFDQSKNGYAGYIDGGASQEEFYKFIKPILEKMDGTEELLVKLNREDLLRKQRTFDNGSIPHQIHLGELHAILRRQEDFYPFLKDNREKIEKILTFRIPYYVGPLARGNSRFAWMTRKSEETITPWNFEEVVDKGASAQSFIERMTNFDKNLPNEKVLPKHSLLYEYFTVYNELTKVKYVTEGMRKPAFLSGEQKKAIVDLLFKTNRKVTVKQLKEDYFKKIECFDSVEISGVEDRFNASLGTYHDLLKIIKDKDFLDNEENEDILEDIVLTLTLFEDREMIEERLKTYAHLFDDKVMKQLKRRRYTGWGRLSRKLINGIRDKQSGKTILDFLKSDGFANRNFMQLIHDDSLTFKEDIQKAQVSGQGDSLHEHIANLAGSPAIKKGILQTVKVVDELVKVMGRHKPENIVIEMARENQTTQKGQKNSRERMKRIEEGIKELGSQILKEHPVENTQLQNEKLYLYYLQNGRDMYVDQELDINRLSDYDVDHIVPQSFLKDDSIDNKVLTRSDKARGKSDNVPSEEVVKKMKNYWRQLLNAKLITQRKFDNLTKAERGGLSELDKAGFIKRQLVETRQITKHVAQILDSRMNTKYDENDKLIREVKVITLKSKLVSDFRKDFQFYKVREINNYHHAHDAYLNAVVGTALIKKYPKLESEFVYGDYKVYDVRKMIAKSEQEIGKATAKYFFYSNIMNFFKTEITLANGEIRKRPLIETNGETGEIVWDKGRDFATVRKVLSMPQVNIVKKTEVQTGGFSKESILPKRNSDKLIARKKDWDPKKYGGFDSPTVAYSVLVVAKVEKGKSKKLKSVKELLGITIMERSSFEKNPIDFLEAKGYKEVKKDLIIKLPKYSLFELENGRKRMLASAGELQKGNELALPSKYVNFLYLASHYEKLKGSPEDNEQKQLFVEQHKHYLDEIIEQISEFSKRVILADANLDKVLSAYNKHRDKPIREQAENIIHLFTLTNLGAPAAFKYFDTTIDRKRYTSTKEVLDATLIHQSITGLYETRIDLSQLGGDGGGGSGGSGGSGGSGGTLGDQGSRGSDPLPEPRVTLTVEGIPTEFLVNTGAEHSVLTKPMGKMGSKRTVVAGATGSKVYPWTTKRLLKIGQKQVTHSFLVIPECPAPLLGRDLLTKLKAQIQFSTEGPQVTWEDRPAMCLVLNLEEEYRLHEKPVPPSIDPSWLQLFPMVWAEKAGMGLANQVPPVVVELKSDASPVAVRQYPMSKEAREGIRPHIQRFLDLGILVPCQSPWNTPLLPVKKPGTNDYRPVQDLREVNKRVQDIHPTVPNPYNLLSSLPPSHTWYSVLDLKDAFFCLKLHPNSQPLFAFEWRDPEKGNTGQLTWTRLPQGFKNSPTLFNEALHRDLASFRALNPQVVMLQYVDDLLVAAPTYRDCKEGTRRLLQELSKLGYRVSAKKAQLCREEVTYLGYLLKGGKRWLTPARKATVMKIPTPTTPRQVREFLGTAGFCRLWIPGFASLAAPLYPLTRPKVPFTWTEAHQEAFGRIKEALLSAPALALPDLTKPFALYVDEKEGVARGVLTQTLGPWRRPVAYLSKKLDPVASGWPTCLKAIAAVALLLKDADKLTLGQNVLVIAPHNLESIVRQPPDRWMTNARMTHYQSLLLNERVSFAPPAILNPATLLPVESDDTPIHICSEILAEETGTRPDLRDQPLPGVPAWYTDGSSFIMDGRRQAGAAIVDNKRTVWASNLPEGTSAQKAELIALTQALRLAEGKSINIYTDSRYAFATAHVHGAIYKQRGWLTSAGKDIKNKEEILALLEAIHLPKRVAIIHCPGHQRGTDPVATGNRKADEAAKQAAQSTRILTETTKNAGKRTADGSEFEKRTADGSEFESPKKKAKVE

SEQ ID NO: 1756 - protein, 2218 aa, synthetic construct
MPAAKRVKLDGGDKKYSIGLDIGTNSVGWAVITDEYKVPSKKFKVLGNTDRHSIKKNLIGALLFDSGETAEATRLKRTARRRYTRRKNRICYLQEIFSNEMAKVDDSFFHRLEESFLVEEDKKHERHPIFGNIVDEVAYHEKYPTIYHLRKKLVDSTDKADLRLIYLALAHMIKFRGHFLIEGDLNPDNSDVDKLFIQLVQTYNQLFEENPINASGVDAKAILSARLSKSRRLENLIAQLPGEKKNGLFGNLIALSLGLTPNFKSNFDLAEDAKLQLSKDTYDDDLDNLLAQIGDQYADLFLAAKNLSDAILLSDILRVNTEITKAPLSASMIKRYDEHHQDLTLLKALVRQQLPEKYKEIFFDQSKNGYAGYIDGGASQEEFYKFIKPILEKMDGTEELLVKLNREDLLRKQRTFDNGSIPHQIHLGELHAILRRQEDFYPFLKDNREKIEKILTFRIPYYVGPLARGNSRFAWMTRKSEETITPWNFEEVVDKGASAQSFIERMTNFDKNLPNEKVLPKHSLLYEYFTVYNELTKVKYVTEGMRKPAFLSGEQKKAIVDLLFKTNRKVTVKQLKEDYFKKIECFDSVEISGVEDRFNASLGTYHDLLKIIKDKDFLDNEENEDILEDIVLTLTLFEDREMIEERLKTYAHLFDDKVMKQLKRRRYTGWGRLSRKLINGIRDKQSGKTILDFLKSDGFANRNFMQLIHDDSLTFKEDIQKAQVSGQGDSLHEHIANLAGSPAIKKGILQTVKVVDELVKVMGRHKPENIVIEMARENQTTQKGQKNSRERMKRIEEGIKELGSQILKEHPVENTQLQNEKLYLYYLQNGRDMYVDQELDINRLSDYDVDHIVPQSFLKDDSIDNKVLTRSDKARGKSDNVPSEEVVKKMKNYWRQLLNAKLITQRKFDNLTKAERGGLSELDKAGFIKRQLVETRQITKHVAQILDSRMNTKYDENDKLIREVKVITLKSKLVSDFRKDFQFYKVREINNYHHAHDAYLNAVVGTALIKKYPKLESEFVYGDYKVYDVRKMIAKSEQEIGKATAKYFFYSNIMNFFKTEITLANGEIRKRPLIETNGETGEIVWDKGRDFATVRKVLSMPQVNIVKKTEVQTGGFSKESILPKRNSDKLIARKKDWDPKKYGGFDSPTVAYSVLVVAKVEKGKSKKLKSVKELLGITIMERSSFEKNPIDFLEAKGYKEVKKDLIIKLPKYSLFELENGRKRMLASAGELQKGNELALPSKYVNFLYLASHYEKLKGSPEDNEQKQLFVEQHKHYLDEIIEQISEFSKRVILADANLDKVLSAYNKHRDKPIREQAENIIHLFTLTNLGAPAAFKYFDTTIDRKRYTSTKEVLDATLIHQSITGLYETRIDLSQLGGDGGEAAAKGSSGGGGGTLGDQGSRGSDPLPEPRVTLTVEGIPTEFLVNTGAEHSVLTKPMGKMGSKRTVVAGATGSKVYPWTTKRLLKIGQKQVTHSFLVIPECPAPLLGRDLLTKLKAQIQFSTEGPQVTWEDRPAMCLVLNLEEEYRLHEKPVPPSIDPSWLQLFPMVWAEKAGMGLANQVPPVVVELKSDASPVAVRQYPMSKEAREGIRPHIQRFLDLGILVPCQSPWNTPLLPVKKPGTNDYRPVQDLREVNKRVQDIHPTVPNPYNLLSSLPPSHTWYSVLDLKDAFFCLKLHPNSQPLFAFEWRDPEKGNTGQLTWTRLPQGFKNSPTLFNEALHRDLASFRALNPQVVMLQYVDDLLVAAPTYRDCKEGTRRLLQELSKLGYRVSAKKAQLCREEVTYLGYLLKGGKRWLTPARKATVMKIPTPTTPRQVREFLGTAGFCRLWIPGFASLAAPLYPLTRPKVPFTWTEAHQEAFGRIKEALLSAPALALPDLTKPFALYVDEKEGVARGVLTQTLGPWRRPVAYLSKKLDPVASGWPTCLKAIAAVALLLKDADKLTLGQNVLVIAPHNLESIVRQPPDRWMTNARMTHYQSLLLNERVSFAPPAILNPATLLPVESDDTPIHICSEILAEETGTRPDLRDQPLPGVPAWYTDGSSFIMDGRRQAGAAIVDNKRTVWASNLPEGTSAQKAELIALTQALRLAEGKSINIYTDSRYAFATAHVHGAIYKQRGWLTSAGKDIKNKEEILALLEAIHLPKRVAIIHCPGHQRGTDPVATGNRKADEAAKQAAQSTRILTETTKNAGKRTADGSEFEKRTADGSEFESPKKKAKVE

SEQ ID NO: 1757 - protein, 2216 aa, synthetic construct
MPAAKRVKLDGGDKKYSIGLDIGTNSVGWAVITDEYKVPSKKFKVLGNTDRHSIKKNLIGALLFDSGETAEATRLKRTARRRYTRRKNRICYLQEIFSNEMAKVDDSFFHRLEESFLVEEDKKHERHPIFGNIVDEVAYHEKYPTIYHLRKKLVDSTDKADLRLIYLALAHMIKFRGHFLIEGDLNPDNSDVDKLFIQLVQTYNQLFEENPINASGVDAKAILSARLSKSRRLENLIAQLPGEKKNGLFGNLIALSLGLTPNFKSNFDLAEDAKLQLSKDTYDDDLDNLLAQIGDQYADLFLAAKNLSDAILLSDILRVNTEITKAPLSASMIKRYDEHHQDLTLLKALVRQQLPEKYKEIFFDQSKNGYAGYIDGGASQEEFYKFIKPILEKMDGTEELLVKLNREDLLRKQRTFDNGSIPHQIHLGELHAILRRQEDFYPFLKDNREKIEKILTFRIPYYVGPLARGNSRFAWMTRKSEETITPWNFEEVVDKGASAQSFIERMTNFDKNLPNEKVLPKHSLLYEYFTVYNELTKVKYVTEGMRKPAFLSGEQKKAIVDLLFKTNRKVTVKQLKEDYFKKIECFDSVEISGVEDRFNASLGTYHDLLKIIKDKDFLDNEENEDILEDIVLTLTLFEDREMIEERLKTYAHLFDDKVMKQLKRRRYTGWGRLSRKLINGIRDKQSGKTILDFLKSDGFANRNFMQLIHDDSLTFKEDIQKAQVSGQGDSLHEHIANLAGSPAIKKGILQTVKVVDELVKVMGRHKPENIVIEMARENQTTQKGQKNSRERMKRIEEGIKELGSQILKEHPVENTQLQNEKLYLYYLQNGRDMYVDQELDINRLSDYDVDHIVPQSFLKDDSIDNKVLTRSDKARGKSDNVPSEEVVKKMKNYWRQLLNAKLITQRKFDNLTKAERGGLSELDKAGFIKRQLVETRQITKHVAQILDSRMNTKYDENDKLIREVKVITLKSKLVSDFRKDFQFYKVREINNYHHAHDAYLNAVVGTALIKKYPKLESEFVYGDYKVYDVRKMIAKSEQEIGKATAKYFFYSNIMNFFKTEITLANGEIRKRPLIETNGETGEIVWDKGRDFATVRKVLSMPQVNIVKKTEVQTGGFSKESILPKRNSDKLIARKKDWDPKKYGGFDSPTVAYSVLVVAKVEKGKSKKLKSVKELLGITIMERSSFEKNPIDFLEAKGYKEVKKDLIIKLPKYSLFELENGRKRMLASAGELQKGNELALPSKYVNFLYLASHYEKLKGSPEDNEQKQLFVEQHKHYLDEIIEQISEFSKRVILADANLDKVLSAYNKHRDKPIREQAENIIHLFTLTNLGAPAAFKYFDTTIDRKRYTSTKEVLDATLIHQSITGLYETRIDLSQLGGDGGGGSPAPGSSGGTLGDQGSRGSDPLPEPRVTLTVEGIPTEFLVNTGAEHSVLTKPMGKMGSKRTVVAGATGSKVYPWTTKRLLKIGQKQVTHSFLVIPECPAPLLGRDLLTKLKAQIQFSTEGPQVTWEDRPAMCLVLNLEEEYRLHEKPVPPSIDPSWLQLFPMVWAEKAGMGLANQVPPVVVELKSDASPVAVRQYPMSKEAREGIRPHIQRFLDLGILVPCQSPWNTPLLPVKKPGTNDYRPVQDLREVNKRVQDIHPTVPNPYNLLSSLPPSHTWYSVLDLKDAFFCLKLHPNSQPLFAFEWRDPEKGNTGQLTWTRLPQGFKNSPTLFNEALHRDLASFRALNPQVVMLQYVDDLLVAAPTYRDCKEGTRRLLQELSKLGYRVSAKKAQLCREEVTYLGYLLKGGKRWLTPARKATVMKIPTPTTPRQVREFLGTAGFCRLWIPGFASLAAPLYPLTRPKVPFTWTEAHQEAFGRIKEALLSAPALALPDLTKPFALYVDEKEGVARGVLTQTLGPWRRPVAYLSKKLDPVASGWPTCLKAIAAVALLLKDADKLTLGQNVLVIAPHNLESIVRQPPDRWMTNARMTHYQSLLLNERVSFAPPAILNPATLLPVESDDTPIHICSEILAEETGTRPDLRDQPLPGVPAWYTDGSSFIMDGRRQAGAAIVDNKRTVWASNLPEGTSAQKAELIALTQALRLAEGKSINIYTDSRYAFATAHVHGAIYKQRGWLTSAGKDIKNKEEILALLEAIHLPKRVAIIHCPGHQRGTDPVATGNRKADEAAKQAAQSTRILTETTKNAGKRTADGSEFEKRTADGSEFESPKKKAKVE

SEQ ID NO: 1758 - protein, 2222 aa, synthetic construct
MPAAKRVKLDGGDKKYSIGLDIGTNSVGWAVITDEYKVPSKKFKVLGNTDRHSIKKNLIGALLFDSGETAEATRLKRTARRRYTRRKNRICYLQEIFSNEMAKVDDSFFHRLEESFLVEEDKKHERHPIFGNIVDEVAYHEKYPTIYHLRKKLVDSTDKADLRLIYLALAHMIKFRGHFLIEGDLNPDNSDVDKLFIQLVQTYNQLFEENPINASGVDAKAILSARLSKSRRLENLIAQLPGEKKNGLFGNLIALSLGLTPNFKSNFDLAEDAKLQLSKDTYDDDLDNLLAQIGDQYADLFLAAKNLSDAILLSDILRVNTEITKAPLSASMIKRYDEHHQDLTLLKALVRQQLPEKYKEIFFDQSKNGYAGYIDGGASQEEFYKFIKPILEKMDGTEELLVKLNREDLLRKQRTFDNGSIPHQIHLGELHAILRRQEDFYPFLKDNREKIEKILTFRIPYYVGPLARGNSRFAWMTRKSEETITPWNFEEVVDKGASAQSFIERMTNFDKNLPNEKVLPKHSLLYEYFTVYNELTKVKYVTEGMRKPAFLSGEQKKAIVDLLFKTNRKVTVKQLKEDYFKKIECFDSVEISGVEDRFNASLGTYHDLLKIIKDKDFLDNEENEDILEDIVLTLTLFEDREMIEERLKTYAHLFDDKVMKQLKRRRYTGWGRLSRKLINGIRDKQSGKTILDFLKSDGFANRNFMQLIHDDSLTFKEDIQKAQVSGQGDSLHEHIANLAGSPAIKKGILQTVKVVDELVKVMGRHKPENIVIEMARENQTTQKGQKNSRERMKRIEEGIKELGSQILKEHPVENTQLQNEKLYLYYLQNGRDMYVDQELDINRLSDYDVDHIVPQSFLKDDSIDNKVLTRSDKARGKSDNVPSEEVVKKMKNYWRQLLNAKLITQRKFDNLTKAERGGLSELDKAGFIKRQLVETRQITKHVAQILDSRMNTKYDENDKLIREVKVITLKSKLVSDFRKDFQFYKVREINNYHHAHDAYLNAVVGTALIKKYPKLESEFVYGDYKVYDVRKMIAKSEQEIGKATAKYFFYSNIMNFFKTEITLANGEIRKRPLIETNGETGEIVWDKGRDFATVRKVLSMPQVNIVKKTEVQTGGFSKESILPKRNSDKLIARKKDWDPKKYGGFDSPTVAYSVLVVAKVEKGKSKKLKSVKELLGITIMERSSFEKNPIDFLEAKGYKEVKKDLIIKLPKYSLFELENGRKRMLASAGELQKGNELALPSKYVNFLYLASHYEKLKGSPEDNEQKQLFVEQHKHYLDEIIEQISEFSKRVILADANLDKVLSAYNKHRDKPIREQAENIIHLFTLTNLGAPAAFKYFDTTIDRKRYTSTKEVLDATLIHQSITGLYETRIDLSQLGGDGGGGGGSGGGGSGGGGSGGTLGDQGSRGSDPLPEPRVTLTVEGIPTEFLVNTGAEHSVLTKPMGKMGSKRTVVAGATGSKVYPWTTKRLLKIGQKQVTHSFLVIPECPAPLLGRDLLTKLKAQIQFSTEGPQVTWEDRPAMCLVLNLEEEYRLHEKPVPPSIDPSWLQLFPMVWAEKAGMGLANQVPPVVVELKSDASPVAVRQYPMSKEAREGIRPHIQRFLDLGILVPCQSPWNTPLLPVKKPGTNDYRPVQDLREVNKRVQDIHPTVPNPYNLLSSLPPSHTWYSVLDLKDAFFCLKLHPNSQPLFAFEWRDPEKGNTGQLTWTRLPQGFKNSPTLFNEALHRDLASFRALNPQVVMLQYVDDLLVAAPTYRDCKEGTRRLLQELSKLGYRVSAKKAQLCREEVTYLGYLLKGGKRWLTPARKATVMKIPTPTTPRQVREFLGTAGFCRLWIPGFASLAAPLYPLTRPKVPFTWTEAHQEAFGRIKEALLSAPALALPDLTKPFALYVDEKEGVARGVLTQTLGPWRRPVAYLSKKLDPVASGWPTCLKAIAAVALLLKDADKLTLGQNVLVIAPHNLESIVRQPPDRWMTNARMTHYQSLLLNERVSFAPPAILNPATLLPVESDDTPIHICSEILAEETGTRPDLRDQPLPGVPAWYTDGSSFIMDGRRQAGAAIVDNKRTVWASNLPEGTSAQKAELIALTQALRLAEGKSINIYTDSRYAFATAHVHGAIYKQRGWLTSAGKDIKNKEEILALLEAIHLPKRVAIIHCPGHQRGTDPVATGNRKADEAAKQAAQSTRILTETTKNAGKRTADGSEFEKRTADGSEFESPKKKAKVE

SEQ ID NO: 1759 - protein, 2218 aa, synthetic construct
MPAAKRVKLDGGDKKYSIGLDIGTNSVGWAVITDEYKVPSKKFKVLGNTDRHSIKKNLIGALLFDSGETAEATRLKRTARRRYTRRKNRICYLQEIFSNEMAKVDDSFFHRLEESFLVEEDKKHERHPIFGNIVDEVAYHEKYPTIYHLRKKLVDSTDKADLRLIYLALAHMIKFRGHFLIEGDLNPDNSDVDKLFIQLVQTYNQLFEENPINASGVDAKAILSARLSKSRRLENLIAQLPGEKKNGLFGNLIALSLGLTPNFKSNFDLAEDAKLQLSKDTYDDDLDNLLAQIGDQYADLFLAAKNLSDAILLSDILRVNTEITKAPLSASMIKRYDEHHQDLTLLKALVRQQLPEKYKEIFFDQSKNGYAGYIDGGASQEEFYKFIKPILEKMDGTEELLVKLNREDLLRKQRTFDNGSIPHQIHLGELHAILRRQEDFYPFLKDNREKIEKILTFRIPYYVGPLARGNSRFAWMTRKSEETITPWNFEEVVDKGASAQSFIERMTNFDKNLPNEKVLPKHSLLYEYFTVYNELTKVKYVTEGMRKPAFLSGEQKKAIVDLLFKTNRKVTVKQLKEDYFKKIECFDSVEISGVEDRFNASLGTYHDLLKIIKDKDFLDNEENEDILEDIVLTLTLFEDREMIEERLKTYAHLFDDKVMKQLKRRRYTGWGRLSRKLINGIRDKQSGKTILDFLKSDGFANRNFMQLIHDDSLTFKEDIQKAQVSGQGDSLHEHIANLAGSPAIKKGILQTVKVVDELVKVMGRHKPENIVIEMARENQTTQKGQKNSRERMKRIEEGIKELGSQILKEHPVENTQLQNEKLYLYYLQNGRDMYVDQELDINRLSDYDVDHIVPQSFLKDDSIDNKVLTRSDKARGKSDNVPSEEVVKKMKNYWRQLLNAKLITQRKFDNLTKAERGGLSELDKAGFIKRQLVETRQITKHVAQILDSRMNTKYDENDKLIREVKVITLKSKLVSDFRKDFQFYKVREINNYHHAHDAYLNAVVGTALIKKYPKLESEFVYGDYKVYDVRKMIAKSEQEIGKATAKYFFYSNIMNFFKTEITLANGEIRKRPLIETNGETGEIVWDKGRDFATVRKVLSMPQVNIVKKTEVQTGGFSKESILPKRNSDKLIARKKDWDPKKYGGFDSPTVAYSVLVVAKVEKGKSKKLKSVKELLGITIMERSSFEKNPIDFLEAKGYKEVKKDLIIKLPKYSLFELENGRKRMLASAGELQKGNELALPSKYVNFLYLASHYEKLKGSPEDNEQKQLFVEQHKHYLDEIIEQISEFSKRVILADANLDKVLSAYNKHRDKPIREQAENIIHLFTLTNLGAPAAFKYFDTTIDRKRYTSTKEVLDATLIHQSITGLYETRIDLSQLGGDGGGSSGGGEAAAKGGTLGDQGSRGSDPLPEPRVTLTVEGIPTEFLVNTGAEHSVLTKPMGKMGSKRTVVAGATGSKVYPWTTKRLLKIGQKQVTHSFLVIPECPAPLLGRDLLTKLKAQIQFSTEGPQVTWEDRPAMCLVLNLEEEYRLHEKPVPPSIDPSWLQLFPMVWAEKAGMGLANQVPPVVVELKSDASPVAVRQYPMSKEAREGIRPHIQRFLDLGILVPCQSPWNTPLLPVKKPGTNDYRPVQDLREVNKRVQDIHPTVPNPYNLLSSLPPSHTWYSVLDLKDAFFCLKLHPNSQPLFAFEWRDPEKGNTGQLTWTRLPQGFKNSPTLFNEALHRDLASFRALNPQVVMLQYVDDLLVAAPTYRDCKEGTRRLLQELSKLGYRVSAKKAQLCREEVTYLGYLLKGGKRWLTPARKATVMKIPTPTTPRQVREFLGTAGFCRLWIPGFASLAAPLYPLTRPKVPFTWTEAHQEAFGRIKEALLSAPALALPDLTKPFALYVDEKEGVARGVLTQTLGPWRRPVAYLSKKLDPVASGWPTCLKAIAAVALLLKDADKLTLGQNVLVIAPHNLESIVRQPPDRWMTNARMTHYQSLLLNERVSFAPPAILNPATLLPVESDDTPIHICSEILAEETGTRPDLRDQPLPGVPAWYTDGSSFIMDGRRQAGAAIVDNKRTVWASNLPEGTSAQKAELIALTQALRLAEGKSINIYTDSRYAFATAHVHGAIYKQRGWLTSAGKDIKNKEEILALLEAIHLPKRVAIIHCPGHQRGTDPVATGNRKADEAAKQAAQSTRILTETTKNAGKRTADGSEFEKRTADGSEFESPKKKAKVE

SEQ ID NO: 1760 - protein, 2215 aa, synthetic construct
MPAAKRVKLDGGDKKYSIGLDIGTNSVGWAVITDEYKVPSKKFKVLGNTDRHSIKKNLIGALLFDSGETAEATRLKRTARRRYTRRKNRICYLQEIFSNEMAKVDDSFFHRLEESFLVEEDKKHERHPIFGNIVDEVAYHEKYPTIYHLRKKLVDSTDKADLRLIYLALAHMIKFRGHFLIEGDLNPDNSDVDKLFIQLVQTYNQLFEENPINASGVDAKAILSARLSKSRRLENLIAQLPGEKKNGLFGNLIALSLGLTPNFKSNFDLAEDAKLQLSKDTYDDDLDNLLAQIGDQYADLFLAAKNLSDAILLSDILRVNTEITKAPLSASMIKRYDEHHQDLTLLKALVRQQLPEKYKEIFFDQSKNGYAGYIDGGASQEEFYKFIKPILEKMDGTEELLVKLNREDLLRKQRTFDNGSIPHQIHLGELHAILRRQEDFYPFLKDNREKIEKILTFRIPYYVGPLARGNSRFAWMTRKSEETITPWNFEEVVDKGASAQSFIERMTNFDKNLPNEKVLPKHSLLYEYFTVYNELTKVKYVTEGMRKPAFLSGEQKKAIVDLLFKTNRKVTVKQLKEDYFKKIECFDSVEISGVEDRFNASLGTYHDLLKIIKDKDFLDNEENEDILEDIVLTLTLFEDREMIEERLKTYAHLFDDKVMKQLKRRRYTGWGRLSRKLINGIRDKQSGKTILDFLKSDGFANRNFMQLIHDDSLTFKEDIQKAQVSGQGDSLHEHIANLAGSPAIKKGILQTVKVVDELVKVMGRHKPENIVIEMARENQTTQKGQKNSRERMKRIEEGIKELGSQILKEHPVENTQLQNEKLYLYYLQNGRDMYVDQELDINRLSDYDVDHIVPQSFLKDDSIDNKVLTRSDKARGKSDNVPSEEVVKKMKNYWRQLLNAKLITQRKFDNLTKAERGGLSELDKAGFIKRQLVETRQITKHVAQILDSRMNTKYDENDKLIREVKVITLKSKLVSDFRKDFQFYKVREINNYHHAHDAYLNAVVGTALIKKYPKLESEFVYGDYKVYDVRKMIAKSEQEIGKATAKYFFYSNIMNFFKTEITLANGEIRKRPLIETNGETGEIVWDKGRDFATVRKVLSMPQVNIVKKTEVQTGGFSKESILPKRNSDKLIARKKDWDPKKYGGFDSPTVAYSVLVVAKVEKGKSKKLKSVKELLGITIMERSSFEKNPIDFLEAKGYKEVKKDLIIKLPKYSLFELENGRKRMLASAGELQKGNELALPSKYVNFLYLASHYEKLKGSPEDNEQKQLFVEQHKHYLDEIIEQISEFSKRVILADANLDKVLSAYNKHRDKPIREQAENIIHLFTLTNLGAPAAFKYFDTTIDRKRYTSTKEVLDATLIHQSITGLYETRIDLSQLGGDGGEAAAKGGGGGTLGDQGSRGSDPLPEPRVTLTVEGIPTEFLVNTGAEHSVLTKPMGKMGSKRTVVAGATGSKVYPWTTKRLLKIGQKQVTHSFLVIPECPAPLLGRDLLTKLKAQIQFSTEGPQVTWEDRPAMCLVLNLEEEYRLHEKPVPPSIDPSWLQLFPMVWAEKAGMGLANQVPPVVVELKSDASPVAVRQYPMSKEAREGIRPHIQRFLDLGILVPCQSPWNTPLLPVKKPGTNDYRPVQDLREVNKRVQDIHPTVPNPYNLLSSLPPSHTWYSVLDLKDAFFCLKLHPNSQPLFAFEWRDPEKGNTGQLTWTRLPQGFKNSPTLFNEALHRDLASFRALNPQVVMLQYVDDLLVAAPTYRDCKEGTRRLLQELSKLGYRVSAKKAQLCREEVTYLGYLLKGGKRWLTPARKATVMKIPTPTTPRQVREFLGTAGFCRLWIPGFASLAAPLYPLTRPKVPFTWTEAHQEAFGRIKEALLSAPALALPDLTKPFALYVDEKEGVARGVLTQTLGPWRRPVAYLSKKLDPVASGWPTCLKAIAAVALLLKDADKLTLGQNVLVIAPHNLESIVRQPPDRWMTNARMTHYQSLLLNERVSFAPPAILNPATLLPVESDDTPIHICSEILAEETGTRPDLRDQPLPGVPAWYTDGSSFIMDGRRQAGAAIVDNKRTVWASNLPEGTSAQKAELIALTQALRLAEGKSINIYTDSRYAFATAHVHGAIYKQRGWLTSAGKDIKNKEEILALLEAIHLPKRVAIIHCPGHQRGTDPVATGNRKADEAAKQAAQSTRILTETTKNAGKRTADGSEFEKRTADGSEFESPKKKAKVE

SEQ ID NO: 1761 - protein, 2213 aa, synthetic construct
MPAAKRVKLDGGDKKYSIGLDIGTNSVGWAVITDEYKVPSKKFKVLGNTDRHSIKKNLIGALLFDSGETAEATRLKRTARRRYTRRKNRICYLQEIFSNEMAKVDDSFFHRLEESFLVEEDKKHERHPIFGNIVDEVAYHEKYPTIYHLRKKLVDSTDKADLRLIYLALAHMIKFRGHFLIEGDLNPDNSDVDKLFIQLVQTYNQLFEENPINASGVDAKAILSARLSKSRRLENLIAQLPGEKKNGLFGNLIALSLGLTPNFKSNFDLAEDAKLQLSKDTYDDDLDNLLAQIGDQYADLFLAAKNLSDAILLSDILRVNTEITKAPLSASMIKRYDEHHQDLTLLKALVRQQLPEKYKEIFFDQSKNGYAGYIDGGASQEEFYKFIKPILEKMDGTEELLVKLNREDLLRKQRTFDNGSIPHQIHLGELHAILRRQEDFYPFLKDNREKIEKILTFRIPYYVGPLARGNSRFAWMTRKSEETITPWNFEEVVDKGASAQSFIERMTNFDKNLPNEKVLPKHSLLYEYFTVYNELTKVKYVTEGMRKPAFLSGEQKKAIVDLLFKTNRKVTVKQLKEDYFKKIECFDSVEISGVEDRFNASLGTYHDLLKIIKDKDFLDNEENEDILEDIVLTLTLFEDREMIEERLKTYAHLFDDKVMKQLKRRRYTGWGRLSRKLINGIRDKQSGKTILDFLKSDGFANRNFMQLIHDDSLTFKEDIQKAQVSGQGDSLHEHIANLAGSPAIKKGILQTVKVVDELVKVMGRHKPENIVIEMARENQTTQKGQKNSRERMKRIEEGIKELGSQILKEHPVENTQLQNEKLYLYYLQNGRDMYVDQELDINRLSDYDVDHIVPQSFLKDDSIDNKVLTRSDKARGKSDNVPSEEVVKKMKNYWRQLLNAKLITQRKFDNLTKAERGGLSELDKAGFIKRQLVETRQITKHVAQILDSRMNTKYDENDKLIREVKVITLKSKLVSDFRKDFQFYKVREINNYHHAHDAYLNAVVGTALIKKYPKLESEFVYGDYKVYDVRKMIAKSEQEIGKATAKYFFYSNIMNFFKTEITLANGEIRKRPLIETNGETGEIVWDKGRDFATVRKVLSMPQVNIVKKTEVQTGGFSKESILPKRNSDKLIARKKDWDPKKYGGFDSPTVAYSVLVVAKVEKGKSKKLKSVKELLGITIMERSSFEKNPIDFLEAKGYKEVKKDLIIKLPKYSLFELENGRKRMLASAGELQKGNELALPSKYVNFLYLASHYEKLKGSPEDNEQKQLFVEQHKHYLDEIIEQISEFSKRVILADANLDKVLSAYNKHRDKPIREQAENIIHLFTLTNLGAPAAFKYFDTTIDRKRYTSTKEVLDATLIHQSITGLYETRIDLSQLGGDGGGGSGGGGGTLGDQGSRGSDPLPEPRVTLTVEGIPTEFLVNTGAEHSVLTKPMGKMGSKRTVVAGATGSKVYPWTTKRLLKIGQKQVTHSFLVIPECPAPLLGRDLLTKLKAQIQFSTEGPQVTWEDRPAMCLVLNLEEEYRLHEKPVPPSIDPSWLQLFPMVWAEKAGMGLANQVPPVVVELKSDASPVAVRQYPMSKEAREGIRPHIQRFLDLGILVPCQSPWNTPLLPVKKPGTNDYRPVQDLREVNKRVQDIHPTVPNPYNLLSSLPPSHTWYSVLDLKDAFFCLKLHPNSQPLFAFEWRDPEKGNTGQLTWTRLPQGFKNSPTLFNEALHRDLASFRALNPQVVMLQYVDDLLVAAPTYRDCKEGTRRLLQELSKLGYRVSAKKAQLCREEVTYLGYLLKGGKRWLTPARKATVMKIPTPTTPRQVREFLGTAGFCRLWIPGFASLAAPLYPLTRPKVPFTWTEAHQEAFGRIKEALLSAPALALPDLTKPFALYVDEKEGVARGVLTQTLGPWRRPVAYLSKKLDPVASGWPTCLKAIAAVALLLKDADKLTLGQNVLVIAPHNLESIVRQPPDRWMTNARMTHYQSLLLNERVSFAPPAILNPATLLPVESDDTPIHICSEILAEETGTRPDLRDQPLPGVPAWYTDGSSFIMDGRRQAGAAIVDNKRTVWASNLPEGTSAQKAELIALTQALRLAEGKSINIYTDSRYAFATAHVHGAIYKQRGWLTSAGKDIKNKEEILALLEAIHLPKRVAIIHCPGHQRGTDPVATGNRKADEAAKQAAQSTRILTETTKNAGKRTADGSEFEKRTADGSEFESPKKKAKVE

SEQ ID NO: 1762 - protein, 2218 aa, synthetic construct
MPAAKRVKLDGGDKKYSIGLDIGTNSVGWAVITDEYKVPSKKFKVLGNTDRHSIKKNLIGALLFDSGETAEATRLKRTARRRYTRRKNRICYLQEIFSNEMAKVDDSFFHRLEESFLVEEDKKHERHPIFGNIVDEVAYHEKYPTIYHLRKKLVDSTDKADLRLIYLALAHMIKFRGHFLIEGDLNPDNSDVDKLFIQLVQTYNQLFEENPINASGVDAKAILSARLSKSRRLENLIAQLPGEKKNGLFGNLIALSLGLTPNFKSNFDLAEDAKLQLSKDTYDDDLDNLLAQIGDQYADLFLAAKNLSDAILLSDILRVNTEITKAPLSASMIKRYDEHHQDLTLLKALVRQQLPEKYKEIFFDQSKNGYAGYIDGGASQEEFYKFIKPILEKMDGTEELLVKLNREDLLRKQRTFDNGSIPHQIHLGELHAILRRQEDFYPFLKDNREKIEKILTFRIPYYVGPLARGNSRFAWMTRKSEETITPWNFEEVVDKGASAQSFIERMTNFDKNLPNEKVLPKHSLLYEYFTVYNELTKVKYVTEGMRKPAFLSGEQKKAIVDLLFKTNRKVTVKQLKEDYFKKIECFDSVEISGVEDRFNASLGTYHDLLKIIKDKDFLDNEENEDILEDIVLTLTLFEDREMIEERLKTYAHLFDDKVMKQLKRRRYTGWGRLSRKLINGIRDKQSGKTILDFLKSDGFANRNFMQLIHDDSLTFKEDIQKAQVSGQGDSLHEHIANLAGSPAIKKGILQTVKVVDELVKVMGRHKPENIVIEMARENQTTQKGQKNSRERMKRIEEGIKELGSQILKEHPVENTQLQNEKLYLYYLQNGRDMYVDQELDINRLSDYDVDHIVPQSFLKDDSIDNKVLTRSDKARGKSDNVPSEEVVKKMKNYWRQLLNAKLITQRKFDNLTKAERGGLSELDKAGFIKRQLVETRQITKHVAQILDSRMNTKYDENDKLIREVKVITLKSKLVSDFRKDFQFYKVREINNYHHAHDAYLNAVVGTALIKKYPKLESEFVYGDYKVYDVRKMIAKSEQEIGKATAKYFFYSNIMNFFKTEITLANGEIRKRPLIETNGETGEIVWDKGRDFATVRKVLSMPQVNIVKKTEVQTGGFSKESILPKRNSDKLIARKKDWDPKKYGGFDSPTVAYSVLVVAKVEKGKSKKLKSVKELLGITIMERSSFEKNPIDFLEAKGYKEVKKDLIIKLPKYSLFELENGRKRMLASAGELQKGNELALPSKYVNFLYLASHYEKLKGSPEDNEQKQLFVEQHKHYLDEIIEQISEFSKRVILADANLDKVLSAYNKHRDKPIREQAENIIHLFTLTNLGAPAAFKYFDTTIDRKRYTSTKEVLDATLIHQSITGLYETRIDLSQLGGDGGPAPEAAAKGSSGGTLGDQGSRGSDPLPEPRVTLTVEGIPTEFLVNTGAEHSVLTKPMGKMGSKRTVVAGATGSKVYPWTTKRLLKIGQKQVTHSFLVIPECPAPLLGRDLLTKLKAQIQFSTEGPQVTWEDRPAMCLVLNLEEEYRLHEKPVPPSIDPSWLQLFPMVWAEKAGMGLANQVPPVVVELKSDASPVAVRQYPMSKEAREGIRPHIQRFLDLGILVPCQSPWNTPLLPVKKPGTNDYRPVQDLREVNKRVQDIHPTVPNPYNLLSSLPPSHTWYSVLDLKDAFFCLKLHPNSQPLFAFEWRDPEKGNTGQLTWTRLPQGFKNSPTLFNEALHRDLASFRALNPQVVMLQYVDDLLVAAPTYRDCKEGTRRLLQELSKLGYRVSAKKAQLCREEVTYLGYLLKGGKRWLTPARKATVMKIPTPTTPRQVREFLGTAGFCRLWIPGFASLAAPLYPLTRPKVPFTWTEAHQEAFGRIKEALLSAPALALPDLTKPFALYVDEKEGVARGVLTQTLGPWRRPVAYLSKKLDPVASGWPTCLKAIAAVALLLKDADKLTLGQNVLVIAPHNLESIVRQPPDRWMTNARMTHYQSLLLNERVSFAPPAILNPATLLPVESDDTPIHICSEILAEETGTRPDLRDQPLPGVPAWYTDGSSFIMDGRRQAGAAIVDNKRTVWASNLPEGTSAQKAELIALTQALRLAEGKSINIYTDSRYAFATAHVHGAIYKQRGWLTSAGKDIKNKEEILALLEAIHLPKRVAIIHCPGHQRGTDPVATGNRKADEAAKQAAQSTRILTETTKNAGKRTADGSEFEKRTADGSEFESPKKKAKVE

SEQ ID NO: 1763 - protein, 2215 aa, synthetic construct
MPAAKRVKLDGGDKKYSIGLDIGTNSVGWAVITDEYKVPSKKFKVLGNTDRHSIKKNLIGALLFDSGETAEATRLKRTARRRYTRRKNRICYLQEIFSNEMAKVDDSFFHRLEESFLVEEDKKHERHPIFGNIVDEVAYHEKYPTIYHLRKKLVDSTDKADLRLIYLALAHMIKFRGHFLIEGDLNPDNSDVDKLFIQLVQTYNQLFEENPINASGVDAKAILSARLSKSRRLENLIAQLPGEKKNGLFGNLIALSLGLTPNFKSNFDLAEDAKLQLSKDTYDDDLDNLLAQIGDQYADLFLAAKNLSDAILLSDILRVNTEITKAPLSASMIKRYDEHHQDLTLLKALVRQQLPEKYKEIFFDQSKNGYAGYIDGGASQEEFYKFIKPILEKMDGTEELLVKLNREDLLRKQRTFDNGSIPHQIHLGELHAILRRQEDFYPFLKDNREKIEKILTFRIPYYVGPLARGNSRFAWMTRKSEETITPWNFEEVVDKGASAQSFIERMTNFDKNLPNEKVLPKHSLLYEYFTVYNELTKVKYVTEGMRKPAFLSGEQKKAIVDLLFKTNRKVTVKQLKEDYFKKIECFDSVEISGVEDRFNASLGTYHDLLKIIKDKDFLDNEENEDILEDIVLTLTLFEDREMIEERLKTYAHLFDDKVMKQLKRRRYTGWGRLSRKLINGIRDKQSGKTILDFLKSDGFANRNFMQLIHDDSLTFKEDIQKAQVSGQGDSLHEHIANLAGSPAIKKGILQTVKVVDELVKVMGRHKPENIVIEMARENQTTQKGQKNSRERMKRIEEGIKELGSQILKEHPVENTQLQNEKLYLYYLQNGRDMYVDQELDINRLSDYDVDHIVPQSFLKDDSIDNKVLTRSDKARGKSDNVPSEEVVKKMKNYWRQLLNAKLITQRKFDNLTKAERGGLSELDKAGFIKRQLVETRQITKHVAQILDSRMNTKYDENDKLIREVKVITLKSKLVSDFRKDFQFYKVREINNYHHAHDAYLNAVVGTALIKKYPKLESEFVYGDYKVYDVRKMIAKSEQEIGKATAKYFFYSNIMNFFKTEITLANGEIRKRPLIETNGETGEIVWDKGRDFATVRKVLSMPQVNIVKKTEVQTGGFSKESILPKRNSDKLIARKKDWDPKKYGGFDSPTVAYSVLVVAKVEKGKSKKLKSVKELLGITIMERSSFEKNPIDFLEAKGYKEVKKDLIIKLPKYSLFELENGRKRMLASAGELQKGNELALPSKYVNFLYLASHYEKLKGSPEDNEQKQLFVEQHKHYLDEIIEQISEFSKRVILADANLDKVLSAYNKHRDKPIREQAENIIHLFTLTNLGAPAAFKYFDTTIDRKRYTSTKEVLDATLIHQSITGLYETRIDLSQLGGDGGEAAAKGGSGGTLGDQGSRGSDPLPEPRVTLTVEGIPTEFLVNTGAEHSVLTKPMGKMGSKRTVVAGATGSKVYPWTTKRLLKIGQKQVTHSFLVIPECPAPLLGRDLLTKLKAQIQFSTEGPQVTWEDRPAMCLVLNLEEEYRLHEKPVPPSIDPSWLQLFPMVWAEKAGMGLANQVPPVVVELKSDASPVAVRQYPMSKEAREGIRPHIQRFLDLGILVPCQSPWNTPLLPVKKPGTNDYRPVQDLREVNKRVQDIHPTVPNPYNLLSSLPPSHTWYSVLDLKDAFFCLKLHPNSQPLFAFEWRDPEKGNTGQLTWTRLPQGFKNSPTLFNEALHRDLASFRALNPQVVMLQYVDDLLVAAPTYRDCKEGTRRLLQELSKLGYRVSAKKAQLCREEVTYLGYLLKGGKRWLTPARKATVMKIPTPTTPRQVREFLGTAGFCRLWIPGFASLAAPLYPLTRPKVPFTWTEAHQEAFGRIKEALLSAPALALPDLTKPFALYVDEKEGVARGVLTQTLGPWRRPVAYLSKKLDPVASGWPTCLKAIAAVALLLKDADKLTLGQNVLVIAPHNLESIVRQPPDRWMTNARMTHYQSLLLNERVSFAPPAILNPATLLPVESDDTPIHICSEILAEETGTRPDLRDQPLPGVPAWYTDGSSFIMDGRRQAGAAIVDNKRTVWASNLPEGTSAQKAELIALTQALRLAEGKSINIYTDSRYAFATAHVHGAIYKQRGWLTSAGKDIKNKEEILALLEAIHLPKRVAIIHCPGHQRGTDPVATGNRKADEAAKQAAQSTRILTETTKNAGKRTADGSEFEKRTADGSEFESPKKKAKVE

SEQ ID NO: 1764 - protein, 2216 aa, synthetic construct
MPAAKRVKLDGGDKKYSIGLDIGTNSVGWAVITDEYKVPSKKFKVLGNTDRHSIKKNLIGALLFDSGETAEATRLKRTARRRYTRRKNRICYLQEIFSNEMAKVDDSFFHRLEESFLVEEDKKHERHPIFGNIVDEVAYHEKYPTIYHLRKKLVDSTDKADLRLIYLALAHMIKFRGHFLIEGDLNPDNSDVDKLFIQLVQTYNQLFEENPINASGVDAKAILSARLSKSRRLENLIAQLPGEKKNGLFGNLIALSLGLTPNFKSNFDLAEDAKLQLSKDTYDDDLDNLLAQIGDQYADLFLAAKNLSDAILLSDILRVNTEITKAPLSASMIKRYDEHHQDLTLLKALVRQQLPEKYKEIFFDQSKNGYAGYIDGGASQEEFYKFIKPILEKMDGTEELLVKLNREDLLRKQRTFDNGSIPHQIHLGELHAILRRQEDFYPFLKDNREKIEKILTFRIPYYVGPLARGNSRFAWMTRKSEETITPWNFEEVVDKGASAQSFIERMTNFDKNLPNEKVLPKHSLLYEYFTVYNELTKVKYVTEGMRKPAFLSGEQKKAIVDLLFKTNRKVTVKQLKEDYFKKIECFDSVEISGVEDRFNASLGTYHDLLKIIKDKDFLDNEENEDILEDIVLTLTLFEDREMIEERLKTYAHLFDDKVMKQLKRRRYTGWGRLSRKLINGIRDKQSGKTILDFLKSDGFANRNFMQLIHDDSLTFKEDIQKAQVSGQGDSLHEHIANLAGSPAIKKGILQTVKVVDELVKVMGRHKPENIVIEMARENQTTQKGQKNSRERMKRIEEGIKELGSQILKEHPVENTQLQNEKLYLYYLQNGRDMYVDQELDINRLSDYDVDHIVPQSFLKDDSIDNKVLTRSDKARGKSDNVPSEEVVKKMKNYWRQLLNAKLITQRKFDNLTKAERGGLSELDKAGFIKRQLVETRQITKHVAQILDSRMNTKYDENDKLIREVKVITLKSKLVSDFRKDFQFYKVREINNYHHAHDAYLNAVVGTALIKKYPKLESEFVYGDYKVYDVRKMIAKSEQEIGKATAKYFFYSNIMNFFKTEITLANGEIRKRPLIETNGETGEIVWDKGRDFATVRKVLSMPQVNIVKKTEVQTGGFSKESILPKRNSDKLIARKKDWDPKKYGGFDSPTVAYSVLVVAKVEKGKSKKLKSVKELLGITIMERSSFEKNPIDFLEAKGYKEVKKDLIIKLPKYSLFELENGRKRMLASAGELQKGNELALPSKYVNFLYLASHYEKLKGSPEDNEQKQLFVEQHKHYLDEIIEQISEFSKRVILADANLDKVLSAYNKHRDKPIREQAENIIHLFTLTNLGAPAAFKYFDTTIDRKRYTSTKEVLDATLIHQSITGLYETRIDLSQLGGDGGGGGGSSGGSGGTLGDQGSRGSDPLPEPRVTLTVEGIPTEFLVNTGAEHSVLTKPMGKMGSKRTVVAGATGSKVYPWTTKRLLKIGQKQVTHSFLVIPECPAPLLGRDLLTKLKAQIQFSTEGPQVTWEDRPAMCLVLNLEEEYRLHEKPVPPSIDPSWLQLFPMVWAEKAGMGLANQVPPVVVELKSDASPVAVRQYPMSKEAREGIRPHIQRFLDLGILVPCQSPWNTPLLPVKKPGTNDYRPVQDLREVNKRVQDIHPTVPNPYNLLSSLPPSHTWYSVLDLKDAFFCLKLHPNSQPLFAFEWRDPEKGNTGQLTWTRLPQGFKNSPTLFNEALHRDLASFRALNPQVVMLQYVDDLLVAAPTYRDCKEGTRRLLQELSKLGYRVSAKKAQLCREEVTYLGYLLKGGKRWLTPARKATVMKIPTPTTPRQVREFLGTAGFCRLWIPGFASLAAPLYPLTRPKVPFTWTEAHQEAFGRIKEALLSAPALALPDLTKPFALYVDEKEGVARGVLTQTLGPWRRPVAYLSKKLDPVASGWPTCLKAIAAVALLLKDADKLTLGQNVLVIAPHNLESIVRQPPDRWMTNARMTHYQSLLLNERVSFAPPAILNPATLLPVESDDTPIHICSEILAEETGTRPDLRDQPLPGVPAWYTDGSSFIMDGRRQAGAAIVDNKRTVWASNLPEGTSAQKAELIALTQALRLAEGKSINIYTDSRYAFATAHVHGAIYKQRGWLTSAGKDIKNKEEILALLEAIHLPKRVAIIHCPGHQRGTDPVATGNRKADEAAKQAAQSTRILTETTKNAGKRTADGSEFEKRTADGSEFESPKKKAKVE

SEQ ID NO: 1765 - protein, 2216 aa, synthetic construct
MPAAKRVKLDGGDKKYSIGLDIGTNSVGWAVITDEYKVPSKKFKVLGNTDRHSIKKNLIGALLFDSGETAEATRLKRTARRRYTRRKNRICYLQEIFSNEMAKVDDSFFHRLEESFLVEEDKKHERHPIFGNIVDEVAYHEKYPTIYHLRKKLVDSTDKADLRLIYLALAHMIKFRGHFLIEGDLNPDNSDVDKLFIQLVQTYNQLFEENPINASGVDAKAILSARLSKSRRLENLIAQLPGEKKNGLFGNLIALSLGLTPNFKSNFDLAEDAKLQLSKDTYDDDLDNLLAQIGDQYADLFLAAKNLSDAILLSDILRVNTEITKAPLSASMIKRYDEHHQDLTLLKALVRQQLPEKYKEIFFDQSKNGYAGYIDGGASQEEFYKFIKPILEKMDGTEELLVKLNREDLLRKQRTFDNGSIPHQIHLGELHAILRRQEDFYPFLKDNREKIEKILTFRIPYYVGPLARGNSRFAWMTRKSEETITPWNFEEVVDKGASAQSFIERMTNFDKNLPNEKVLPKHSLLYEYFTVYNELTKVKYVTEGMRKPAFLSGEQKKAIVDLLFKTNRKVTVKQLKEDYFKKIECFDSVEISGVEDRFNASLGTYHDLLKIIKDKDFLDNEENEDILEDIVLTLTLFEDREMIEERLKTYAHLFDDKVMKQLKRRRYTGWGRLSRKLINGIRDKQSGKTILDFLKSDGFANRNFMQLIHDDSLTFKEDIQKAQVSGQGDSLHEHIANLAGSPAIKKGILQTVKVVDELVKVMGRHKPENIVIEMARENQTTQKGQKNSRERMKRIEEGIKELGSQILKEHPVENTQLQNEKLYLYYLQNGRDMYVDQELDINRLSDYDVDHIVPQSFLKDDSIDNKVLTRSDKARGKSDNVPSEEVVKKMKNYWRQLLNAKLITQRKFDNLTKAERGGLSELDKAGFIKRQLVETRQITKHVAQILDSRMNTKYDENDKLIREVKVITLKSKLVSDFRKDFQFYKVREINNYHHAHDAYLNAVVGTALIKKYPKLESEFVYGDYKVYDVRKMIAKSEQEIGKATAKYFFYSNIMNFFKTEITLANGEIRKRPLIETNGETGEIVWDKGRDFATVRKVLSMPQVNIVKKTEVQTGGFSKESILPKRNSDKLIARKKDWDPKKYGGFDSPTVAYSVLVVAKVEKGKSKKLKSVKELLGITIMERSSFEKNPIDFLEAKGYKEVKKDLIIKLPKYSLFELENGRKRMLASAGELQKGNELALPSKYVNFLYLASHYEKLKGSPEDNEQKQLFVEQHKHYLDEIIEQISEFSKRVILADANLDKVLSAYNKHRDKPIREQAENIIHLFTLTNLGAPAAFKYFDTTIDRKRYTSTKEVLDATLIHQSITGLYETRIDLSQLGGDGGPAPGSSGGSGGTLGDQGSRGSDPLPEPRVTLTVEGIPTEFLVNTGAEHSVLTKPMGKMGSKRTVVAGATGSKVYPWTTKRLLKIGQKQVTHSFLVIPECPAPLLGRDLLTKLKAQIQFSTEGPQVTWEDRPAMCLVLNLEEEYRLHEKPVPPSIDPSWLQLFPMVWAEKAGMGLANQVPPVVVELKSDASPVAVRQYPMSKEAREGIRPHIQRFLDLGILVPCQSPWNTPLLPVKKPGTNDYRPVQDLREVNKRVQDIHPTVPNPYNLLSSLPPSHTWYSVLDLKDAFFCLKLHPNSQPLFAFEWRDPEKGNTGQLTWTRLPQGFKNSPTLFNEALHRDLASFRALNPQVVMLQYVDDLLVAAPTYRDCKEGTRRLLQELSKLGYRVSAKKAQLCREEVTYLGYLLKGGKRWLTPARKATVMKIPTPTTPRQVREFLGTAGFCRLWIPGFASLAAPLYPLTRPKVPFTWTEAHQEAFGRIKEALLSAPALALPDLTKPFALYVDEKEGVARGVLTQTLGPWRRPVAYLSKKLDPVASGWPTCLKAIAAVALLLKDADKLTLGQNVLVIAPHNLESIVRQPPDRWMTNARMTHYQSLLLNERVSFAPPAILNPATLLPVESDDTPIHICSEILAEETGTRPDLRDQPLPGVPAWYTDGSSFIMDGRRQAGAAIVDNKRTVWASNLPEGTSAQKAELIALTQALRLAEGKSINIYTDSRYAFATAHVHGAIYKQRGWLTSAGKDIKNKEEILALLEAIHLPKRVAIIHCPGHQRGTDPVATGNRKADEAAKQAAQSTRILTETTKNAGKRTADGSEFEKRTADGSEFESPKKKAKVE

SEQ ID NO: 1766 - protein, 2216 aa, synthetic construct
MPAAKRVKLDGGDKKYSIGLDIGTNSVGWAVITDEYKVPSKKFKVLGNTDRHSIKKNLIGALLFDSGETAEATRLKRTARRRYTRRKNRICYLQEIFSNEMAKVDDSFFHRLEESFLVEEDKKHERHPIFGNIVDEVAYHEKYPTIYHLRKKLVDSTDKADLRLIYLALAHMIKFRGHFLIEGDLNPDNSDVDKLFIQLVQTYNQLFEENPINASGVDAKAILSARLSKSRRLENLIAQLPGEKKNGLFGNLIALSLGLTPNFKSNFDLAEDAKLQLSKDTYDDDLDNLLAQIGDQYADLFLAAKNLSDAILLSDILRVNTEITKAPLSASMIKRYDEHHQDLTLLKALVRQQLPEKYKEIFFDQSKNGYAGYIDGGASQEEFYKFIKPILEKMDGTEELLVKLNREDLLRKQRTFDNGSIPHQIHLGELHAILRRQEDFYPFLKDNREKIEKILTFRIPYYVGPLARGNSRFAWMTRKSEETITPWNFEEVVDKGASAQSFIERMTNFDKNLPNEKVLPKHSLLYEYFTVYNELTKVKYVTEGMRKPAFLSGEQKKAIVDLLFKTNRKVTVKQLKEDYFKKIECFDSVEISGVEDRFNASLGTYHDLLKIIKDKDFLDNEENEDILEDIVLTLTLFEDREMIEERLKTYAHLFDDKVMKQLKRRRYTGWGRLSRKLINGIRDKQSGKTILDFLKSDGFANRNFMQLIHDDSLTFKEDIQKAQVSGQGDSLHEHIANLAGSPAIKKGILQTVKVVDELVKVMGRHKPENIVIEMARENQTTQKGQKNSRERMKRIEEGIKELGSQILKEHPVENTQLQNEKLYLYYLQNGRDMYVDQELDINRLSDYDVDHIVPQSFLKDDSIDNKVLTRSDKARGKSDNVPSEEVVKKMKNYWRQLLNAKLITQRKFDNLTKAERGGLSELDKAGFIKRQLVETRQITKHVAQILDSRMNTKYDENDKLIREVKVITLKSKLVSDFRKDFQFYKVREINNYHHAHDAYLNAVVGTALIKKYPKLESEFVYGDYKVYDVRKMIAKSEQEIGKATAKYFFYSNIMNFFKTEITLANGEIRKRPLIETNGETGEIVWDKGRDFATVRKVLSMPQVNIVKKTEVQTGGFSKESILPKRNSDKLIARKKDWDPKKYGGFDSPTVAYSVLVVAKVEKGKSKKLKSVKELLGITIMERSSFEKNPIDFLEAKGYKEVKKDLIIKLPKYSLFELENGRKRMLASAGELQKGNELALPSKYVNFLYLASHYEKLKGSPEDNEQKQLFVEQHKHYLDEIIEQISEFSKRVILADANLDKVLSAYNKHRDKPIREQAENIIHLFTLTNLGAPAAFKYFDTTIDRKRYTSTKEVLDATLIHQSITGLYETRIDLSQLGGDGGGGSGGSGGSGGTLGDQGSRGSDPLPEPRVTLTVEGIPTEFLVNTGAEHSVLTKPMGKMGSKRTVVAGATGSKVYPWTTKRLLKIGQKQVTHSFLVIPECPAPLLGRDLLTKLKAQIQFSTEGPQVTWEDRPAMCLVLNLEEEYRLHEKPVPPSIDPSWLQLFPMVWAEKAGMGLANQVPPVVVELKSDASPVAVRQYPMSKEAREGIRPHIQRFLDLGILVPCQSPWNTPLLPVKKPGTNDYRPVQDLREVNKRVQDIHPTVPNPYNLLSSLPPSHTWYSVLDLKDAFFCLKLHPNSQPLFAFEWRDPEKGNTGQLTWTRLPQGFKNSPTLFNEALHRDLASFRALNPQVVMLQYVDDLLVAAPTYRDCKEGTRRLLQELSKLGYRVSAKKAQLCREEVTYLGYLLKGGKRWLTPARKATVMKIPTPTTPRQVREFLGTAGFCRLWIPGFASLAAPLYPLTRPKVPFTWTEAHQEAFGRIKEALLSAPALALPDLTKPFALYVDEKEGVARGVLTQTLGPWRRPVAYLSKKLDPVASGWPTCLKAIAAVALLLKDADKLTLGQNVLVIAPHNLESIVRQPPDRWMTNARMTHYQSLLLNERVSFAPPAILNPATLLPVESDDTPIHICSEILAEETGTRPDLRDQPLPGVPAWYTDGSSFIMDGRRQAGAAIVDNKRTVWASNLPEGTSAQKAELIALTQALRLAEGKSINIYTDSRYAFATAHVHGAIYKQRGWLTSAGKDIKNKEEILALLEAIHLPKRVAIIHCPGHQRGTDPVATGNRKADEAAKQAAQSTRILTETTKNAGKRTADGSEFEKRTADGSEFESPKKKAKVE

SEQ ID NO: 1767 - protein, 2222 aa, synthetic construct
MPAAKRVKLDGGDKKYSIGLDIGTNSVGWAVITDEYKVPSKKFKVLGNTDRHSIKKNLIGALLFDSGETAEATRLKRTARRRYTRRKNRICYLQEIFSNEMAKVDDSFFHRLEESFLVEEDKKHERHPIFGNIVDEVAYHEKYPTIYHLRKKLVDSTDKADLRLIYLALAHMIKFRGHFLIEGDLNPDNSDVDKLFIQLVQTYNQLFEENPINASGVDAKAILSARLSKSRRLENLIAQLPGEKKNGLFGNLIALSLGLTPNFKSNFDLAEDAKLQLSKDTYDDDLDNLLAQIGDQYADLFLAAKNLSDAILLSDILRVNTEITKAPLSASMIKRYDEHHQDLTLLKALVRQQLPEKYKEIFFDQSKNGYAGYIDGGASQEEFYKFIKPILEKMDGTEELLVKLNREDLLRKQRTFDNGSIPHQIHLGELHAILRRQEDFYPFLKDNREKIEKILTFRIPYYVGPLARGNSRFAWMTRKSEETITPWNFEEVVDKGASAQSFIERMTNFDKNLPNEKVLPKHSLLYEYFTVYNELTKVKYVTEGMRKPAFLSGEQKKAIVDLLFKTNRKVTVKQLKEDYFKKIECFDSVEISGVEDRFNASLGTYHDLLKIIKDKDFLDNEENEDILEDIVLTLTLFEDREMIEERLKTYAHLFDDKVMKQLKRRRYTGWGRLSRKLINGIRDKQSGKTILDFLKSDGFANRNFMQLIHDDSLTFKEDIQKAQVSGQGDSLHEHIANLAGSPAIKKGILQTVKVVDELVKVMGRHKPENIVIEMARENQTTQKGQKNSRERMKRIEEGIKELGSQILKEHPVENTQLQNEKLYLYYLQNGRDMYVDQELDINRLSDYDVDHIVPQSFLKDDSIDNKVLTRSDKARGKSDNVPSEEVVKKMKNYWRQLLNAKLITQRKFDNLTKAERGGLSELDKAGFIKRQLVETRQITKHVAQILDSRMNTKYDENDKLIREVKVITLKSKLVSDFRKDFQFYKVREINNYHHAHDAYLNAVVGTALIKKYPKLESEFVYGDYKVYDVRKMIAKSEQEIGKATAKYFFYSNIMNFFKTEITLANGEIRKRPLIETNGETGEIVWDKGRDFATVRKVLSMPQVNIVKKTEVQTGGFSKESILPKRNSDKLIARKKDWDPKKYGGFDSPTVAYSVLVVAKVEKGKSKKLKSVKELLGITIMERSSFEKNPIDFLEAKGYKEVKKDLIIKLPKYSLFELENGRKRMLASAGELQKGNELALPSKYVNFLYLASHYEKLKGSPEDNEQKQLFVEQHKHYLDEIIEQISEFSKRVILADANLDKVLSAYNKHRDKPIREQAENIIHLFTLTNLGAPAAFKYFDTTIDRKRYTSTKEVLDATLIHQSITGLYETRIDLSQLGGDGGGGGGSEAAAKGGGGSGGTLGDQGSRGSDPLPEPRVTLTVEGIPTEFLVNTGAEHSVLTKPMGKMGSKRTVVAGATGSKVYPWTTKRLLKIGQKQVTHSFLVIPECPAPLLGRDLLTKLKAQIQFSTEGPQVTWEDRPAMCLVLNLEEEYRLHEKPVPPSIDPSWLQLFPMVWAEKAGMGLANQVPPVVVELKSDASPVAVRQYPMSKEAREGIRPHIQRFLDLGILVPCQSPWNTPLLPVKKPGTNDYRPVQDLREVNKRVQDIHPTVPNPYNLLSSLPPSHTWYSVLDLKDAFFCLKLHPNSQPLFAFEWRDPEKGNTGQLTWTRLPQGFKNSPTLFNEALHRDLASFRALNPQVVMLQYVDDLLVAAPTYRDCKEGTRRLLQELSKLGYRVSAKKAQLCREEVTYLGYLLKGGKRWLTPARKATVMKIPTPTTPRQVREFLGTAGFCRLWIPGFASLAAPLYPLTRPKVPFTWTEAHQEAFGRIKEALLSAPALALPDLTKPFALYVDEKEGVARGVLTQTLGPWRRPVAYLSKKLDPVASGWPTCLKAIAAVALLLKDADKLTLGQNVLVIAPHNLESIVRQPPDRWMTNARMTHYQSLLLNERVSFAPPAILNPATLLPVESDDTPIHICSEILAEETGTRPDLRDQPLPGVPAWYTDGSSFIMDGRRQAGAAIVDNKRTVWASNLPEGTSAQKAELIALTQALRLAEGKSINIYTDSRYAFATAHVHGAIYKQRGWLTSAGKDIKNKEEILALLEAIHLPKRVAIIHCPGHQRGTDPVATGNRKADEAAKQAAQSTRILTETTKNAGKRTADGSEFEKRTADGSEFESPKKKAKVE

SEQ ID NO: 1768 - protein, 2213 aa, synthetic construct
MPAAKRVKLDGGDKKYSIGLDIGTNSVGWAVITDEYKVPSKKFKVLGNTDRHSIKKNLIGALLFDSGETAEATRLKRTARRRYTRRKNRICYLQEIFSNEMAKVDDSFFHRLEESFLVEEDKKHERHPIFGNIVDEVAYHEKYPTIYHLRKKLVDSTDKADLRLIYLALAHMIKFRGHFLIEGDLNPDNSDVDKLFIQLVQTYNQLFEENPINASGVDAKAILSARLSKSRRLENLIAQLPGEKKNGLFGNLIALSLGLTPNFKSNFDLAEDAKLQLSKDTYDDDLDNLLAQIGDQYADLFLAAKNLSDAILLSDILRVNTEITKAPLSASMIKRYDEHHQDLTLLKALVRQQLPEKYKEIFFDQSKNGYAGYIDGGASQEEFYKFIKPILEKMDGTEELLVKLNREDLLRKQRTFDNGSIPHQIHLGELHAILRRQEDFYPFLKDNREKIEKILTFRIPYYVGPLARGNSRFAWMTRKSEETITPWNFEEVVDKGASAQSFIERMTNFDKNLPNEKVLPKHSLLYEYFTVYNELTKVKYVTEGMRKPAFLSGEQKKAIVDLLFKTNRKVTVKQLKEDYFKKIECFDSVEISGVEDRFNASLGTYHDLLKIIKDKDFLDNEENEDILEDIVLTLTLFEDREMIEERLKTYAHLFDDKVMKQLKRRRYTGWGRLSRKLINGIRDKQSGKTILDFLKSDGFANRNFMQLIHDDSLTFKEDIQKAQVSGQGDSLHEHIANLAGSPAIKKGILQTVKVVDELVKVMGRHKPENIVIEMARENQTTQKGQKNSRERMKRIEEGIKELGSQILKEHPVENTQLQNEKLYLYYLQNGRDMYVDQELDINRLSDYDVDHIVPQSFLKDDSIDNKVLTRSDKARGKSDNVPSEEVVKKMKNYWRQLLNAKLITQRKFDNLTKAERGGLSELDKAGFIKRQLVETRQITKHVAQILDSRMNTKYDENDKLIREVKVITLKSKLVSDFRKDFQFYKVREINNYHHAHDAYLNAVVGTALIKKYPKLESEFVYGDYKVYDVRKMIAKSEQEIGKATAKYFFYSNIMNFFKTEITLANGEIRKRPLIETNGETGEIVWDKGRDFATVRKVLSMPQVNIVKKTEVQTGGFSKESILPKRNSDKLIARKKDWDPKKYGGFDSPTVAYSVLVVAKVEKGKSKKLKSVKELLGITIMERSSFEKNPIDFLEAKGYKEVKKDLIIKLPKYSLFELENGRKRMLASAGELQKGNELALPSKYVNFLYLASHYEKLKGSPEDNEQKQLFVEQHKHYLDEIIEQISEFSKRVILADANLDKVLSAYNKHRDKPIREQAENIIHLFTLTNLGAPAAFKYFDTTIDRKRYTSTKEVLDATLIHQSITGLYETRIDLSQLGGDGGGGSGSSGGTLGDQGSRGSDPLPEPRVTLTVEGIPTEFLVNTGAEHSVLTKPMGKMGSKRTVVAGATGSKVYPWTTKRLLKIGQKQVTHSFLVIPECPAPLLGRDLLTKLKAQIQFSTEGPQVTWEDRPAMCLVLNLEEEYRLHEKPVPPSIDPSWLQLFPMVWAEKAGMGLANQVPPVVVELKSDASPVAVRQYPMSKEAREGIRPHIQRFLDLGILVPCQSPWNTPLLPVKKPGTNDYRPVQDLREVNKRVQDIHPTVPNPYNLLSSLPPSHTWYSVLDLKDAFFCLKLHPNSQPLFAFEWRDPEKGNTGQLTWTRLPQGFKNSPTLFNEALHRDLASFRALNPQVVMLQYVDDLLVAAPTYRDCKEGTRRLLQELSKLGYRVSAKKAQLCREEVTYLGYLLKGGKRWLTPARKATVMKIPTPTTPRQVREFLGTAGFCRLWIPGFASLAAPLYPLTRPKVPFTWTEAHQEAFGRIKEALLSAPALALPDLTKPFALYVDEKEGVARGVLTQTLGPWRRPVAYLSKKLDPVASGWPTCLKAIAAVALLLKDADKLTLGQNVLVIAPHNLESIVRQPPDRWMTNARMTHYQSLLLNERVSFAPPAILNPATLLPVESDDTPIHICSEILAEETGTRPDLRDQPLPGVPAWYTDGSSFIMDGRRQAGAAIVDNKRTVWASNLPEGTSAQKAELIALTQALRLAEGKSINIYTDSRYAFATAHVHGAIYKQRGWLTSAGKDIKNKEEILALLEAIHLPKRVAIIHCPGHQRGTDPVATGNRKADEAAKQAAQSTRILTETTKNAGKRTADGSEFEKRTADGSEFESPKKKAKVE

SEQ ID NO: 1769 - protein, 2218 aa, synthetic construct
MPAAKRVKLDGGDKKYSIGLDIGTNSVGWAVITDEYKVPSKKFKVLGNTDRHSIKKNLIGALLFDSGETAEATRLKRTARRRYTRRKNRICYLQEIFSNEMAKVDDSFFHRLEESFLVEEDKKHERHPIFGNIVDEVAYHEKYPTIYHLRKKLVDSTDKADLRLIYLALAHMIKFRGHFLIEGDLNPDNSDVDKLFIQLVQTYNQLFEENPINASGVDAKAILSARLSKSRRLENLIAQLPGEKKNGLFGNLIALSLGLTPNFKSNFDLAEDAKLQLSKDTYDDDLDNLLAQIGDQYADLFLAAKNLSDAILLSDILRVNTEITKAPLSASMIKRYDEHHQDLTLLKALVRQQLPEKYKEIFFDQSKNGYAGYIDGGASQEEFYKFIKPILEKMDGTEELLVKLNREDLLRKQRTFDNGSIPHQIHLGELHAILRRQEDFYPFLKDNREKIEKILTFRIPYYVGPLARGNSRFAWMTRKSEETITPWNFEEVVDKGASAQSFIERMTNFDKNLPNEKVLPKHSLLYEYFTVYNELTKVKYVTEGMRKPAFLSGEQKKAIVDLLFKTNRKVTVKQLKEDYFKKIECFDSVEISGVEDRFNASLGTYHDLLKIIKDKDFLDNEENEDILEDIVLTLTLFEDREMIEERLKTYAHLFDDKVMKQLKRRRYTGWGRLSRKLINGIRDKQSGKTILDFLKSDGFANRNFMQLIHDDSLTFKEDIQKAQVSGQGDSLHEHIANLAGSPAIKKGILQTVKVVDELVKVMGRHKPENIVIEMARENQTTQKGQKNSRERMKRIEEGIKELGSQILKEHPVENTQLQNEKLYLYYLQNGRDMYVDQELDINRLSDYDVDHIVPQSFLKDDSIDNKVLTRSDKARGKSDNVPSEEVVKKMKNYWRQLLNAKLITQRKFDNLTKAERGGLSELDKAGFIKRQLVETRQITKHVAQILDSRMNTKYDENDKLIREVKVITLKSKLVSDFRKDFQFYKVREINNYHHAHDAYLNAVVGTALIKKYPKLESEFVYGDYKVYDVRKMIAKSEQEIGKATAKYFFYSNIMNFFKTEITLANGEIRKRPLIETNGETGEIVWDKGRDFATVRKVLSMPQVNIVKKTEVQTGGFSKESILPKRNSDKLIARKKDWDPKKYGGFDSPTVAYSVLVVAKVEKGKSKKLKSVKELLGITIMERSSFEKNPIDFLEAKGYKEVKKDLIIKLPKYSLFELENGRKRMLASAGELQKGNELALPSKYVNFLYLASHYEKLKGSPEDNEQKQLFVEQHKHYLDEIIEQISEFSKRVILADANLDKVLSAYNKHRDKPIREQAENIIHLFTLTNLGAPAAFKYFDTTIDRKRYTSTKEVLDATLIHQSITGLYETRIDLSQLGGDGGGGSEAAAKGSSGGTLGDQGSRGSDPLPEPRVTLTVEGIPTEFLVNTGAEHSVLTKPMGKMGSKRTVVAGATGSKVYPWTTKRLLKIGQKQVTHSFLVIPECPAPLLGRDLLTKLKAQIQFSTEGPQVTWEDRPAMCLVLNLEEEYRLHEKPVPPSIDPSWLQLFPMVWAEKAGMGLANQVPPVVVELKSDASPVAVRQYPMSKEAREGIRPHIQRFLDLGILVPCQSPWNTPLLPVKKPGTNDYRPVQDLREVNKRVQDIHPTVPNPYNLLSSLPPSHTWYSVLDLKDAFFCLKLHPNSQPLFAFEWRDPEKGNTGQLTWTRLPQGFKNSPTLFNEALHRDLASFRALNPQVVMLQYVDDLLVAAPTYRDCKEGTRRLLQELSKLGYRVSAKKAQLCREEVTYLGYLLKGGKRWLTPARKATVMKIPTPTTPRQVREFLGKAGFCRLFIPGFASLAAPLYPLTRPKVPFTWTEAHQEAFGRIKEALLSAPALALPDLTKPFALYVDEKEGVARGVLTQTLGPWRRPVAYLSKKLDPVASGWPTCLKAIAAVALLLKDADKLTLGQNVLVIAPHNLESIVRQPPDRWMTNARMTHYQSLLLNERVSFAPPAILNPATLLPVESDDTPIHICSEILAEETGTRPDLRDQPLPGVPAWYTDGSSFIMDGRRQAGAAIVDNKRTVWASNLPEGTSAQKAELIALTQALRLAEGKSINIYTDSRYAFATAHVHGAIYKQRGWLTSAGKDIKNKEEILALLEAIHLPKRVAIIHCPGHQRGTDPVATGNRKADEAAKQAAQSTRILTETTKNAGKRTADGSEFEKRTADGSEFESPKKKAKVE

SEQ ID NO: 1770 - protein, 2218 aa, synthetic construct
MPAAKRVKLDGGDKKYSIGLDIGTNSVGWAVITDEYKVPSKKFKVLGNTDRHSIKKNLIGALLFDSGETAEATRLKRTARRRYTRRKNRICYLQEIFSNEMAKVDDSFFHRLEESFLVEEDKKHERHPIFGNIVDEVAYHEKYPTIYHLRKKLVDSTDKADLRLIYLALAHMIKFRGHFLIEGDLNPDNSDVDKLFIQLVQTYNQLFEENPINASGVDAKAILSARLSKSRRLENLIAQLPGEKKNGLFGNLIALSLGLTPNFKSNFDLAEDAKLQLSKDTYDDDLDNLLAQIGDQYADLFLAAKNLSDAILLSDILRVNTEITKAPLSASMIKRYDEHHQDLTLLKALVRQQLPEKYKEIFFDQSKNGYAGYIDGGASQEEFYKFIKPILEKMDGTEELLVKLNREDLLRKQRTFDNGSIPHQIHLGELHAILRRQEDFYPFLKDNREKIEKILTFRIPYYVGPLARGNSRFAWMTRKSEETITPWNFEEVVDKGASAQSFIERMTNFDKNLPNEKVLPKHSLLYEYFTVYNELTKVKYVTEGMRKPAFLSGEQKKAIVDLLFKTNRKVTVKQLKEDYFKKIECFDSVEISGVEDRFNASLGTYHDLLKIIKDKDFLDNEENEDILEDIVLTLTLFEDREMIEERLKTYAHLFDDKVMKQLKRRRYTGWGRLSRKLINGIRDKQSGKTILDFLKSDGFANRNFMQLIHDDSLTFKEDIQKAQVSGQGDSLHEHIANLAGSPAIKKGILQTVKVVDELVKVMGRHKPENIVIEMARENQTTQKGQKNSRERMKRIEEGIKELGSQILKEHPVENTQLQNEKLYLYYLQNGRDMYVDQELDINRLSDYDVDHIVPQSFLKDDSIDNKVLTRSDKARGKSDNVPSEEVVKKMKNYWRQLLNAKLITQRKFDNLTKAERGGLSELDKAGFIKRQLVETRQITKHVAQILDSRMNTKYDENDKLIREVKVITLKSKLVSDFRKDFQFYKVREINNYHHAHDAYLNAVVGTALIKKYPKLESEFVYGDYKVYDVRKMIAKSEQEIGKATAKYFFYSNIMNFFKTEITLANGEIRKRPLIETNGETGEIVWDKGRDFATVRKVLSMPQVNIVKKTEVQTGGFSKESILPKRNSDKLIARKKDWDPKKYGGFDSPTVAYSVLVVAKVEKGKSKKLKSVKELLGITIMERSSFEKNPIDFLEAKGYKEVKKDLIIKLPKYSLFELENGRKRMLASAGELQKGNELALPSKYVNFLYLASHYEKLKGSPEDNEQKQLFVEQHKHYLDEIIEQISEFSKRVILADANLDKVLSAYNKHRDKPIREQAENIIHLFTLTNLGAPAAFKYFDTTIDRKRYTSTKEVLDATLIHQSITGLYETRIDLSQLGGDGGEAAAKGGGPAPGGTLGDQGSRGSDPLPEPRVTLTVEGIPTEFLVNTGAEHSVLTKPMGKMGSKRTVVAGATGSKVYPWTTKRLLKIGQKQVTHSFLVIPECPAPLLGRDLLTKLKAQIQFSTEGPQVTWEDRPAMCLVLNLEEEYRLHEKPVPPSIDPSWLQLFPMVWAEKAGMGLANQVPPVVVELKSDASPVAVRQYPMSKEAREGIRPHIQRFLDLGILVPCQSPWNTPLLPVKKPGTNDYRPVQDLREVNKRVQDIHPTVPNPYNLLSSLPPSHTWYSVLDLKDAFFCLKLHPNSQPLFAFEWRDPEKGNTGQLTWTRLPQGFKNSPTLFNEALHRDLASFRALNPQVVMLQYVDDLLVAAPTYRDCKEGTRRLLQELSKLGYRVSAKKAQLCREEVTYLGYLLKGGKRWLTPARKATVMKIPTPTTPRQVREFLGKAGFCRLFIPGFASLAAPLYPLTRPKVPFTWTEAHQEAFGRIKEALLSAPALALPDLTKPFALYVDEKEGVARGVLTQTLGPWRRPVAYLSKKLDPVASGWPTCLKAIAAVALLLKDADKLTLGQNVLVIAPHNLESIVRQPPDRWMTNARMTHYQSLLLNERVSFAPPAILNPATLLPVESDDTPIHICSEILAEETGTRPDLRDQPLPGVPAWYTDGSSFIMDGRRQAGAAIVDNKRTVWASNLPEGTSAQKAELIALTQALRLAEGKSINIYTDSRYAFATAHVHGAIYKQRGWLTSAGKDIKNKEEILALLEAIHLPKRVAIIHCPGHQRGTDPVATGNRKADEAAKQAAQSTRILTETTKNAGKRTADGSEFEKRTADGSEFESPKKKAKVE

SEQ ID NO: 1771 - protein, 2218 aa, synthetic construct
MPAAKRVKLDGGDKKYSIGLDIGTNSVGWAVITDEYKVPSKKFKVLGNTDRHSIKKNLIGALLFDSGETAEATRLKRTARRRYTRRKNRICYLQEIFSNEMAKVDDSFFHRLEESFLVEEDKKHERHPIFGNIVDEVAYHEKYPTIYHLRKKLVDSTDKADLRLIYLALAHMIKFRGHFLIEGDLNPDNSDVDKLFIQLVQTYNQLFEENPINASGVDAKAILSARLSKSRRLENLIAQLPGEKKNGLFGNLIALSLGLTPNFKSNFDLAEDAKLQLSKDTYDDDLDNLLAQIGDQYADLFLAAKNLSDAILLSDILRVNTEITKAPLSASMIKRYDEHHQDLTLLKALVRQQLPEKYKEIFFDQSKNGYAGYIDGGASQEEFYKFIKPILEKMDGTEELLVKLNREDLLRKQRTFDNGSIPHQIHLGELHAILRRQEDFYPFLKDNREKIEKILTFRIPYYVGPLARGNSRFAWMTRKSEETITPWNFEEVVDKGASAQSFIERMTNFDKNLPNEKVLPKHSLLYEYFTVYNELTKVKYVTEGMRKPAFLSGEQKKAIVDLLFKTNRKVTVKQLKEDYFKKIECFDSVEISGVEDRFNASLGTYHDLLKIIKDKDFLDNEENEDILEDIVLTLTLFEDREMIEERLKTYAHLFDDKVMKQLKRRRYTGWGRLSRKLINGIRDKQSGKTILDFLKSDGFANRNFMQLIHDDSLTFKEDIQKAQVSGQGDSLHEHIANLAGSPAIKKGILQTVKVVDELVKVMGRHKPENIVIEMARENQTTQKGQKNSRERMKRIEEGIKELGSQILKEHPVENTQLQNEKLYLYYLQNGRDMYVDQELDINRLSDYDVDHIVPQSFLKDDSIDNKVLTRSDKARGKSDNVPSEEVVKKMKNYWRQLLNAKLITQRKFDNLTKAERGGLSELDKAGFIKRQLVETRQITKHVAQILDSRMNTKYDENDKLIREVKVITLKSKLVSDFRKDFQFYKVREINNYHHAHDAYLNAVVGTALIKKYPKLESEFVYGDYKVYDVRKMIAKSEQEIGKATAKYFFYSNIMNFFKTEITLANGEIRKRPLIETNGETGEIVWDKGRDFATVRKVLSMPQVNIVKKTEVQTGGFSKESILPKRNSDKLIARKKDWDPKKYGGFDSPTVAYSVLVVAKVEKGKSKKLKSVKELLGITIMERSSFEKNPIDFLEAKGYKEVKKDLIIKLPKYSLFELENGRKRMLASAGELQKGNELALPSKYVNFLYLASHYEKLKGSPEDNEQKQLFVEQHKHYLDEIIEQISEFSKRVILADANLDKVLSAYNKHRDKPIREQAENIIHLFTLTNLGAPAAFKYFDTTIDRKRYTSTKEVLDATLIHQSITGLYETRIDLSQLGGDGGGGGEAAAKGGSGGTLGDQGSRGSDPLPEPRVTLTVEGIPTEFLVNTGAEHSVLTKPMGKMGSKRTVVAGATGSKVYPWTTKRLLKIGQKQVTHSFLVIPECPAPLLGRDLLTKLKAQIQFSTEGPQVTWEDRPAMCLVLNLEEEYRLHEKPVPPSIDPSWLQLFPMVWAEKAGMGLANQVPPVVVELKSDASPVAVRQYPMSKEAREGIRPHIQRFLDLGILVPCQSPWNTPLLPVKKPGTNDYRPVQDLREVNKRVQDIHPTVPNPYNLLSSLPPSHTWYSVLDLKDAFFCLKLHPNSQPLFAFEWRDPEKGNTGQLTWTRLPQGFKNSPTLFNEALHRDLASFRALNPQVVMLQYVDDLLVAAPTYRDCKEGTRRLLQELSKLGYRVSAKKAQLCREEVTYLGYLLKGGKRWLTPARKATVMKIPTPTTPRQVREFLGKAGFCRLFIPGFASLAAPLYPLTRPKVPFTWTEAHQEAFGRIKEALLSAPALALPDLTKPFALYVDEKEGVARGVLTQTLGPWRRPVAYLSKKLDPVASGWPTCLKAIAAVALLLKDADKLTLGQNVLVIAPHNLESIVRQPPDRWMTNARMTHYQSLLLNERVSFAPPAILNPATLLPVESDDTPIHICSEILAEETGTRPDLRDQPLPGVPAWYTDGSSFIMDGRRQAGAAIVDNKRTVWASNLPEGTSAQKAELIALTQALRLAEGKSINIYTDSRYAFATAHVHGAIYKQRGWLTSAGKDIKNKEEILALLEAIHLPKRVAIIHCPGHQRGTDPVATGNRKADEAAKQAAQSTRILTETTKNAGKRTADGSEFEKRTADGSEFESPKKKAKVE

SEQ ID NO: 1772 - protein, 2213 aa, synthetic construct
MPAAKRVKLDGGDKKYSIGLDIGTNSVGWAVITDEYKVPSKKFKVLGNTDRHSIKKNLIGALLFDSGETAEATRLKRTARRRYTRRKNRICYLQEIFSNEMAKVDDSFFHRLEESFLVEEDKKHERHPIFGNIVDEVAYHEKYPTIYHLRKKLVDSTDKADLRLIYLALAHMIKFRGHFLIEGDLNPDNSDVDKLFIQLVQTYNQLFEENPINASGVDAKAILSARLSKSRRLENLIAQLPGEKKNGLFGNLIALSLGLTPNFKSNFDLAEDAKLQLSKDTYDDDLDNLLAQIGDQYADLFLAAKNLSDAILLSDILRVNTEITKAPLSASMIKRYDEHHQDLTLLKALVRQQLPEKYKEIFFDQSKNGYAGYIDGGASQEEFYKFIKPILEKMDGTEELLVKLNREDLLRKQRTFDNGSIPHQIHLGELHAILRRQEDFYPFLKDNREKIEKILTFRIPYYVGPLARGNSRFAWMTRKSEETITPWNFEEVVDKGASAQSFIERMTNFDKNLPNEKVLPKHSLLYEYFTVYNELTKVKYVTEGMRKPAFLSGEQKKAIVDLLFKTNRKVTVKQLKEDYFKKIECFDSVEISGVEDRFNASLGTYHDLLKIIKDKDFLDNEENEDILEDIVLTLTLFEDREMIEERLKTYAHLFDDKVMKQLKRRRYTGWGRLSRKLINGIRDKQSGKTILDFLKSDGFANRNFMQLIHDDSLTFKEDIQKAQVSGQGDSLHEHIANLAGSPAIKKGILQTVKVVDELVKVMGRHKPENIVIEMARENQTTQKGQKNSRERMKRIEEGIKELGSQILKEHPVENTQLQNEKLYLYYLQNGRDMYVDQELDINRLSDYDVDHIVPQSFLKDDSIDNKVLTRSDKARGKSDNVPSEEVVKKMKNYWRQLLNAKLITQRKFDNLTKAERGGLSELDKAGFIKRQLVETRQITKHVAQILDSRMNTKYDENDKLIREVKVITLKSKLVSDFRKDFQFYKVREINNYHHAHDAYLNAVVGTALIKKYPKLESEFVYGDYKVYDVRKMIAKSEQEIGKATAKYFFYSNIMNFFKTEITLANGEIRKRPLIETNGETGEIVWDKGRDFATVRKVLSMPQVNIVKKTEVQTGGFSKESILPKRNSDKLIARKKDWDPKKYGGFDSPTVAYSVLVVAKVEKGKSKKLKSVKELLGITIMERSSFEKNPIDFLEAKGYKEVKKDLIIKLPKYSLFELENGRKRMLASAGELQKGNELALPSKYVNFLYLASHYEKLKGSPEDNEQKQLFVEQHKHYLDEIIEQISEFSKRVILADANLDKVLSAYNKHRDKPIREQAENIIHLFTLTNLGAPAAFKYFDTTIDRKRYTSTKEVLDATLIHQSITGLYETRIDLSQLGGDGGGGGGSSGGTLGDQGSRGSDPLPEPRVTLTVEGIPTEFLVNTGAEHSVLTKPMGKMGSKRTVVAGATGSKVYPWTTKRLLKIGQKQVTHSFLVIPECPAPLLGRDLLTKLKAQIQFSTEGPQVTWEDRPAMCLVLNLEEEYRLHEKPVPPSIDPSWLQLFPMVWAEKAGMGLANQVPPVVVELKSDASPVAVRQYPMSKEAREGIRPHIQRFLDLGILVPCQSPWNTPLLPVKKPGTNDYRPVQDLREVNKRVQDIHPTVPNPYNLLSSLPPSHTWYSVLDLKDAFFCLKLHPNSQPLFAFEWRDPEKGNTGQLTWTRLPQGFKNSPTLFNEALHRDLASFRALNPQVVMLQYVDDLLVAAPTYRDCKEGTRRLLQELSKLGYRVSAKKAQLCREEVTYLGYLLKGGKRWLTPARKATVMKIPTPTTPRQVREFLGKAGFCRLFIPGFASLAAPLYPLTRPKVPFTWTEAHQEAFGRIKEALLSAPALALPDLTKPFALYVDEKEGVARGVLTQTLGPWRRPVAYLSKKLDPVASGWPTCLKAIAAVALLLKDADKLTLGQNVLVIAPHNLESIVRQPPDRWMTNARMTHYQSLLLNERVSFAPPAILNPATLLPVESDDTPIHICSEILAEETGTRPDLRDQPLPGVPAWYTDGSSFIMDGRRQAGAAIVDNKRTVWASNLPEGTSAQKAELIALTQALRLAEGKSINIYTDSRYAFATAHVHGAIYKQRGWLTSAGKDIKNKEEILALLEAIHLPKRVAIIHCPGHQRGTDPVATGNRKADEAAKQAAQSTRILTETTKNAGKRTADGSEFEKRTADGSEFESPKKKAKVE

SEQ ID NO: 1773 - protein, 2217 aa, synthetic construct
MPAAKRVKLDGGDKKYSIGLDIGTNSVGWAVITDEYKVPSKKFKVLGNTDRHSIKKNLIGALLFDSGETAEATRLKRTARRRYTRRKNRICYLQEIFSNEMAKVDDSFFHRLEESFLVEEDKKHERHPIFGNIVDEVAYHEKYPTIYHLRKKLVDSTDKADLRLIYLALAHMIKFRGHFLIEGDLNPDNSDVDKLFIQLVQTYNQLFEENPINASGVDAKAILSARLSKSRRLENLIAQLPGEKKNGLFGNLIALSLGLTPNFKSNFDLAEDAKLQLSKDTYDDDLDNLLAQIGDQYADLFLAAKNLSDAILLSDILRVNTEITKAPLSASMIKRYDEHHQDLTLLKALVRQQLPEKYKEIFFDQSKNGYAGYIDGGASQEEFYKFIKPILEKMDGTEELLVKLNREDLLRKQRTFDNGSIPHQIHLGELHAILRRQEDFYPFLKDNREKIEKILTFRIPYYVGPLARGNSRFAWMTRKSEETITPWNFEEVVDKGASAQSFIERMTNFDKNLPNEKVLPKHSLLYEYFTVYNELTKVKYVTEGMRKPAFLSGEQKKAIVDLLFKTNRKVTVKQLKEDYFKKIECFDSVEISGVEDRFNASLGTYHDLLKIIKDKDFLDNEENEDILEDIVLTLTLFEDREMIEERLKTYAHLFDDKVMKQLKRRRYTGWGRLSRKLINGIRDKQSGKTILDFLKSDGFANRNFMQLIHDDSLTFKEDIQKAQVSGQGDSLHEHIANLAGSPAIKKGILQTVKVVDELVKVMGRHKPENIVIEMARENQTTQKGQKNSRERMKRIEEGIKELGSQILKEHPVENTQLQNEKLYLYYLQNGRDMYVDQELDINRLSDYDVDHIVPQSFLKDDSIDNKVLTRSDKARGKSDNVPSEEVVKKMKNYWRQLLNAKLITQRKFDNLTKAERGGLSELDKAGFIKRQLVETRQITKHVAQILDSRMNTKYDENDKLIREVKVITLKSKLVSDFRKDFQFYKVREINNYHHAHDAYLNAVVGTALIKKYPKLESEFVYGDYKVYDVRKMIAKSEQEIGKATAKYFFYSNIMNFFKTEITLANGEIRKRPLIETNGETGEIVWDKGRDFATVRKVLSMPQVNIVKKTEVQTGGFSKESILPKRNSDKLIARKKDWDPKKYGGFDSPTVAYSVLVVAKVEKGKSKKLKSVKELLGITIMERSSFEKNPIDFLEAKGYKEVKKDLIIKLPKYSLFELENGRKRMLASAGELQKGNELALPSKYVNFLYLASHYEKLKGSPEDNEQKQLFVEQHKHYLDEIIEQISEFSKRVILADANLDKVLSAYNKHRDKPIREQAENIIHLFTLTNLGAPAAFKYFDTTIDRKRYTSTKEVLDATLIHQSITGLYETRIDLSQLGGDGGEAAAKEAAAKGGTLGDQGSRGSDPLPEPRVTLTVEGIPTEFLVNTGAEHSVLTKPMGKMGSKRTVVAGATGSKVYPWTTKRLLKIGQKQVTHSFLVIPECPAPLLGRDLLTKLKAQIQFSTEGPQVTWEDRPAMCLVLNLEEEYRLHEKPVPPSIDPSWLQLFPMVWAEKAGMGLANQVPPVVVELKSDASPVAVRQYPMSKEAREGIRPHIQRFLDLGILVPCQSPWNTPLLPVKKPGTNDYRPVQDLREVNKRVQDIHPTVPNPYNLLSSLPPSHTWYSVLDLKDAFFCLKLHPNSQPLFAFEWRDPEKGNTGQLTWTRLPQGFKNSPTLFNEALHRDLASFRALNPQVVMLQYVDDLLVAAPTYRDCKEGTRRLLQELSKLGYRVSAKKAQLCREEVTYLGYLLKGGKRWLTPARKATVMKIPTPTTPRQVREFLGKAGFCRLFIPGFASLAAPLYPLTRPKVPFTWTEAHQEAFGRIKEALLSAPALALPDLTKPFALYVDEKEGVARGVLTQTLGPWRRPVAYLSKKLDPVASGWPTCLKAIAAVALLLKDADKLTLGQNVLVIAPHNLESIVRQPPDRWMTNARMTHYQSLLLNERVSFAPPAILNPATLLPVESDDTPIHICSEILAEETGTRPDLRDQPLPGVPAWYTDGSSFIMDGRRQAGAAIVDNKRTVWASNLPEGTSAQKAELIALTQALRLAEGKSINIYTDSRYAFATAHVHGAIYKQRGWLTSAGKDIKNKEEILALLEAIHLPKRVAIIHCPGHQRGTDPVATGNRKADEAAKQAAQSTRILTETTKNAGKRTADGSEFEKRTADGSEFESPKKKAKVE

SEQ ID NO: 1774 - protein, 2216 aa, synthetic construct
MPAAKRVKLDGGDKKYSIGLDIGTNSVGWAVITDEYKVPSKKFKVLGNTDRHSIKKNLIGALLFDSGETAEATRLKRTARRRYTRRKNRICYLQEIFSNEMAKVDDSFFHRLEESFLVEEDKKHERHPIFGNIVDEVAYHEKYPTIYHLRKKLVDSTDKADLRLIYLALAHMIKFRGHFLIEGDLNPDNSDVDKLFIQLVQTYNQLFEENPINASGVDAKAILSARLSKSRRLENLIAQLPGEKKNGLFGNLIALSLGLTPNFKSNFDLAEDAKLQLSKDTYDDDLDNLLAQIGDQYADLFLAAKNLSDAILLSDILRVNTEITKAPLSASMIKRYDEHHQDLTLLKALVRQQLPEKYKEIFFDQSKNGYAGYIDGGASQEEFYKFIKPILEKMDGTEELLVKLNREDLLRKQRTFDNGSIPHQIHLGELHAILRRQEDFYPFLKDNREKIEKILTFRIPYYVGPLARGNSRFAWMTRKSEETITPWNFEEVVDKGASAQSFIERMTNFDKNLPNEKVLPKHSLLYEYFTVYNELTKVKYVTEGMRKPAFLSGEQKKAIVDLLFKTNRKVTVKQLKEDYFKKIECFDSVEISGVEDRFNASLGTYHDLLKIIKDKDFLDNEENEDILEDIVLTLTLFEDREMIEERLKTYAHLFDDKVMKQLKRRRYTGWGRLSRKLINGIRDKQSGKTILDFLKSDGFANRNFMQLIHDDSLTFKEDIQKAQVSGQGDSLHEHIANLAGSPAIKKGILQTVKVVDELVKVMGRHKPENIVIEMARENQTTQKGQKNSRERMKRIEEGIKELGSQILKEHPVENTQLQNEKLYLYYLQNGRDMYVDQELDINRLSDYDVDHIVPQSFLKDDSIDNKVLTRSDKARGKSDNVPSEEVVKKMKNYWRQLLNAKLITQRKFDNLTKAERGGLSELDKAGFIKRQLVETRQITKHVAQILDSRMNTKYDENDKLIREVKVITLKSKLVSDFRKDFQFYKVREINNYHHAHDAYLNAVVGTALIKKYPKLESEFVYGDYKVYDVRKMIAKSEQEIGKATAKYFFYSNIMNFFKTEITLANGEIRKRPLIETNGETGEIVWDKGRDFATVRKVLSMPQVNIVKKTEVQTGGFSKESILPKRNSDKLIARKKDWDPKKYGGFDSPTVAYSVLVVAKVEKGKSKKLKSVKELLGITIMERSSFEKNPIDFLEAKGYKEVKKDLIIKLPKYSLFELENGRKRMLASAGELQKGNELALPSKYVNFLYLASHYEKLKGSPEDNEQKQLFVEQHKHYLDEIIEQISEFSKRVILADANLDKVLSAYNKHRDKPIREQAENIIHLFTLTNLGAPAAFKYFDTTIDRKRYTSTKEVLDATLIHQSITGLYETRIDLSQLGGDGGPAPGGGGSSGGTLGDQGSRGSDPLPEPRVTLTVEGIPTEFLVNTGAEHSVLTKPMGKMGSKRTVVAGATGSKVYPWTTKRLLKIGQKQVTHSFLVIPECPAPLLGRDLLTKLKAQIQFSTEGPQVTWEDRPAMCLVLNLEEEYRLHEKPVPPSIDPSWLQLFPMVWAEKAGMGLANQVPPVVVELKSDASPVAVRQYPMSKEAREGIRPHIQRFLDLGILVPCQSPWNTPLLPVKKPGTNDYRPVQDLREVNKRVQDIHPTVPNPYNLLSSLPPSHTWYSVLDLKDAFFCLKLHPNSQPLFAFEWRDPEKGNTGQLTWTRLPQGFKNSPTLFNEALHRDLASFRALNPQVVMLQYVDDLLVAAPTYRDCKEGTRRLLQELSKLGYRVSAKKAQLCREEVTYLGYLLKGGKRWLTPARKATVMKIPTPTTPRQVREFLGKAGFCRLFIPGFASLAAPLYPLTRPKVPFTWTEAHQEAFGRIKEALLSAPALALPDLTKPFALYVDEKEGVARGVLTQTLGPWRRPVAYLSKKLDPVASGWPTCLKAIAAVALLLKDADKLTLGQNVLVIAPHNLESIVRQPPDRWMTNARMTHYQSLLLNERVSFAPPAILNPATLLPVESDDTPIHICSEILAEETGTRPDLRDQPLPGVPAWYTDGSSFIMDGRRQAGAAIVDNKRTVWASNLPEGTSAQKAELIALTQALRLAEGKSINIYTDSRYAFATAHVHGAIYKQRGWLTSAGKDIKNKEEILALLEAIHLPKRVAIIHCPGHQRGTDPVATGNRKADEAAKQAAQSTRILTETTKNAGKRTADGSEFEKRTADGSEFESPKKKAKVE

SEQ ID NO: 1775 - protein, 2216 aa, synthetic construct
MPAAKRVKLDGGDKKYSIGLDIGTNSVGWAVITDEYKVPSKKFKVLGNTDRHSIKKNLIGALLFDSGETAEATRLKRTARRRYTRRKNRICYLQEIFSNEMAKVDDSFFHRLEESFLVEEDKKHERHPIFGNIVDEVAYHEKYPTIYHLRKKLVDSTDKADLRLIYLALAHMIKFRGHFLIEGDLNPDNSDVDKLFIQLVQTYNQLFEENPINASGVDAKAILSARLSKSRRLENLIAQLPGEKKNGLFGNLIALSLGLTPNFKSNFDLAEDAKLQLSKDTYDDDLDNLLAQIGDQYADLFLAAKNLSDAILLSDILRVNTEITKAPLSASMIKRYDEHHQDLTLLKALVRQQLPEKYKEIFFDQSKNGYAGYIDGGASQEEFYKFIKPILEKMDGTEELLVKLNREDLLRKQRTFDNGSIPHQIHLGELHAILRRQEDFYPFLKDNREKIEKILTFRIPYYVGPLARGNSRFAWMTRKSEETITPWNFEEVVDKGASAQSFIERMTNFDKNLPNEKVLPKHSLLYEYFTVYNELTKVKYVTEGMRKPAFLSGEQKKAIVDLLFKTNRKVTVKQLKEDYFKKIECFDSVEISGVEDRFNASLGTYHDLLKIIKDKDFLDNEENEDILEDIVLTLTLFEDREMIEERLKTYAHLFDDKVMKQLKRRRYTGWGRLSRKLINGIRDKQSGKTILDFLKSDGFANRNFMQLIHDDSLTFKEDIQKAQVSGQGDSLHEHIANLAGSPAIKKGILQTVKVVDELVKVMGRHKPENIVIEMARENQTTQKGQKNSRERMKRIEEGIKELGSQILKEHPVENTQLQNEKLYLYYLQNGRDMYVDQELDINRLSDYDVDHIVPQSFLKDDSIDNKVLTRSDKARGKSDNVPSEEVVKKMKNYWRQLLNAKLITQRKFDNLTKAERGGLSELDKAGFIKRQLVETRQITKHVAQILDSRMNTKYDENDKLIREVKVITLKSKLVSDFRKDFQFYKVREINNYHHAHDAYLNAVVGTALIKKYPKLESEFVYGDYKVYDVRKMIAKSEQEIGKATAKYFFYSNIMNFFKTEITLANGEIRKRPLIETNGETGEIVWDKGRDFATVRKVLSMPQVNIVKKTEVQTGGFSKESILPKRNSDKLIARKKDWDPKKYGGFDSPTVAYSVLVVAKVEKGKSKKLKSVKELLGITIMERSSFEKNPIDFLEAKGYKEVKKDLIIKLPKYSLFELENGRKRMLASAGELQKGNELALPSKYVNFLYLASHYEKLKGSPEDNEQKQLFVEQHKHYLDEIIEQISEFSKRVILADANLDKVLSAYNKHRDKPIREQAENIIHLFTLTNLGAPAAFKYFDTTIDRKRYTSTKEVLDATLIHQSITGLYETRIDLSQLGGDGGGGGGGSGSSGGTLGDQGSRGSDPLPEPRVTLTVEGIPTEFLVNTGAEHSVLTKPMGKMGSKRTVVAGATGSKVYPWTTKRLLKIGQKQVTHSFLVIPECPAPLLGRDLLTKLKAQIQFSTEGPQVTWEDRPAMCLVLNLEEEYRLHEKPVPPSIDPSWLQLFPMVWAEKAGMGLANQVPPVVVELKSDASPVAVRQYPMSKEAREGIRPHIQRFLDLGILVPCQSPWNTPLLPVKKPGTNDYRPVQDLREVNKRVQDIHPTVPNPYNLLSSLPPSHTWYSVLDLKDAFFCLKLHPNSQPLFAFEWRDPEKGNTGQLTWTRLPQGFKNSPTLFNEALHRDLASFRALNPQVVMLQYVDDLLVAAPTYRDCKEGTRRLLQELSKLGYRVSAKKAQLCREEVTYLGYLLKGGKRWLTPARKATVMKIPTPTTPRQVREFLGKAGFCRLFIPGFASLAAPLYPLTRPKVPFTWTEAHQEAFGRIKEALLSAPALALPDLTKPFALYVDEKEGVARGVLTQTLGPWRRPVAYLSKKLDPVASGWPTCLKAIAAVALLLKDADKLTLGQNVLVIAPHNLESIVRQPPDRWMTNARMTHYQSLLLNERVSFAPPAILNPATLLPVESDDTPIHICSEILAEETGTRPDLRDQPLPGVPAWYTDGSSFIMDGRRQAGAAIVDNKRTVWASNLPEGTSAQKAELIALTQALRLAEGKSINIYTDSRYAFATAHVHGAIYKQRGWLTSAGKDIKNKEEILALLEAIHLPKRVAIIHCPGHQRGTDPVATGNRKADEAAKQAAQSTRILTETTKNAGKRTADGSEFEKRTADGSEFESPKKKAKVE

SEQ ID NO: 1776 - protein, 2210 aa, synthetic construct
MPAAKRVKLDGGDKKYSIGLDIGTNSVGWAVITDEYKVPSKKFKVLGNTDRHSIKKNLIGALLFDSGETAEATRLKRTARRRYTRRKNRICYLQEIFSNEMAKVDDSFFHRLEESFLVEEDKKHERHPIFGNIVDEVAYHEKYPTIYHLRKKLVDSTDKADLRLIYLALAHMIKFRGHFLIEGDLNPDNSDVDKLFIQLVQTYNQLFEENPINASGVDAKAILSARLSKSRRLENLIAQLPGEKKNGLFGNLIALSLGLTPNFKSNFDLAEDAKLQLSKDTYDDDLDNLLAQIGDQYADLFLAAKNLSDAILLSDILRVNTEITKAPLSASMIKRYDEHHQDLTLLKALVRQQLPEKYKEIFFDQSKNGYAGYIDGGASQEEFYKFIKPILEKMDGTEELLVKLNREDLLRKQRTFDNGSIPHQIHLGELHAILRRQEDFYPFLKDNREKIEKILTFRIPYYVGPLARGNSRFAWMTRKSEETITPWNFEEVVDKGASAQSFIERMTNFDKNLPNEKVLPKHSLLYEYFTVYNELTKVKYVTEGMRKPAFLSGEQKKAIVDLLFKTNRKVTVKQLKEDYFKKIECFDSVEISGVEDRFNASLGTYHDLLKIIKDKDFLDNEENEDILEDIVLTLTLFEDREMIEERLKTYAHLFDDKVMKQLKRRRYTGWGRLSRKLINGIRDKQSGKTILDFLKSDGFANRNFMQLIHDDSLTFKEDIQKAQVSGQGDSLHEHIANLAGSPAIKKGILQTVKVVDELVKVMGRHKPENIVIEMARENQTTQKGQKNSRERMKRIEEGIKELGSQILKEHPVENTQLQNEKLYLYYLQNGRDMYVDQELDINRLSDYDVDHIVPQSFLKDDSIDNKVLTRSDKARGKSDNVPSEEVVKKMKNYWRQLLNAKLITQRKFDNLTKAERGGLSELDKAGFIKRQLVETRQITKHVAQILDSRMNTKYDENDKLIREVKVITLKSKLVSDFRKDFQFYKVREINNYHHAHDAYLNAVVGTALIKKYPKLESEFVYGDYKVYDVRKMIAKSEQEIGKATAKYFFYSNIMNFFKTEITLANGEIRKRPLIETNGETGEIVWDKGRDFATVRKVLSMPQVNIVKKTEVQTGGFSKESILPKRNSDKLIARKKDWDPKKYGGFDSPTVAYSVLVVAKVEKGKSKKLKSVKELLGITIMERSSFEKNPIDFLEAKGYKEVKKDLIIKLPKYSLFELENGRKRMLASAGELQKGNELALPSKYVNFLYLASHYEKLKGSPEDNEQKQLFVEQHKHYLDEIIEQISEFSKRVILADANLDKVLSAYNKHRDKPIREQAENIIHLFTLTNLGAPAAFKYFDTTIDRKRYTSTKEVLDATLIHQSITGLYETRIDLSQLGGDGGGSSGGTLGDQGSRGSDPLPEPRVTLTVEGIPTEFLVNTGAEHSVLTKPMGKMGSKRTVVAGATGSKVYPWTTKRLLKIGQKQVTHSFLVIPECPAPLLGRDLLTKLKAQIQFSTEGPQVTWEDRPAMCLVLNLEEEYRLHEKPVPPSIDPSWLQLFPMVWAEKAGMGLANQVPPVVVELKSDASPVAVRQYPMSKEAREGIRPHIQRFLDLGILVPCQSPWNTPLLPVKKPGTNDYRPVQDLREVNKRVQDIHPTVPNPYNLLSSLPPSHTWYSVLDLKDAFFCLKLHPNSQPLFAFEWRDPEKGNTGQLTWTRLPQGFKNSPTLFNEALHRDLASFRALNPQVVMLQYVDDLLVAAPTYRDCKEGTRRLLQELSKLGYRVSAKKAQLCREEVTYLGYLLKGGKRWLTPARKATVMKIPTPTTPRQVREFLGKAGFCRLFIPGFASLAAPLYPLTRPKVPFTWTEAHQEAFGRIKEALLSAPALALPDLTKPFALYVDEKEGVARGVLTQTLGPWRRPVAYLSKKLDPVASGWPTCLKAIAAVALLLKDADKLTLGQNVLVIAPHNLESIVRQPPDRWMTNARMTHYQSLLLNERVSFAPPAILNPATLLPVESDDTPIHICSEILAEETGTRPDLRDQPLPGVPAWYTDGSSFIMDGRRQAGAAIVDNKRTVWASNLPEGTSAQKAELIALTQALRLAEGKSINIYTDSRYAFATAHVHGAIYKQRGWLTSAGKDIKNKEEILALLEAIHLPKRVAIIHCPGHQRGTDPVATGNRKADEAAKQAAQSTRILTETTKNAGKRTADGSEFEKRTADGSEFESPKKKAKVE

SEQ ID NO: 1777 - protein, 2222 aa, synthetic construct
MPAAKRVKLDGGDKKYSIGLDIGTNSVGWAVITDEYKVPSKKFKVLGNTDRHSIKKNLIGALLFDSGETAEATRLKRTARRRYTRRKNRICYLQEIFSNEMAKVDDSFFHRLEESFLVEEDKKHERHPIFGNIVDEVAYHEKYPTIYHLRKKLVDSTDKADLRLIYLALAHMIKFRGHFLIEGDLNPDNSDVDKLFIQLVQTYNQLFEENPINASGVDAKAILSARLSKSRRLENLIAQLPGEKKNGLFGNLIALSLGLTPNFKSNFDLAEDAKLQLSKDTYDDDLDNLLAQIGDQYADLFLAAKNLSDAILLSDILRVNTEITKAPLSASMIKRYDEHHQDLTLLKALVRQQLPEKYKEIFFDQSKNGYAGYIDGGASQEEFYKFIKPILEKMDGTEELLVKLNREDLLRKQRTFDNGSIPHQIHLGELHAILRRQEDFYPFLKDNREKIEKILTFRIPYYVGPLARGNSRFAWMTRKSEETITPWNFEEVVDKGASAQSFIERMTNFDKNLPNEKVLPKHSLLYEYFTVYNELTKVKYVTEGMRKPAFLSGEQKKAIVDLLFKTNRKVTVKQLKEDYFKKIECFDSVEISGVEDRFNASLGTYHDLLKIIKDKDFLDNEENEDILEDIVLTLTLFEDREMIEERLKTYAHLFDDKVMKQLKRRRYTGWGRLSRKLINGIRDKQSGKTILDFLKSDGFANRNFMQLIHDDSLTFKEDIQKAQVSGQGDSLHEHIANLAGSPAIKKGILQTVKVVDELVKVMGRHKPENIVIEMARENQTTQKGQKNSRERMKRIEEGIKELGSQILKEHPVENTQLQNEKLYLYYLQNGRDMYVDQELDINRLSDYDVDHIVPQSFLKDDSIDNKVLTRSDKARGKSDNVPSEEVVKKMKNYWRQLLNAKLITQRKFDNLTKAERGGLSELDKAGFIKRQLVETRQITKHVAQILDSRMNTKYDENDKLIREVKVITLKSKLVSDFRKDFQFYKVREINNYHHAHDAYLNAVVGTALIKKYPKLESEFVYGDYKVYDVRKMIAKSEQEIGKATAKYFFYSNIMNFFKTEITLANGEIRKRPLIETNGETGEIVWDKGRDFATVRKVLSMPQVNIVKKTEVQTGGFSKESILPKRNSDKLIARKKDWDPKKYGGFDSPTVAYSVLVVAKVEKGKSKKLKSVKELLGITIMERSSFEKNPIDFLEAKGYKEVKKDLIIKLPKYSLFELENGRKRMLASAGELQKGNELALPSKYVNFLYLASHYEKLKGSPEDNEQKQLFVEQHKHYLDEIIEQISEFSKRVILADANLDKVLSAYNKHRDKPIREQAENIIHLFTLTNLGAPAAFKYFDTTIDRKRYTSTKEVLDATLIHQSITGLYETRIDLSQLGGDGGGGGGSEAAAKGGGGSGGTLGDQGSRGSDPLPEPRVTLTVEGIPTEFLVNTGAEHSVLTKPMGKMGSKRTVVAGATGSKVYPWTTKRLLKIGQKQVTHSFLVIPECPAPLLGRDLLTKLKAQIQFSTEGPQVTWEDRPAMCLVLNLEEEYRLHEKPVPPSIDPSWLQLFPMVWAEKAGMGLANQVPPVVVELKSDASPVAVRQYPMSKEAREGIRPHIQRFLDLGILVPCQSPWNTPLLPVKKPGTNDYRPVQDLREVNKRVQDIHPTVPNPYNLLSSLPPSHTWYSVLDLKDAFFCLKLHPNSQPLFAFEWRDPEKGNTGQLTWTRLPQGFKNSPTLFNEALHRDLASFRALNPQVVMLQYVDDLLVAAPTYRDCKEGTRRLLQELSKLGYRVSAKKAQLCREEVTYLGYLLKGGKRWLTPARKATVMKIPTPTTPRQVREFLGKAGFCRLFIPGFASLAAPLYPLTRPKVPFTWTEAHQEAFGRIKEALLSAPALALPDLTKPFALYVDEKEGVARGVLTQTLGPWRRPVAYLSKKLDPVASGWPTCLKAIAAVALLLKDADKLTLGQNVLVIAPHNLESIVRQPPDRWMTNARMTHYQSLLLNERVSFAPPAILNPATLLPVESDDTPIHICSEILAEETGTRPDLRDQPLPGVPAWYTDGSSFIMDGRRQAGAAIVDNKRTVWASNLPEGTSAQKAELIALTQALRLAEGKSINIYTDSRYAFATAHVHGAIYKQRGWLTSAGKDIKNKEEILALLEAIHLPKRVAIIHCPGHQRGTDPVATGNRKADEAAKQAAQSTRILTETTKNAGKRTADGSEFEKRTADGSEFESPKKKAKVE

SEQ ID NO: 1778 - protein, 2237 aa, synthetic construct
MPAAKRVKLDGGDKKYSIGLDIGTNSVGWAVITDEYKVPSKKFKVLGNTDRHSIKKNLIGALLFDSGETAEATRLKRTARRRYTRRKNRICYLQEIFSNEMAKVDDSFFHRLEESFLVEEDKKHERHPIFGNIVDEVAYHEKYPTIYHLRKKLVDSTDKADLRLIYLALAHMIKFRGHFLIEGDLNPDNSDVDKLFIQLVQTYNQLFEENPINASGVDAKAILSARLSKSRRLENLIAQLPGEKKNGLFGNLIALSLGLTPNFKSNFDLAEDAKLQLSKDTYDDDLDNLLAQIGDQYADLFLAAKNLSDAILLSDILRVNTEITKAPLSASMIKRYDEHHQDLTLLKALVRQQLPEKYKEIFFDQSKNGYAGYIDGGASQEEFYKFIKPILEKMDGTEELLVKLNREDLLRKQRTFDNGSIPHQIHLGELHAILRRQEDFYPFLKDNREKIEKILTFRIPYYVGPLARGNSRFAWMTRKSEETITPWNFEEVVDKGASAQSFIERMTNFDKNLPNEKVLPKHSLLYEYFTVYNELTKVKYVTEGMRKPAFLSGEQKKAIVDLLFKTNRKVTVKQLKEDYFKKIECFDSVEISGVEDRFNASLGTYHDLLKIIKDKDFLDNEENEDILEDIVLTLTLFEDREMIEERLKTYAHLFDDKVMKQLKRRRYTGWGRLSRKLINGIRDKQSGKTILDFLKSDGFANRNFMQLIHDDSLTFKEDIQKAQVSGQGDSLHEHIANLAGSPAIKKGILQTVKVVDELVKVMGRHKPENIVIEMARENQTTQKGQKNSRERMKRIEEGIKELGSQILKEHPVENTQLQNEKLYLYYLQNGRDMYVDQELDINRLSDYDVDHIVPQSFLKDDSIDNKVLTRSDKARGKSDNVPSEEVVKKMKNYWRQLLNAKLITQRKFDNLTKAERGGLSELDKAGFIKRQLVETRQITKHVAQILDSRMNTKYDENDKLIREVKVITLKSKLVSDFRKDFQFYKVREINNYHHAHDAYLNAVVGTALIKKYPKLESEFVYGDYKVYDVRKMIAKSEQEIGKATAKYFFYSNIMNFFKTEITLANGEIRKRPLIETNGETGEIVWDKGRDFATVRKVLSMPQVNIVKKTEVQTGGFSKESILPKRNSDKLIARKKDWDPKKYGGFDSPTVAYSVLVVAKVEKGKSKKLKSVKELLGITIMERSSFEKNPIDFLEAKGYKEVKKDLIIKLPKYSLFELENGRKRMLASAGELQKGNELALPSKYVNFLYLASHYEKLKGSPEDNEQKQLFVEQHKHYLDEIIEQISEFSKRVILADANLDKVLSAYNKHRDKPIREQAENIIHLFTLTNLGAPAAFKYFDTTIDRKRYTSTKEVLDATLIHQSITGLYETRIDLSQLGGDGGEAAAKEAAAKEAAAKEAAAKEAAAKEAAAKGGTLGDQGSRGSDPLPEPRVTLTVEGIPTEFLVNTGAEHSVLTKPMGKMGSKRTVVAGATGSKVYPWTTKRLLKIGQKQVTHSFLVIPECPAPLLGRDLLTKLKAQIQFSTEGPQVTWEDRPAMCLVLNLEEEYRLHEKPVPPSIDPSWLQLFPMVWAEKAGMGLANQVPPVVVELKSDASPVAVRQYPMSKEAREGIRPHIQRFLDLGILVPCQSPWNTPLLPVKKPGTNDYRPVQDLREVNKRVQDIHPTVPNPYNLLSSLPPSHTWYSVLDLKDAFFCLKLHPNSQPLFAFEWRDPEKGNTGQLTWTRLPQGFKNSPTLFNEALHRDLASFRALNPQVVMLQYVDDLLVAAPTYRDCKEGTRRLLQELSKLGYRVSAKKAQLCREEVTYLGYLLKGGKRWLTPARKATVMKIPTPTTPRQVREFLGKAGFCRLFIPGFASLAAPLYPLTRPKVPFTWTEAHQEAFGRIKEALLSAPALALPDLTKPFALYVDEKEGVARGVLTQTLGPWRRPVAYLSKKLDPVASGWPTCLKAIAAVALLLKDADKLTLGQNVLVIAPHNLESIVRQPPDRWMTNARMTHYQSLLLNERVSFAPPAILNPATLLPVESDDTPIHICSEILAEETGTRPDLRDQPLPGVPAWYTDGSSFIMDGRRQAGAAIVDNKRTVWASNLPEGTSAQKAELIALTQALRLAEGKSINIYTDSRYAFATAHVHGAIYKQRGWLTSAGKDIKNKEEILALLEAIHLPKRVAIIHCPGHQRGTDPVATGNRKADEAAKQAAQSTRILTETTKNAGKRTADGSEFEKRTADGSEFESPKKKAKVE

SEQ ID NO: 1779 - protein, 2216 aa, synthetic construct
MPAAKRVKLDGGDKKYSIGLDIGTNSVGWAVITDEYKVPSKKFKVLGNTDRHSIKKNLIGALLFDSGETAEATRLKRTARRRYTRRKNRICYLQEIFSNEMAKVDDSFFHRLEESFLVEEDKKHERHPIFGNIVDEVAYHEKYPTIYHLRKKLVDSTDKADLRLIYLALAHMIKFRGHFLIEGDLNPDNSDVDKLFIQLVQTYNQLFEENPINASGVDAKAILSARLSKSRRLENLIAQLPGEKKNGLFGNLIALSLGLTPNFKSNFDLAEDAKLQLSKDTYDDDLDNLLAQIGDQYADLFLAAKNLSDAILLSDILRVNTEITKAPLSASMIKRYDEHHQDLTLLKALVRQQLPEKYKEIFFDQSKNGYAGYIDGGASQEEFYKFIKPILEKMDGTEELLVKLNREDLLRKQRTFDNGSIPHQIHLGELHAILRRQEDFYPFLKDNREKIEKILTFRIPYYVGPLARGNSRFAWMTRKSEETITPWNFEEVVDKGASAQSFIERMTNFDKNLPNEKVLPKHSLLYEYFTVYNELTKVKYVTEGMRKPAFLSGEQKKAIVDLLFKTNRKVTVKQLKEDYFKKIECFDSVEISGVEDRFNASLGTYHDLLKIIKDKDFLDNEENEDILEDIVLTLTLFEDREMIEERLKTYAHLFDDKVMKQLKRRRYTGWGRLSRKLINGIRDKQSGKTILDFLKSDGFANRNFMQLIHDDSLTFKEDIQKAQVSGQGDSLHEHIANLAGSPAIKKGILQTVKVVDELVKVMGRHKPENIVIEMARENQTTQKGQKNSRERMKRIEEGIKELGSQILKEHPVENTQLQNEKLYLYYLQNGRDMYVDQELDINRLSDYDVDHIVPQSFLKDDSIDNKVLTRSDKARGKSDNVPSEEVVKKMKNYWRQLLNAKLITQRKFDNLTKAERGGLSELDKAGFIKRQLVETRQITKHVAQILDSRMNTKYDENDKLIREVKVITLKSKLVSDFRKDFQFYKVREINNYHHAHDAYLNAVVGTALIKKYPKLESEFVYGDYKVYDVRKMIAKSEQEIGKATAKYFFYSNIMNFFKTEITLANGEIRKRPLIETNGETGEIVWDKGRDFATVRKVLSMPQVNIVKKTEVQTGGFSKESILPKRNSDKLIARKKDWDPKKYGGFDSPTVAYSVLVVAKVEKGKSKKLKSVKELLGITIMERSSFEKNPIDFLEAKGYKEVKKDLIIKLPKYSLFELENGRKRMLASAGELQKGNELALPSKYVNFLYLASHYEKLKGSPEDNEQKQLFVEQHKHYLDEIIEQISEFSKRVILADANLDKVLSAYNKHRDKPIREQAENIIHLFTLTNLGAPAAFKYFDTTIDRKRYTSTKEVLDATLIHQSITGLYETRIDLSQLGGDGGGGSPAPGGGGGTLGDQGSRGSDPLPEPRVTLTVEGIPTEFLVNTGAEHSVLTKPMGKMGSKRTVVAGATGSKVYPWTTKRLLKIGQKQVTHSFLVIPECPAPLLGRDLLTKLKAQIQFSTEGPQVTWEDRPAMCLVLNLEEEYRLHEKPVPPSIDPSWLQLFPMVWAEKAGMGLANQVPPVVVELKSDASPVAVRQYPMSKEAREGIRPHIQRFLDLGILVPCQSPWNTPLLPVKKPGTNDYRPVQDLREVNKRVQDIHPTVPNPYNLLSSLPPSHTWYSVLDLKDAFFCLKLHPNSQPLFAFEWRDPEKGNTGQLTWTRLPQGFKNSPTLFNEALHRDLASFRALNPQVVMLQYVDDLLVAAPTYRDCKEGTRRLLQELSKLGYRVSAKKAQLCREEVTYLGYLLKGGKRWLTPARKATVMKIPTPTTPRQVREFLGKAGFCRLFIPGFASLAAPLYPLTRPKVPFTWTEAHQEAFGRIKEALLSAPALALPDLTKPFALYVDEKEGVARGVLTQTLGPWRRPVAYLSKKLDPVASGWPTCLKAIAAVALLLKDADKLTLGQNVLVIAPHNLESIVRQPPDRWMTNARMTHYQSLLLNERVSFAPPAILNPATLLPVESDDTPIHICSEILAEETGTRPDLRDQPLPGVPAWYTDGSSFIMDGRRQAGAAIVDNKRTVWASNLPEGTSAQKAELIALTQALRLAEGKSINIYTDSRYAFATAHVHGAIYKQRGWLTSAGKDIKNKEEILALLEAIHLPKRVAIIHCPGHQRGTDPVATGNRKADEAAKQAAQSTRILTETTKNAGKRTADGSEFEKRTADGSEFESPKKKAKVE

SEQ ID NO: 1780 - protein, 2213 aa, synthetic construct
MPAAKRVKLDGGDKKYSIGLDIGTNSVGWAVITDEYKVPSKKFKVLGNTDRHSIKKNLIGALLFDSGETAEATRLKRTARRRYTRRKNRICYLQEIFSNEMAKVDDSFFHRLEESFLVEEDKKHERHPIFGNIVDEVAYHEKYPTIYHLRKKLVDSTDKADLRLIYLALAHMIKFRGHFLIEGDLNPDNSDVDKLFIQLVQTYNQLFEENPINASGVDAKAILSARLSKSRRLENLIAQLPGEKKNGLFGNLIALSLGLTPNFKSNFDLAEDAKLQLSKDTYDDDLDNLLAQIGDQYADLFLAAKNLSDAILLSDILRVNTEITKAPLSASMIKRYDEHHQDLTLLKALVRQQLPEKYKEIFFDQSKNGYAGYIDGGASQEEFYKFIKPILEKMDGTEELLVKLNREDLLRKQRTFDNGSIPHQIHLGELHAILRRQEDFYPFLKDNREKIEKILTFRIPYYVGPLARGNSRFAWMTRKSEETITPWNFEEVVDKGASAQSFIERMTNFDKNLPNEKVLPKHSLLYEYFTVYNELTKVKYVTEGMRKPAFLSGEQKKAIVDLLFKTNRKVTVKQLKEDYFKKIECFDSVEISGVEDRFNASLGTYHDLLKIIKDKDFLDNEENEDILEDIVLTLTLFEDREMIEERLKTYAHLFDDKVMKQLKRRRYTGWGRLSRKLINGIRDKQSGKTILDFLKSDGFANRNFMQLIHDDSLTFKEDIQKAQVSGQGDSLHEHIANLAGSPAIKKGILQTVKVVDELVKVMGRHKPENIVIEMARENQTTQKGQKNSRERMKRIEEGIKELGSQILKEHPVENTQLQNEKLYLYYLQNGRDMYVDQELDINRLSDYDVDHIVPQSFLKDDSIDNKVLTRSDKARGKSDNVPSEEVVKKMKNYWRQLLNAKLITQRKFDNLTKAERGGLSELDKAGFIKRQLVETRQITKHVAQILDSRMNTKYDENDKLIREVKVITLKSKLVSDFRKDFQFYKVREINNYHHAHDAYLNAVVGTALIKKYPKLESEFVYGDYKVYDVRKMIAKSEQEIGKATAKYFFYSNIMNFFKTEITLANGEIRKRPLIETNGETGEIVWDKGRDFATVRKVLSMPQVNIVKKTEVQTGGFSKESILPKRNSDKLIARKKDWDPKKYGGFDSPTVAYSVLVVAKVEKGKSKKLKSVKELLGITIMERSSFEKNPIDFLEAKGYKEVKKDLIIKLPKYSLFELENGRKRMLASAGELQKGNELALPSKYVNFLYLASHYEKLKGSPEDNEQKQLFVEQHKHYLDEIIEQISEFSKRVILADANLDKVLSAYNKHRDKPIREQAENIIHLFTLTNLGAPAAFKYFDTTIDRKRYTSTKEVLDATLIHQSITGLYETRIDLSQLGGDGGPAPGSSGGTLGDQGSRGSDPLPEPRVTLTVEGIPTEFLVNTGAEHSVLTKPMGKMGSKRTVVAGATGSKVYPWTTKRLLKIGQKQVTHSFLVIPECPAPLLGRDLLTKLKAQIQFSTEGPQVTWEDRPAMCLVLNLEEEYRLHEKPVPPSIDPSWLQLFPMVWAEKAGMGLANQVPPVVVELKSDASPVAVRQYPMSKEAREGIRPHIQRFLDLGILVPCQSPWNTPLLPVKKPGTNDYRPVQDLREVNKRVQDIHPTVPNPYNLLSSLPPSHTWYSVLDLKDAFFCLKLHPNSQPLFAFEWRDPEKGNTGQLTWTRLPQGFKNSPTLFNEALHRDLASFRALNPQVVMLQYVDDLLVAAPTYRDCKEGTRRLLQELSKLGYRVSAKKAQLCREEVTYLGYLLKGGKRWLTPARKATVMKIPTPTTPRQVREFLGKAGFCRLFIPGFASLAAPLYPLTRPKVPFTWTEAHQEAFGRIKEALLSAPALALPDLTKPFALYVDEKEGVARGVLTQTLGPWRRPVAYLSKKLDPVASGWPTCLKAIAAVALLLKDADKLTLGQNVLVIAPHNLESIVRQPPDRWMTNARMTHYQSLLLNERVSFAPPAILNPATLLPVESDDTPIHICSEILAEETGTRPDLRDQPLPGVPAWYTDGSSFIMDGRRQAGAAIVDNKRTVWASNLPEGTSAQKAELIALTQALRLAEGKSINIYTDSRYAFATAHVHGAIYKQRGWLTSAGKDIKNKEEILALLEAIHLPKRVAIIHCPGHQRGTDPVATGNRKADEAAKQAAQSTRILTETTKNAGKRTADGSEFEKRTADGSEFESPKKKAKVE

SEQ ID NO: 1781 - protein, 2222 aa, synthetic construct
MPAAKRVKLDGGDKKYSIGLDIGTNSVGWAVITDEYKVPSKKFKVLGNTDRHSIKKNLIGALLFDSGETAEATRLKRTARRRYTRRKNRICYLQEIFSNEMAKVDDSFFHRLEESFLVEEDKKHERHPIFGNIVDEVAYHEKYPTIYHLRKKLVDSTDKADLRLIYLALAHMIKFRGHFLIEGDLNPDNSDVDKLFIQLVQTYNQLFEENPINASGVDAKAILSARLSKSRRLENLIAQLPGEKKNGLFGNLIALSLGLTPNFKSNFDLAEDAKLQLSKDTYDDDLDNLLAQIGDQYADLFLAAKNLSDAILLSDILRVNTEITKAPLSASMIKRYDEHHQDLTLLKALVRQQLPEKYKEIFFDQSKNGYAGYIDGGASQEEFYKFIKPILEKMDGTEELLVKLNREDLLRKQRTFDNGSIPHQIHLGELHAILRRQEDFYPFLKDNREKIEKILTFRIPYYVGPLARGNSRFAWMTRKSEETITPWNFEEVVDKGASAQSFIERMTNFDKNLPNEKVLPKHSLLYEYFTVYNELTKVKYVTEGMRKPAFLSGEQKKAIVDLLFKTNRKVTVKQLKEDYFKKIECFDSVEISGVEDRFNASLGTYHDLLKIIKDKDFLDNEENEDILEDIVLTLTLFEDREMIEERLKTYAHLFDDKVMKQLKRRRYTGWGRLSRKLINGIRDKQSGKTILDFLKSDGFANRNFMQLIHDDSLTFKEDIQKAQVSGQGDSLHEHIANLAGSPAIKKGILQTVKVVDELVKVMGRHKPENIVIEMARENQTTQKGQKNSRERMKRIEEGIKELGSQILKEHPVENTQLQNEKLYLYYLQNGRDMYVDQELDINRLSDYDVDHIVPQSFLKDDSIDNKVLTRSDKARGKSDNVPSEEVVKKMKNYWRQLLNAKLITQRKFDNLTKAERGGLSELDKAGFIKRQLVETRQITKHVAQILDSRMNTKYDENDKLIREVKVITLKSKLVSDFRKDFQFYKVREINNYHHAHDAYLNAVVGTALIKKYPKLESEFVYGDYKVYDVRKMIAKSEQEIGKATAKYFFYSNIMNFFKTEITLANGEIRKRPLIETNGETGEIVWDKGRDFATVRKVLSMPQVNIVKKTEVQTGGFSKESILPKRNSDKLIARKKDWDPKKYGGFDSPTVAYSVLVVAKVEKGKSKKLKSVKELLGITIMERSSFEKNPIDFLEAKGYKEVKKDLIIKLPKYSLFELENGRKRMLASAGELQKGNELALPSKYVNFLYLASHYEKLKGSPEDNEQKQLFVEQHKHYLDEIIEQISEFSKRVILADANLDKVLSAYNKHRDKPIREQAENIIHLFTLTNLGAPAAFKYFDTTIDRKRYTSTKEVLDATLIHQSITGLYETRIDLSQLGGDGGEAAAKGGGGSEAAAKGGTLGDQGSRGSDPLPEPRVTLTVEGIPTEFLVNTGAEHSVLTKPMGKMGSKRTVVAGATGSKVYPWTTKRLLKIGQKQVTHSFLVIPECPAPLLGRDLLTKLKAQIQFSTEGPQVTWEDRPAMCLVLNLEEEYRLHEKPVPPSIDPSWLQLFPMVWAEKAGMGLANQVPPVVVELKSDASPVAVRQYPMSKEAREGIRPHIQRFLDLGILVPCQSPWNTPLLPVKKPGTNDYRPVQDLREVNKRVQDIHPTVPNPYNLLSSLPPSHTWYSVLDLKDAFFCLKLHPNSQPLFAFEWRDPEKGNTGQLTWTRLPQGFKNSPTLFNEALHRDLASFRALNPQVVMLQYVDDLLVAAPTYRDCKEGTRRLLQELSKLGYRVSAKKAQLCREEVTYLGYLLKGGKRWLTPARKATVMKIPTPTTPRQVREFLGKAGFCRLFIPGFASLAAPLYPLTRPKVPFTWTEAHQEAFGRIKEALLSAPALALPDLTKPFALYVDEKEGVARGVLTQTLGPWRRPVAYLSKKLDPVASGWPTCLKAIAAVALLLKDADKLTLGQNVLVIAPHNLESIVRQPPDRWMTNARMTHYQSLLLNERVSFAPPAILNPATLLPVESDDTPIHICSEILAEETGTRPDLRDQPLPGVPAWYTDGSSFIMDGRRQAGAAIVDNKRTVWASNLPEGTSAQKAELIALTQALRLAEGKSINIYTDSRYAFATAHVHGAIYKQRGWLTSAGKDIKNKEEILALLEAIHLPKRVAIIHCPGHQRGTDPVATGNRKADEAAKQAAQSTRILTETTKNAGKRTADGSEFEKRTADGSEFESPKKKAKVE

SEQ ID NO: 1782 - protein, 2219 aa, synthetic construct
MPAAKRVKLDGGDKKYSIGLDIGTNSVGWAVITDEYKVPSKKFKVLGNTDRHSIKKNLIGALLFDSGETAEATRLKRTARRRYTRRKNRICYLQEIFSNEMAKVDDSFFHRLEESFLVEEDKKHERHPIFGNIVDEVAYHEKYPTIYHLRKKLVDSTDKADLRLIYLALAHMIKFRGHFLIEGDLNPDNSDVDKLFIQLVQTYNQLFEENPINASGVDAKAILSARLSKSRRLENLIAQLPGEKKNGLFGNLIALSLGLTPNFKSNFDLAEDAKLQLSKDTYDDDLDNLLAQIGDQYADLFLAAKNLSDAILLSDILRVNTEITKAPLSASMIKRYDEHHQDLTLLKALVRQQLPEKYKEIFFDQSKNGYAGYIDGGASQEEFYKFIKPILEKMDGTEELLVKLNREDLLRKQRTFDNGSIPHQIHLGELHAILRRQEDFYPFLKDNREKIEKILTFRIPYYVGPLARGNSRFAWMTRKSEETITPWNFEEVVDKGASAQSFIERMTNFDKNLPNEKVLPKHSLLYEYFTVYNELTKVKYVTEGMRKPAFLSGEQKKAIVDLLFKTNRKVTVKQLKEDYFKKIECFDSVEISGVEDRFNASLGTYHDLLKIIKDKDFLDNEENEDILEDIVLTLTLFEDREMIEERLKTYAHLFDDKVMKQLKRRRYTGWGRLSRKLINGIRDKQSGKTILDFLKSDGFANRNFMQLIHDDSLTFKEDIQKAQVSGQGDSLHEHIANLAGSPAIKKGILQTVKVVDELVKVMGRHKPENIVIEMARENQTTQKGQKNSRERMKRIEEGIKELGSQILKEHPVENTQLQNEKLYLYYLQNGRDMYVDQELDINRLSDYDVDHIVPQSFLKDDSIDNKVLTRSDKARGKSDNVPSEEVVKKMKNYWRQLLNAKLITQRKFDNLTKAERGGLSELDKAGFIKRQLVETRQITKHVAQILDSRMNTKYDENDKLIREVKVITLKSKLVSDFRKDFQFYKVREINNYHHAHDAYLNAVVGTALIKKYPKLESEFVYGDYKVYDVRKMIAKSEQEIGKATAKYFFYSNIMNFFKTEITLANGEIRKRPLIETNGETGEIVWDKGRDFATVRKVLSMPQVNIVKKTEVQTGGFSKESILPKRNSDKLIARKKDWDPKKYGGFDSPTVAYSVLVVAKVEKGKSKKLKSVKELLGITIMERSSFEKNPIDFLEAKGYKEVKKDLIIKLPKYSLFELENGRKRMLASAGELQKGNELALPSKYVNFLYLASHYEKLKGSPEDNEQKQLFVEQHKHYLDEIIEQISEFSKRVILADANLDKVLSAYNKHRDKPIREQAENIIHLFTLTNLGAPAAFKYFDTTIDRKRYTSTKEVLDATLIHQSITGLYETRIDLSQLGGDGGGSAGSAAGSGEFGGTLGDQGSRGSDPLPEPRVTLTVEGIPTEFLVNTGAEHSVLTKPMGKMGSKRTVVAGATGSKVYPWTTKRLLKIGQKQVTHSFLVIPECPAPLLGRDLLTKLKAQIQFSTEGPQVTWEDRPAMCLVLNLEEEYRLHEKPVPPSIDPSWLQLFPMVWAEKAGMGLANQVPPVVVELKSDASPVAVRQYPMSKEAREGIRPHIQRFLDLGILVPCQSPWNTPLLPVKKPGTNDYRPVQDLREVNKRVQDIHPTVPNPYNLLSSLPPSHTWYSVLDLKDAFFCLKLHPNSQPLFAFEWRDPEKGNTGQLTWTRLPQGFKNSPTLFNEALHRDLASFRALNPQVVMLQYVDDLLVAAPTYRDCKEGTRRLLQELSKLGYRVSAKKAQLCREEVTYLGYLLKGGKRWLTPARKATVMKIPTPTTPRQVREFLGKAGFCRLFIPGFASLAAPLYPLTRPKVPFTWTEAHQEAFGRIKEALLSAPALALPDLTKPFALYVDEKEGVARGVLTQTLGPWRRPVAYLSKKLDPVASGWPTCLKAIAAVALLLKDADKLTLGQNVLVIAPHNLESIVRQPPDRWMTNARMTHYQSLLLNERVSFAPPAILNPATLLPVESDDTPIHICSEILAEETGTRPDLRDQPLPGVPAWYTDGSSFIMDGRRQAGAAIVDNKRTVWASNLPEGTSAQKAELIALTQALRLAEGKSINIYTDSRYAFATAHVHGAIYKQRGWLTSAGKDIKNKEEILALLEAIHLPKRVAIIHCPGHQRGTDPVATGNRKADEAAKQAAQSTRILTETTKNAGKRTADGSEFEKRTADGSEFESPKKKAKVE

SEQ ID NO: 1783 - protein, 2218 aa, synthetic construct
MPAAKRVKLDGGDKKYSIGLDIGTNSVGWAVITDEYKVPSKKFKVLGNTDRHSIKKNLIGALLFDSGETAEATRLKRTARRRYTRRKNRICYLQEIFSNEMAKVDDSFFHRLEESFLVEEDKKHERHPIFGNIVDEVAYHEKYPTIYHLRKKLVDSTDKADLRLIYLALAHMIKFRGHFLIEGDLNPDNSDVDKLFIQLVQTYNQLFEENPINASGVDAKAILSARLSKSRRLENLIAQLPGEKKNGLFGNLIALSLGLTPNFKSNFDLAEDAKLQLSKDTYDDDLDNLLAQIGDQYADLFLAAKNLSDAILLSDILRVNTEITKAPLSASMIKRYDEHHQDLTLLKALVRQQLPEKYKEIFFDQSKNGYAGYIDGGASQEEFYKFIKPILEKMDGTEELLVKLNREDLLRKQRTFDNGSIPHQIHLGELHAILRRQEDFYPFLKDNREKIEKILTFRIPYYVGPLARGNSRFAWMTRKSEETITPWNFEEVVDKGASAQSFIERMTNFDKNLPNEKVLPKHSLLYEYFTVYNELTKVKYVTEGMRKPAFLSGEQKKAIVDLLFKTNRKVTVKQLKEDYFKKIECFDSVEISGVEDRFNASLGTYHDLLKIIKDKDFLDNEENEDILEDIVLTLTLFEDREMIEERLKTYAHLFDDKVMKQLKRRRYTGWGRLSRKLINGIRDKQSGKTILDFLKSDGFANRNFMQLIHDDSLTFKEDIQKAQVSGQGDSLHEHIANLAGSPAIKKGILQTVKVVDELVKVMGRHKPENIVIEMARENQTTQKGQKNSRERMKRIEEGIKELGSQILKEHPVENTQLQNEKLYLYYLQNGRDMYVDQELDINRLSDYDVDHIVPQSFLKDDSIDNKVLTRSDKARGKSDNVPSEEVVKKMKNYWRQLLNAKLITQRKFDNLTKAERGGLSELDKAGFIKRQLVETRQITKHVAQILDSRMNTKYDENDKLIREVKVITLKSKLVSDFRKDFQFYKVREINNYHHAHDAYLNAVVGTALIKKYPKLESEFVYGDYKVYDVRKMIAKSEQEIGKATAKYFFYSNIMNFFKTEITLANGEIRKRPLIETNGETGEIVWDKGRDFATVRKVLSMPQVNIVKKTEVQTGGFSKESILPKRNSDKLIARKKDWDPKKYGGFDSPTVAYSVLVVAKVEKGKSKKLKSVKELLGITIMERSSFEKNPIDFLEAKGYKEVKKDLIIKLPKYSLFELENGRKRMLASAGELQKGNELALPSKYVNFLYLASHYEKLKGSPEDNEQKQLFVEQHKHYLDEIIEQISEFSKRVILADANLDKVLSAYNKHRDKPIREQAENIIHLFTLTNLGAPAAFKYFDTTIDRKRYTSTKEVLDATLIHQSITGLYETRIDLSQLGGDGGPAPAPAPAPAPGGTLGDQGSRGSDPLPEPRVTLTVEGIPTEFLVNTGAEHSVLTKPMGKMGSKRTVVAGATGSKVYPWTTKRLLKIGQKQVTHSFLVIPECPAPLLGRDLLTKLKAQIQFSTEGPQVTWEDRPAMCLVLNLEEEYRLHEKPVPPSIDPSWLQLFPMVWAEKAGMGLANQVPPVVVELKSDASPVAVRQYPMSKEAREGIRPHIQRFLDLGILVPCQSPWNTPLLPVKKPGTNDYRPVQDLREVNKRVQDIHPTVPNPYNLLSSLPPSHTWYSVLDLKDAFFCLKLHPNSQPLFAFEWRDPEKGNTGQLTWTRLPQGFKNSPTLFNEALHRDLASFRALNPQVVMLQYVDDLLVAAPTYRDCKEGTRRLLQELSKLGYRVSAKKAQLCREEVTYLGYLLKGGKRWLTPARKATVMKIPTPTTPRQVREFLGKAGFCRLFIPGFASLAAPLYPLTRPKVPFTWTEAHQEAFGRIKEALLSAPALALPDLTKPFALYVDEKEGVARGVLTQTLGPWRRPVAYLSKKLDPVASGWPTCLKAIAAVALLLKDADKLTLGQNVLVIAPHNLESIVRQPPDRWMTNARMTHYQSLLLNERVSFAPPAILNPATLLPVESDDTPIHICSEILAEETGTRPDLRDQPLPGVPAWYTDGSSFIMDGRRQAGAAIVDNKRTVWASNLPEGTSAQKAELIALTQALRLAEGKSINIYTDSRYAFATAHVHGAIYKQRGWLTSAGKDIKNKEEILALLEAIHLPKRVAIIHCPGHQRGTDPVATGNRKADEAAKQAAQSTRILTETTKNAGKRTADGSEFEKRTADGSEFESPKKKAKVE

SEQ ID NO: 1784 - protein, 2253 aa, synthetic construct
MPAAKRVKLDGGDKKYSIGLDIGTNSVGWAVITDEYKVPSKKFKVLGNTDRHSIKKNLIGALLFDSGETAEATRLKRTARRRYTRRKNRICYLQEIFSNEMAKVDDSFFHRLEESFLVEEDKKHERHPIFGNIVDEVAYHEKYPTIYHLRKKLVDSTDKADLRLIYLALAHMIKFRGHFLIEGDLNPDNSDVDKLFIQLVQTYNQLFEENPINASGVDAKAILSARLSKSRRLENLIAQLPGEKKNGLFGNLIALSLGLTPNFKSNFDLAEDAKLQLSKDTYDDDLDNLLAQIGDQYADLFLAAKNLSDAILLSDILRVNTEITKAPLSASMIKRYDEHHQDLTLLKALVRQQLPEKYKEIFFDQSKNGYAGYIDGGASQEEFYKFIKPILEKMDGTEELLVKLNREDLLRKQRTFDNGSIPHQIHLGELHAILRRQEDFYPFLKDNREKIEKILTFRIPYYVGPLARGNSRFAWMTRKSEETITPWNFEEVVDKGASAQSFIERMTNFDKNLPNEKVLPKHSLLYEYFTVYNELTKVKYVTEGMRKPAFLSGEQKKAIVDLLFKTNRKVTVKQLKEDYFKKIECFDSVEISGVEDRFNASLGTYHDLLKIIKDKDFLDNEENEDILEDIVLTLTLFEDREMIEERLKTYAHLFDDKVMKQLKRRRYTGWGRLSRKLINGIRDKQSGKTILDFLKSDGFANRNFMQLIHDDSLTFKEDIQKAQVSGQGDSLHEHIANLAGSPAIKKGILQTVKVVDELVKVMGRHKPENIVIEMARENQTTQKGQKNSRERMKRIEEGIKELGSQILKEHPVENTQLQNEKLYLYYLQNGRDMYVDQELDINRLSDYDVDHIVPQSFLKDDSIDNKVLTRSDKARGKSDNVPSEEVVKKMKNYWRQLLNAKLITQRKFDNLTKAERGGLSELDKAGFIKRQLVETRQITKHVAQILDSRMNTKYDENDKLIREVKVITLKSKLVSDFRKDFQFYKVREINNYHHAHDAYLNAVVGTALIKKYPKLESEFVYGDYKVYDVRKMIAKSEQEIGKATAKYFFYSNIMNFFKTEITLANGEIRKRPLIETNGETGEIVWDKGRDFATVRKVLSMPQVNIVKKTEVQTGGFSKESILPKRNSDKLIARKKDWDPKKYGGFDSPTVAYSVLVVAKVEKGKSKKLKSVKELLGITIMERSSFEKNPIDFLEAKGYKEVKKDLIIKLPKYSLFELENGRKRMLASAGELQKGNELALPSKYVNFLYLASHYEKLKGSPEDNEQKQLFVEQHKHYLDEIIEQISEFSKRVILADANLDKVLSAYNKHRDKPIREQAENIIHLFTLTNLGAPAAFKYFDTTIDRKRYTSTKEVLDATLIHQSITGLYETRIDLSQLGGDGGAEAAAKEAAAKEAAAKEAAAKALEAEAAAKEAAAKEAAAKEAAAKAGGTLGDQGSRGSDPLPEPRVTLTVEGIPTEFLVNTGAEHSVLTKPMGKMGSKRTVVAGATGSKVYPWTTKRLLKIGQKQVTHSFLVIPECPAPLLGRDLLTKLKAQIQFSTEGPQVTWEDRPAMCLVLNLEEEYRLHEKPVPPSIDPSWLQLFPMVWAEKAGMGLANQVPPVVVELKSDASPVAVRQYPMSKEAREGIRPHIQRFLDLGILVPCQSPWNTPLLPVKKPGTNDYRPVQDLREVNKRVQDIHPTVPNPYNLLSSLPPSHTWYSVLDLKDAFFCLKLHPNSQPLFAFEWRDPEKGNTGQLTWTRLPQGFKNSPTLFNEALHRDLASFRALNPQVVMLQYVDDLLVAAPTYRDCKEGTRRLLQELSKLGYRVSAKKAQLCREEVTYLGYLLKGGKRWLTPARKATVMKIPTPTTPRQVREFLGKAGFCRLFIPGFASLAAPLYPLTRPKVPFTWTEAHQEAFGRIKEALLSAPALALPDLTKPFALYVDEKEGVARGVLTQTLGPWRRPVAYLSKKLDPVASGWPTCLKAIAAVALLLKDADKLTLGQNVLVIAPHNLESIVRQPPDRWMTNARMTHYQSLLLNERVSFAPPAILNPATLLPVESDDTPIHICSEILAEETGTRPDLRDQPLPGVPAWYTDGSSFIMDGRRQAGAAIVDNKRTVWASNLPEGTSAQKAELIALTQALRLAEGKSINIYTDSRYAFATAHVHGAIYKQRGWLTSAGKDIKNKEEILALLEAIHLPKRVAIIHCPGHQRGTDPVATGNRKADEAAKQAAQSTRILTETTKNAGKRTADGSEFEKRTADGSEFESPKKKAKVE

SEQ ID NO: 1785 - protein, 2216 aa, synthetic construct
MPAAKRVKLDGGDKKYSIGLDIGTNSVGWAVITDEYKVPSKKFKVLGNTDRHSIKKNLIGALLFDSGETAEATRLKRTARRRYTRRKNRICYLQEIFSNEMAKVDDSFFHRLEESFLVEEDKKHERHPIFGNIVDEVAYHEKYPTIYHLRKKLVDSTDKADLRLIYLALAHMIKFRGHFLIEGDLNPDNSDVDKLFIQLVQTYNQLFEENPINASGVDAKAILSARLSKSRRLENLIAQLPGEKKNGLFGNLIALSLGLTPNFKSNFDLAEDAKLQLSKDTYDDDLDNLLAQIGDQYADLFLAAKNLSDAILLSDILRVNTEITKAPLSASMIKRYDEHHQDLTLLKALVRQQLPEKYKEIFFDQSKNGYAGYIDGGASQEEFYKFIKPILEKMDGTEELLVKLNREDLLRKQRTFDNGSIPHQIHLGELHAILRRQEDFYPFLKDNREKIEKILTFRIPYYVGPLARGNSRFAWMTRKSEETITPWNFEEVVDKGASAQSFIERMTNFDKNLPNEKVLPKHSLLYEYFTVYNELTKVKYVTEGMRKPAFLSGEQKKAIVDLLFKTNRKVTVKQLKEDYFKKIECFDSVEISGVEDRFNASLGTYHDLLKIIKDKDFLDNEENEDILEDIVLTLTLFEDREMIEERLKTYAHLFDDKVMKQLKRRRYTGWGRLSRKLINGIRDKQSGKTILDFLKSDGFANRNFMQLIHDDSLTFKEDIQKAQVSGQGDSLHEHIANLAGSPAIKKGILQTVKVVDELVKVMGRHKPENIVIEMARENQTTQKGQKNSRERMKRIEEGIKELGSQILKEHPVENTQLQNEKLYLYYLQNGRDMYVDQELDINRLSDYDVDHIVPQSFLKDDSIDNKVLTRSDKARGKSDNVPSEEVVKKMKNYWRQLLNAKLITQRKFDNLTKAERGGLSELDKAGFIKRQLVETRQITKHVAQILDSRMNTKYDENDKLIREVKVITLKSKLVSDFRKDFQFYKVREINNYHHAHDAYLNAVVGTALIKKYPKLESEFVYGDYKVYDVRKMIAKSEQEIGKATAKYFFYSNIMNFFKTEITLANGEIRKRPLIETNGETGEIVWDKGRDFATVRKVLSMPQVNIVKKTEVQTGGFSKESILPKRNSDKLIARKKDWDPKKYGGFDSPTVAYSVLVVAKVEKGKSKKLKSVKELLGITIMERSSFEKNPIDFLEAKGYKEVKKDLIIKLPKYSLFELENGRKRMLASAGELQKGNELALPSKYVNFLYLASHYEKLKGSPEDNEQKQLFVEQHKHYLDEIIEQISEFSKRVILADANLDKVLSAYNKHRDKPIREQAENIIHLFTLTNLGAPAAFKYFDTTIDRKRYTSTKEVLDATLIHQSITGLYETRIDLSQLGGDGGGGSGSSGGGGGTLGDQGSRGSDPLPEPRVTLTVEGIPTEFLVNTGAEHSVLTKPMGKMGSKRTVVAGATGSKVYPWTTKRLLKIGQKQVTHSFLVIPECPAPLLGRDLLTKLKAQIQFSTEGPQVTWEDRPAMCLVLNLEEEYRLHEKPVPPSIDPSWLQLFPMVWAEKAGMGLANQVPPVVVELKSDASPVAVRQYPMSKEAREGIRPHIQRFLDLGILVPCQSPWNTPLLPVKKPGTNDYRPVQDLREVNKRVQDIHPTVPNPYNLLSSLPPSHTWYSVLDLKDAFFCLKLHPNSQPLFAFEWRDPEKGNTGQLTWTRLPQGFKNSPTLFNEALHRDLASFRALNPQVVMLQYVDDLLVAAPTYRDCKEGTRRLLQELSKLGYRVSAKKAQLCREEVTYLGYLLKGGKRWLTPARKATVMKIPTPTTPRQVREFLGKAGFCRLFIPGFASLAAPLYPLTRPKVPFTWTEAHQEAFGRIKEALLSAPALALPDLTKPFALYVDEKEGVARGVLTQTLGPWRRPVAYLSKKLDPVASGWPTCLKAIAAVALLLKDADKLTLGQNVLVIAPHNLESIVRQPPDRWMTNARMTHYQSLLLNERVSFAPPAILNPATLLPVESDDTPIHICSEILAEETGTRPDLRDQPLPGVPAWYTDGSSFIMDGRRQAGAAIVDNKRTVWASNLPEGTSAQKAELIALTQALRLAEGKSINIYTDSRYAFATAHVHGAIYKQRGWLTSAGKDIKNKEEILALLEAIHLPKRVAIIHCPGHQRGTDPVATGNRKADEAAKQAAQSTRILTETTKNAGKRTADGSEFEKRTADGSEFESPKKKAKVE

SEQ ID NO: 1786 - protein, 2218 aa, synthetic construct
MPAAKRVKLDGGDKKYSIGLDIGTNSVGWAVITDEYKVPSKKFKVLGNTDRHSIKKNLIGALLFDSGETAEATRLKRTARRRYTRRKNRICYLQEIFSNEMAKVDDSFFHRLEESFLVEEDKKHERHPIFGNIVDEVAYHEKYPTIYHLRKKLVDSTDKADLRLIYLALAHMIKFRGHFLIEGDLNPDNSDVDKLFIQLVQTYNQLFEENPINASGVDAKAILSARLSKSRRLENLIAQLPGEKKNGLFGNLIALSLGLTPNFKSNFDLAEDAKLQLSKDTYDDDLDNLLAQIGDQYADLFLAAKNLSDAILLSDILRVNTEITKAPLSASMIKRYDEHHQDLTLLKALVRQQLPEKYKEIFFDQSKNGYAGYIDGGASQEEFYKFIKPILEKMDGTEELLVKLNREDLLRKQRTFDNGSIPHQIHLGELHAILRRQEDFYPFLKDNREKIEKILTFRIPYYVGPLARGNSRFAWMTRKSEETITPWNFEEVVDKGASAQSFIERMTNFDKNLPNEKVLPKHSLLYEYFTVYNELTKVKYVTEGMRKPAFLSGEQKKAIVDLLFKTNRKVTVKQLKEDYFKKIECFDSVEISGVEDRFNASLGTYHDLLKIIKDKDFLDNEENEDILEDIVLTLTLFEDREMIEERLKTYAHLFDDKVMKQLKRRRYTGWGRLSRKLINGIRDKQSGKTILDFLKSDGFANRNFMQLIHDDSLTFKEDIQKAQVSGQGDSLHEHIANLAGSPAIKKGILQTVKVVDELVKVMGRHKPENIVIEMARENQTTQKGQKNSRERMKRIEEGIKELGSQILKEHPVENTQLQNEKLYLYYLQNGRDMYVDQELDINRLSDYDVDHIVPQSFLKDDSIDNKVLTRSDKARGKSDNVPSEEVVKKMKNYWRQLLNAKLITQRKFDNLTKAERGGLSELDKAGFIKRQLVETRQITKHVAQILDSRMNTKYDENDKLIREVKVITLKSKLVSDFRKDFQFYKVREINNYHHAHDAYLNAVVGTALIKKYPKLESEFVYGDYKVYDVRKMIAKSEQEIGKATAKYFFYSNIMNFFKTEITLANGEIRKRPLIETNGETGEIVWDKGRDFATVRKVLSMPQVNIVKKTEVQTGGFSKESILPKRNSDKLIARKKDWDPKKYGGFDSPTVAYSVLVVAKVEKGKSKKLKSVKELLGITIMERSSFEKNPIDFLEAKGYKEVKKDLIIKLPKYSLFELENGRKRMLASAGELQKGNELALPSKYVNFLYLASHYEKLKGSPEDNEQKQLFVEQHKHYLDEIIEQISEFSKRVILADANLDKVLSAYNKHRDKPIREQAENIIHLFTLTNLGAPAAFKYFDTTIDRKRYTSTKEVLDATLIHQSITGLYETRIDLSQLGGDGGEAAAKPAPGGSGGTLGDQGSRGSDPLPEPRVTLTVEGIPTEFLVNTGAEHSVLTKPMGKMGSKRTVVAGATGSKVYPWTTKRLLKIGQKQVTHSFLVIPECPAPLLGRDLLTKLKAQIQFSTEGPQVTWEDRPAMCLVLNLEEEYRLHEKPVPPSIDPSWLQLFPMVWAEKAGMGLANQVPPVVVELKSDASPVAVRQYPMSKEAREGIRPHIQRFLDLGILVPCQSPWNTPLLPVKKPGTNDYRPVQDLREVNKRVQDIHPTVPNPYNLLSSLPPSHTWYSVLDLKDAFFCLKLHPNSQPLFAFEWRDPEKGNTGQLTWTRLPQGFKNSPTLFNEALHRDLASFRALNPQVVMLQYVDDLLVAAPTYRDCKEGTRRLLQELSKLGYRVSAKKAQLCREEVTYLGYLLKGGKRWLTPARKATVMKIPTPTTPRQVREFLGKAGFCRLFIPGFASLAAPLYPLTRPKVPFTWTEAHQEAFGRIKEALLSAPALALPDLTKPFALYVDEKEGVARGVLTQTLGPWRRPVAYLSKKLDPVASGWPTCLKAIAAVALLLKDADKLTLGQNVLVIAPHNLESIVRQPPDRWMTNARMTHYQSLLLNERVSFAPPAILNPATLLPVESDDTPIHICSEILAEETGTRPDLRDQPLPGVPAWYTDGSSFIMDGRRQAGAAIVDNKRTVWASNLPEGTSAQKAELIALTQALRLAEGKSINIYTDSRYAFATAHVHGAIYKQRGWLTSAGKDIKNKEEILALLEAIHLPKRVAIIHCPGHQRGTDPVATGNRKADEAAKQAAQSTRILTETTKNAGKRTADGSEFEKRTADGSEFESPKKKAKVE

SEQ ID NO: 1787 - protein, 2218 aa, synthetic construct
MPAAKRVKLDGGDKKYSIGLDIGTNSVGWAVITDEYKVPSKKFKVLGNTDRHSIKKNLIGALLFDSGETAEATRLKRTARRRYTRRKNRICYLQEIFSNEMAKVDDSFFHRLEESFLVEEDKKHERHPIFGNIVDEVAYHEKYPTIYHLRKKLVDSTDKADLRLIYLALAHMIKFRGHFLIEGDLNPDNSDVDKLFIQLVQTYNQLFEENPINASGVDAKAILSARLSKSRRLENLIAQLPGEKKNGLFGNLIALSLGLTPNFKSNFDLAEDAKLQLSKDTYDDDLDNLLAQIGDQYADLFLAAKNLSDAILLSDILRVNTEITKAPLSASMIKRYDEHHQDLTLLKALVRQQLPEKYKEIFFDQSKNGYAGYIDGGASQEEFYKFIKPILEKMDGTEELLVKLNREDLLRKQRTFDNGSIPHQIHLGELHAILRRQEDFYPFLKDNREKIEKILTFRIPYYVGPLARGNSRFAWMTRKSEETITPWNFEEVVDKGASAQSFIERMTNFDKNLPNEKVLPKHSLLYEYFTVYNELTKVKYVTEGMRKPAFLSGEQKKAIVDLLFKTNRKVTVKQLKEDYFKKIECFDSVEISGVEDRFNASLGTYHDLLKIIKDKDFLDNEENEDILEDIVLTLTLFEDREMIEERLKTYAHLFDDKVMKQLKRRRYTGWGRLSRKLINGIRDKQSGKTILDFLKSDGFANRNFMQLIHDDSLTFKEDIQKAQVSGQGDSLHEHIANLAGSPAIKKGILQTVKVVDELVKVMGRHKPENIVIEMARENQTTQKGQKNSRERMKRIEEGIKELGSQILKEHPVENTQLQNEKLYLYYLQNGRDMYVDQELDINRLSDYDVDHIVPQSFLKDDSIDNKVLTRSDKARGKSDNVPSEEVVKKMKNYWRQLLNAKLITQRKFDNLTKAERGGLSELDKAGFIKRQLVETRQITKHVAQILDSRMNTKYDENDKLIREVKVITLKSKLVSDFRKDFQFYKVREINNYHHAHDAYLNAVVGTALIKKYPKLESEFVYGDYKVYDVRKMIAKSEQEIGKATAKYFFYSNIMNFFKTEITLANGEIRKRPLIETNGETGEIVWDKGRDFATVRKVLSMPQVNIVKKTEVQTGGFSKESILPKRNSDKLIARKKDWDPKKYGGFDSPTVAYSVLVVAKVEKGKSKKLKSVKELLGITIMERSSFEKNPIDFLEAKGYKEVKKDLIIKLPKYSLFELENGRKRMLASAGELQKGNELALPSKYVNFLYLASHYEKLKGSPEDNEQKQLFVEQHKHYLDEIIEQISEFSKRVILADANLDKVLSAYNKHRDKPIREQAENIIHLFTLTNLGAPAAFKYFDTTIDRKRYTSTKEVLDATLIHQSITGLYETRIDLSQLGGDGGGGSPAPEAAAKGGTLGDQGSRGSDPLPEPRVTLTVEGIPTEFLVNTGAEHSVLTKPMGKMGSKRTVVAGATGSKVYPWTTKRLLKIGQKQVTHSFLVIPECPAPLLGRDLLTKLKAQIQFSTEGPQVTWEDRPAMCLVLNLEEEYRLHEKPVPPSIDPSWLQLFPMVWAEKAGMGLANQVPPVVVELKSDASPVAVRQYPMSKEAREGIRPHIQRFLDLGILVPCQSPWNTPLLPVKKPGTNDYRPVQDLREVNKRVQDIHPTVPNPYNLLSSLPPSHTWYSVLDLKDAFFCLKLHPNSQPLFAFEWRDPEKGNTGQLTWTRLPQGFKNSPTLFNEALHRDLASFRALNPQVVMLQYVDDLLVAAPTYRDCKEGTRRLLQELSKLGYRVSAKKAQLCREEVTYLGYLLKGGKRWLTPARKATVMKIPTPTTPRQVREFLGKAGFCRLFIPGFASLAAPLYPLTRPKVPFTWTEAHQEAFGRIKEALLSAPALALPDLTKPFALYVDEKEGVARGVLTQTLGPWRRPVAYLSKKLDPVASGWPTCLKAIAAVALLLKDADKLTLGQNVLVIAPHNLESIVRQPPDRWMTNARMTHYQSLLLNERVSFAPPAILNPATLLPVESDDTPIHICSEILAEETGTRPDLRDQPLPGVPAWYTDGSSFIMDGRRQAGAAIVDNKRTVWASNLPEGTSAQKAELIALTQALRLAEGKSINIYTDSRYAFATAHVHGAIYKQRGWLTSAGKDIKNKEEILALLEAIHLPKRVAIIHCPGHQRGTDPVATGNRKADEAAKQAAQSTRILTETTKNAGKRTADGSEFEKRTADGSEFESPKKKAKVE

SEQ ID NO: 1788 - protein, 2212 aa, synthetic construct
MPAAKRVKLDGGDKKYSIGLDIGTNSVGWAVITDEYKVPSKKFKVLGNTDRHSIKKNLIGALLFDSGETAEATRLKRTARRRYTRRKNRICYLQEIFSNEMAKVDDSFFHRLEESFLVEEDKKHERHPIFGNIVDEVAYHEKYPTIYHLRKKLVDSTDKADLRLIYLALAHMIKFRGHFLIEGDLNPDNSDVDKLFIQLVQTYNQLFEENPINASGVDAKAILSARLSKSRRLENLIAQLPGEKKNGLFGNLIALSLGLTPNFKSNFDLAEDAKLQLSKDTYDDDLDNLLAQIGDQYADLFLAAKNLSDAILLSDILRVNTEITKAPLSASMIKRYDEHHQDLTLLKALVRQQLPEKYKEIFFDQSKNGYAGYIDGGASQEEFYKFIKPILEKMDGTEELLVKLNREDLLRKQRTFDNGSIPHQIHLGELHAILRRQEDFYPFLKDNREKIEKILTFRIPYYVGPLARGNSRFAWMTRKSEETITPWNFEEVVDKGASAQSFIERMTNFDKNLPNEKVLPKHSLLYEYFTVYNELTKVKYVTEGMRKPAFLSGEQKKAIVDLLFKTNRKVTVKQLKEDYFKKIECFDSVEISGVEDRFNASLGTYHDLLKIIKDKDFLDNEENEDILEDIVLTLTLFEDREMIEERLKTYAHLFDDKVMKQLKRRRYTGWGRLSRKLINGIRDKQSGKTILDFLKSDGFANRNFMQLIHDDSLTFKEDIQKAQVSGQGDSLHEHIANLAGSPAIKKGILQTVKVVDELVKVMGRHKPENIVIEMARENQTTQKGQKNSRERMKRIEEGIKELGSQILKEHPVENTQLQNEKLYLYYLQNGRDMYVDQELDINRLSDYDVDHIVPQSFLKDDSIDNKVLTRSDKARGKSDNVPSEEVVKKMKNYWRQLLNAKLITQRKFDNLTKAERGGLSELDKAGFIKRQLVETRQITKHVAQILDSRMNTKYDENDKLIREVKVITLKSKLVSDFRKDFQFYKVREINNYHHAHDAYLNAVVGTALIKKYPKLESEFVYGDYKVYDVRKMIAKSEQEIGKATAKYFFYSNIMNFFKTEITLANGEIRKRPLIETNGETGEIVWDKGRDFATVRKVLSMPQVNIVKKTEVQTGGFSKESILPKRNSDKLIARKKDWDPKKYGGFDSPTVAYSVLVVAKVEKGKSKKLKSVKELLGITIMERSSFEKNPIDFLEAKGYKEVKKDLIIKLPKYSLFELENGRKRMLASAGELQKGNELALPSKYVNFLYLASHYEKLKGSPEDNEQKQLFVEQHKHYLDEIIEQISEFSKRVILADANLDKVLSAYNKHRDKPIREQAENIIHLFTLTNLGAPAAFKYFDTTIDRKRYTSTKEVLDATLIHQSITGLYETRIDLSQLGGDGGGGGGSGGTLGDQGSRGSDPLPEPRVTLTVEGIPTEFLVNTGAEHSVLTKPMGKMGSKRTVVAGATGSKVYPWTTKRLLKIGQKQVTHSFLVIPECPAPLLGRDLLTKLKAQIQFSTEGPQVTWEDRPAMCLVLNLEEEYRLHEKPVPPSIDPSWLQLFPMVWAEKAGMGLANQVPPVVVELKSDASPVAVRQYPMSKEAREGIRPHIQRFLDLGILVPCQSPWNTPLLPVKKPGTNDYRPVQDLREVNKRVQDIHPTVPNPYNLLSSLPPSHTWYSVLDLKDAFFCLKLHPNSQPLFAFEWRDPEKGNTGQLTWTRLPQGFKNSPTLFNEALHRDLASFRALNPQVVMLQYVDDLLVAAPTYRDCKEGTRRLLQELSKLGYRVSAKKAQLCREEVTYLGYLLKGGKRWLTPARKATVMKIPTPTTPRQVREFLGKAGFCRLFIPGFASLAAPLYPLTRPKVPFTWTEAHQEAFGRIKEALLSAPALALPDLTKPFALYVDEKEGVARGVLTQTLGPWRRPVAYLSKKLDPVASGWPTCLKAIAAVALLLKDADKLTLGQNVLVIAPHNLESIVRQPPDRWMTNARMTHYQSLLLNERVSFAPPAILNPATLLPVESDDTPIHICSEILAEETGTRPDLRDQPLPGVPAWYTDGSSFIMDGRRQAGAAIVDNKRTVWASNLPEGTSAQKAELIALTQALRLAEGKSINIYTDSRYAFATAHVHGAIYKQRGWLTSAGKDIKNKEEILALLEAIHLPKRVAIIHCPGHQRGTDPVATGNRKADEAAKQAAQSTRILTETTKNAGKRTADGSEFEKRTADGSEFESPKKKAKVE

SEQ ID NO: 1789 - protein, 2218 aa, synthetic construct
MPAAKRVKLDGGDKKYSIGLDIGTNSVGWAVITDEYKVPSKKFKVLGNTDRHSIKKNLIGALLFDSGETAEATRLKRTARRRYTRRKNRICYLQEIFSNEMAKVDDSFFHRLEESFLVEEDKKHERHPIFGNIVDEVAYHEKYPTIYHLRKKLVDSTDKADLRLIYLALAHMIKFRGHFLIEGDLNPDNSDVDKLFIQLVQTYNQLFEENPINASGVDAKAILSARLSKSRRLENLIAQLPGEKKNGLFGNLIALSLGLTPNFKSNFDLAEDAKLQLSKDTYDDDLDNLLAQIGDQYADLFLAAKNLSDAILLSDILRVNTEITKAPLSASMIKRYDEHHQDLTLLKALVRQQLPEKYKEIFFDQSKNGYAGYIDGGASQEEFYKFIKPILEKMDGTEELLVKLNREDLLRKQRTFDNGSIPHQIHLGELHAILRRQEDFYPFLKDNREKIEKILTFRIPYYVGPLARGNSRFAWMTRKSEETITPWNFEEVVDKGASAQSFIERMTNFDKNLPNEKVLPKHSLLYEYFTVYNELTKVKYVTEGMRKPAFLSGEQKKAIVDLLFKTNRKVTVKQLKEDYFKKIECFDSVEISGVEDRFNASLGTYHDLLKIIKDKDFLDNEENEDILEDIVLTLTLFEDREMIEERLKTYAHLFDDKVMKQLKRRRYTGWGRLSRKLINGIRDKQSGKTILDFLKSDGFANRNFMQLIHDDSLTFKEDIQKAQVSGQGDSLHEHIANLAGSPAIKKGILQTVKVVDELVKVMGRHKPENIVIEMARENQTTQKGQKNSRERMKRIEEGIKELGSQILKEHPVENTQLQNEKLYLYYLQNGRDMYVDQELDINRLSDYDVDHIVPQSFLKDDSIDNKVLTRSDKARGKSDNVPSEEVVKKMKNYWRQLLNAKLITQRKFDNLTKAERGGLSELDKAGFIKRQLVETRQITKHVAQILDSRMNTKYDENDKLIREVKVITLKSKLVSDFRKDFQFYKVREINNYHHAHDAYLNAVVGTALIKKYPKLESEFVYGDYKVYDVRKMIAKSEQEIGKATAKYFFYSNIMNFFKTEITLANGEIRKRPLIETNGETGEIVWDKGRDFATVRKVLSMPQVNIVKKTEVQTGGFSKESILPKRNSDKLIARKKDWDPKKYGGFDSPTVAYSVLVVAKVEKGKSKKLKSVKELLGITIMERSSFEKNPIDFLEAKGYKEVKKDLIIKLPKYSLFELENGRKRMLASAGELQKGNELALPSKYVNFLYLASHYEKLKGSPEDNEQKQLFVEQHKHYLDEIIEQISEFSKRVILADANLDKVLSAYNKHRDKPIREQAENIIHLFTLTNLGAPAAFKYFDTTIDRKRYTSTKEVLDATLIHQSITGLYETRIDLSQLGGDGGGGGEAAAKPAPGGTLGDQGSRGSDPLPEPRVTLTVEGIPTEFLVNTGAEHSVLTKPMGKMGSKRTVVAGATGSKVYPWTTKRLLKIGQKQVTHSFLVIPECPAPLLGRDLLTKLKAQIQFSTEGPQVTWEDRPAMCLVLNLEEEYRLHEKPVPPSIDPSWLQLFPMVWAEKAGMGLANQVPPVVVELKSDASPVAVRQYPMSKEAREGIRPHIQRFLDLGILVPCQSPWNTPLLPVKKPGTNDYRPVQDLREVNKRVQDIHPTVPNPYNLLSSLPPSHTWYSVLDLKDAFFCLKLHPNSQPLFAFEWRDPEKGNTGQLTWTRLPQGFKNSPTLFNEALHRDLASFRALNPQVVMLQYVDDLLVAAPTYRDCKEGTRRLLQELSKLGYRVSAKKAQLCREEVTYLGYLLKGGKRWLTPARKATVMKIPTPTTPRQVREFLGKAGFCRLFIPGFASLAAPLYPLTRPKVPFTWTEAHQEAFGRIKEALLSAPALALPDLTKPFALYVDEKEGVARGVLTQTLGPWRRPVAYLSKKLDPVASGWPTCLKAIAAVALLLKDADKLTLGQNVLVIAPHNLESIVRQPPDRWMTNARMTHYQSLLLNERVSFAPPAILNPATLLPVESDDTPIHICSEILAEETGTRPDLRDQPLPGVPAWYTDGSSFIMDGRRQAGAAIVDNKRTVWASNLPEGTSAQKAELIALTQALRLAEGKSINIYTDSRYAFATAHVHGAIYKQRGWLTSAGKDIKNKEEILALLEAIHLPKRVAIIHCPGHQRGTDPVATGNRKADEAAKQAAQSTRILTETTKNAGKRTADGSEFEKRTADGSEFESPKKKAKVE

SEQ ID NO: 1790 - protein, 2214 aa, synthetic construct
MPAAKRVKLDGGDKKYSIGLDIGTNSVGWAVITDEYKVPSKKFKVLGNTDRHSIKKNLIGALLFDSGETAEATRLKRTARRRYTRRKNRICYLQEIFSNEMAKVDDSFFHRLEESFLVEEDKKHERHPIFGNIVDEVAYHEKYPTIYHLRKKLVDSTDKADLRLIYLALAHMIKFRGHFLIEGDLNPDNSDVDKLFIQLVQTYNQLFEENPINASGVDAKAILSARLSKSRRLENLIAQLPGEKKNGLFGNLIALSLGLTPNFKSNFDLAEDAKLQLSKDTYDDDLDNLLAQIGDQYADLFLAAKNLSDAILLSDILRVNTEITKAPLSASMIKRYDEHHQDLTLLKALVRQQLPEKYKEIFFDQSKNGYAGYIDGGASQEEFYKFIKPILEKMDGTEELLVKLNREDLLRKQRTFDNGSIPHQIHLGELHAILRRQEDFYPFLKDNREKIEKILTFRIPYYVGPLARGNSRFAWMTRKSEETITPWNFEEVVDKGASAQSFIERMTNFDKNLPNEKVLPKHSLLYEYFTVYNELTKVKYVTEGMRKPAFLSGEQKKAIVDLLFKTNRKVTVKQLKEDYFKKIECFDSVEISGVEDRFNASLGTYHDLLKIIKDKDFLDNEENEDILEDIVLTLTLFEDREMIEERLKTYAHLFDDKVMKQLKRRRYTGWGRLSRKLINGIRDKQSGKTILDFLKSDGFANRNFMQLIHDDSLTFKEDIQKAQVSGQGDSLHEHIANLAGSPAIKKGILQTVKVVDELVKVMGRHKPENIVIEMARENQTTQKGQKNSRERMKRIEEGIKELGSQILKEHPVENTQLQNEKLYLYYLQNGRDMYVDQELDINRLSDYDVDHIVPQSFLKDDSIDNKVLTRSDKARGKSDNVPSEEVVKKMKNYWRQLLNAKLITQRKFDNLTKAERGGLSELDKAGFIKRQLVETRQITKHVAQILDSRMNTKYDENDKLIREVKVITLKSKLVSDFRKDFQFYKVREINNYHHAHDAYLNAVVGTALIKKYPKLESEFVYGDYKVYDVRKMIAKSEQEIGKATAKYFFYSNIMNFFKTEITLANGEIRKRPLIETNGETGEIVWDKGRDFATVRKVLSMPQVNIVKKTEVQTGGFSKESILPKRNSDKLIARKKDWDPKKYGGFDSPTVAYSVLVVAKVEKGKSKKLKSVKELLGITIMERSSFEKNPIDFLEAKGYKEVKKDLIIKLPKYSLFELENGRKRMLASAGELQKGNELALPSKYVNFLYLASHYEKLKGSPEDNEQKQLFVEQHKHYLDEIIEQISEFSKRVILADANLDKVLSAYNKHRDKPIREQAENIIHLFTLTNLGAPAAFKYFDTTIDRKRYTSTKEVLDATLIHQSITGLYETRIDLSQLGGDGGGGGGGGGGGTLGDQGSRGSDPLPEPRVTLTVEGIPTEFLVNTGAEHSVLTKPMGKMGSKRTVVAGATGSKVYPWTTKRLLKIGQKQVTHSFLVIPECPAPLLGRDLLTKLKAQIQFSTEGPQVTWEDRPAMCLVLNLEEEYRLHEKPVPPSIDPSWLQLFPMVWAEKAGMGLANQVPPVVVELKSDASPVAVRQYPMSKEAREGIRPHIQRFLDLGILVPCQSPWNTPLLPVKKPGTNDYRPVQDLREVNKRVQDIHPTVPNPYNLLSSLPPSHTWYSVLDLKDAFFCLKLHPNSQPLFAFEWRDPEKGNTGQLTWTRLPQGFKNSPTLFNEALHRDLASFRALNPQVVMLQYVDDLLVAAPTYRDCKEGTRRLLQELSKLGYRVSAKKAQLCREEVTYLGYLLKGGKRWLTPARKATVMKIPTPTTPRQVREFLGKAGFCRLFIPGFASLAAPLYPLTRPKVPFTWTEAHQEAFGRIKEALLSAPALALPDLTKPFALYVDEKEGVARGVLTQTLGPWRRPVAYLSKKLDPVASGWPTCLKAIAAVALLLKDADKLTLGQNVLVIAPHNLESIVRQPPDRWMTNARMTHYQSLLLNERVSFAPPAILNPATLLPVESDDTPIHICSEILAEETGTRPDLRDQPLPGVPAWYTDGSSFIMDGRRQAGAAIVDNKRTVWASNLPEGTSAQKAELIALTQALRLAEGKSINIYTDSRYAFATAHVHGAIYKQRGWLTSAGKDIKNKEEILALLEAIHLPKRVAIIHCPGHQRGTDPVATGNRKADEAAKQAAQSTRILTETTKNAGKRTADGSEFEKRTADGSEFESPKKKAKVE

SEQ ID NO: 1791 - protein, 2210 aa, synthetic construct
MPAAKRVKLDGGDKKYSIGLDIGTNSVGWAVITDEYKVPSKKFKVLGNTDRHSIKKNLIGALLFDSGETAEATRLKRTARRRYTRRKNRICYLQEIFSNEMAKVDDSFFHRLEESFLVEEDKKHERHPIFGNIVDEVAYHEKYPTIYHLRKKLVDSTDKADLRLIYLALAHMIKFRGHFLIEGDLNPDNSDVDKLFIQLVQTYNQLFEENPINASGVDAKAILSARLSKSRRLENLIAQLPGEKKNGLFGNLIALSLGLTPNFKSNFDLAEDAKLQLSKDTYDDDLDNLLAQIGDQYADLFLAAKNLSDAILLSDILRVNTEITKAPLSASMIKRYDEHHQDLTLLKALVRQQLPEKYKEIFFDQSKNGYAGYIDGGASQEEFYKFIKPILEKMDGTEELLVKLNREDLLRKQRTFDNGSIPHQIHLGELHAILRRQEDFYPFLKDNREKIEKILTFRIPYYVGPLARGNSRFAWMTRKSEETITPWNFEEVVDKGASAQSFIERMTNFDKNLPNEKVLPKHSLLYEYFTVYNELTKVKYVTEGMRKPAFLSGEQKKAIVDLLFKTNRKVTVKQLKEDYFKKIECFDSVEISGVEDRFNASLGTYHDLLKIIKDKDFLDNEENEDILEDIVLTLTLFEDREMIEERLKTYAHLFDDKVMKQLKRRRYTGWGRLSRKLINGIRDKQSGKTILDFLKSDGFANRNFMQLIHDDSLTFKEDIQKAQVSGQGDSLHEHIANLAGSPAIKKGILQTVKVVDELVKVMGRHKPENIVIEMARENQTTQKGQKNSRERMKRIEEGIKELGSQILKEHPVENTQLQNEKLYLYYLQNGRDMYVDQELDINRLSDYDVDHIVPQSFLKDDSIDNKVLTRSDKARGKSDNVPSEEVVKKMKNYWRQLLNAKLITQRKFDNLTKAERGGLSELDKAGFIKRQLVETRQITKHVAQILDSRMNTKYDENDKLIREVKVITLKSKLVSDFRKDFQFYKVREINNYHHAHDAYLNAVVGTALIKKYPKLESEFVYGDYKVYDVRKMIAKSEQEIGKATAKYFFYSNIMNFFKTEITLANGEIRKRPLIETNGETGEIVWDKGRDFATVRKVLSMPQVNIVKKTEVQTGGFSKESILPKRNSDKLIARKKDWDPKKYGGFDSPTVAYSVLVVAKVEKGKSKKLKSVKELLGITIMERSSFEKNPIDFLEAKGYKEVKKDLIIKLPKYSLFELENGRKRMLASAGELQKGNELALPSKYVNFLYLASHYEKLKGSPEDNEQKQLFVEQHKHYLDEIIEQISEFSKRVILADANLDKVLSAYNKHRDKPIREQAENIIHLFTLTNLGAPAAFKYFDTTIDRKRYTSTKEVLDATLIHQSITGLYETRIDLSQLGGDGGGGSGGTLGDQGSRGSDPLPEPRVTLTVEGIPTEFLVNTGAEHSVLTKPMGKMGSKRTVVAGATGSKVYPWTTKRLLKIGQKQVTHSFLVIPECPAPLLGRDLLTKLKAQIQFSTEGPQVTWEDRPAMCLVLNLEEEYRLHEKPVPPSIDPSWLQLFPMVWAEKAGMGLANQVPPVVVELKSDASPVAVRQYPMSKEAREGIRPHIQRFLDLGILVPCQSPWNTPLLPVKKPGTNDYRPVQDLREVNKRVQDIHPTVPNPYNLLSSLPPSHTWYSVLDLKDAFFCLKLHPNSQPLFAFEWRDPEKGNTGQLTWTRLPQGFKNSPTLFNEALHRDLASFRALNPQVVMLQYVDDLLVAAPTYRDCKEGTRRLLQELSKLGYRVSAKKAQLCREEVTYLGYLLKGGKRWLTPARKATVMKIPTPTTPRQVREFLGKAGFCRLFIPGFASLAAPLYPLTRPKVPFTWTEAHQEAFGRIKEALLSAPALALPDLTKPFALYVDEKEGVARGVLTQTLGPWRRPVAYLSKKLDPVASGWPTCLKAIAAVALLLKDADKLTLGQNVLVIAPHNLESIVRQPPDRWMTNARMTHYQSLLLNERVSFAPPAILNPATLLPVESDDTPIHICSEILAEETGTRPDLRDQPLPGVPAWYTDGSSFIMDGRRQAGAAIVDNKRTVWASNLPEGTSAQKAELIALTQALRLAEGKSINIYTDSRYAFATAHVHGAIYKQRGWLTSAGKDIKNKEEILALLEAIHLPKRVAIIHCPGHQRGTDPVATGNRKADEAAKQAAQSTRILTETTKNAGKRTADGSEFEKRTADGSEFESPKKKAKVE

SEQ ID NO: 1792 - protein, 2216 aa, synthetic construct
MPAAKRVKLDGGDKKYSIGLDIGTNSVGWAVITDEYKVPSKKFKVLGNTDRHSIKKNLIGALLFDSGETAEATRLKRTARRRYTRRKNRICYLQEIFSNEMAKVDDSFFHRLEESFLVEEDKKHERHPIFGNIVDEVAYHEKYPTIYHLRKKLVDSTDKADLRLIYLALAHMIKFRGHFLIEGDLNPDNSDVDKLFIQLVQTYNQLFEENPINASGVDAKAILSARLSKSRRLENLIAQLPGEKKNGLFGNLIALSLGLTPNFKSNFDLAEDAKLQLSKDTYDDDLDNLLAQIGDQYADLFLAAKNLSDAILLSDILRVNTEITKAPLSASMIKRYDEHHQDLTLLKALVRQQLPEKYKEIFFDQSKNGYAGYIDGGASQEEFYKFIKPILEKMDGTEELLVKLNREDLLRKQRTFDNGSIPHQIHLGELHAILRRQEDFYPFLKDNREKIEKILTFRIPYYVGPLARGNSRFAWMTRKSEETITPWNFEEVVDKGASAQSFIERMTNFDKNLPNEKVLPKHSLLYEYFTVYNELTKVKYVTEGMRKPAFLSGEQKKAIVDLLFKTNRKVTVKQLKEDYFKKIECFDSVEISGVEDRFNASLGTYHDLLKIIKDKDFLDNEENEDILEDIVLTLTLFEDREMIEERLKTYAHLFDDKVMKQLKRRRYTGWGRLSRKLINGIRDKQSGKTILDFLKSDGFANRNFMQLIHDDSLTFKEDIQKAQVSGQGDSLHEHIANLAGSPAIKKGILQTVKVVDELVKVMGRHKPENIVIEMARENQTTQKGQKNSRERMKRIEEGIKELGSQILKEHPVENTQLQNEKLYLYYLQNGRDMYVDQELDINRLSDYDVDHIVPQSFLKDDSIDNKVLTRSDKARGKSDNVPSEEVVKKMKNYWRQLLNAKLITQRKFDNLTKAERGGLSELDKAGFIKRQLVETRQITKHVAQILDSRMNTKYDENDKLIREVKVITLKSKLVSDFRKDFQFYKVREINNYHHAHDAYLNAVVGTALIKKYPKLESEFVYGDYKVYDVRKMIAKSEQEIGKATAKYFFYSNIMNFFKTEITLANGEIRKRPLIETNGETGEIVWDKGRDFATVRKVLSMPQVNIVKKTEVQTGGFSKESILPKRNSDKLIARKKDWDPKKYGGFDSPTVAYSVLVVAKVEKGKSKKLKSVKELLGITIMERSSFEKNPIDFLEAKGYKEVKKDLIIKLPKYSLFELENGRKRMLASAGELQKGNELALPSKYVNFLYLASHYEKLKGSPEDNEQKQLFVEQHKHYLDEIIEQISEFSKRVILADANLDKVLSAYNKHRDKPIREQAENIIHLFTLTNLGAPAAFKYFDTTIDRKRYTSTKEVLDATLIHQSITGLYETRIDLSQLGGDGGPAPGGSGGGGGTLGDQGSRGSDPLPEPRVTLTVEGIPTEFLVNTGAEHSVLTKPMGKMGSKRTVVAGATGSKVYPWTTKRLLKIGQKQVTHSFLVIPECPAPLLGRDLLTKLKAQIQFSTEGPQVTWEDRPAMCLVLNLEEEYRLHEKPVPPSIDPSWLQLFPMVWAEKAGMGLANQVPPVVVELKSDASPVAVRQYPMSKEAREGIRPHIQRFLDLGILVPCQSPWNTPLLPVKKPGTNDYRPVQDLREVNKRVQDIHPTVPNPYNLLSSLPPSHTWYSVLDLKDAFFCLKLHPNSQPLFAFEWRDPEKGNTGQLTWTRLPQGFKNSPTLFNEALHRDLASFRALNPQVVMLQYVDDLLVAAPTYRDCKEGTRRLLQELSKLGYRVSAKKAQLCREEVTYLGYLLKGGKRWLTPARKATVMKIPTPTTPRQVREFLGKAGFCRLFIPGFASLAAPLYPLTRPKVPFTWTEAHQEAFGRIKEALLSAPALALPDLTKPFALYVDEKEGVARGVLTQTLGPWRRPVAYLSKKLDPVASGWPTCLKAIAAVALLLKDADKLTLGQNVLVIAPHNLESIVRQPPDRWMTNARMTHYQSLLLNERVSFAPPAILNPATLLPVESDDTPIHICSEILAEETGTRPDLRDQPLPGVPAWYTDGSSFIMDGRRQAGAAIVDNKRTVWASNLPEGTSAQKAELIALTQALRLAEGKSINIYTDSRYAFATAHVHGAIYKQRGWLTSAGKDIKNKEEILALLEAIHLPKRVAIIHCPGHQRGTDPVATGNRKADEAAKQAAQSTRILTETTKNAGKRTADGSEFEKRTADGSEFESPKKKAKVE

SEQ ID NO: 1793 - protein, 2220 aa, synthetic construct
MPAAKRVKLDGGDKKYSIGLDIGTNSVGWAVITDEYKVPSKKFKVLGNTDRHSIKKNLIGALLFDSGETAEATRLKRTARRRYTRRKNRICYLQEIFSNEMAKVDDSFFHRLEESFLVEEDKKHERHPIFGNIVDEVAYHEKYPTIYHLRKKLVDSTDKADLRLIYLALAHMIKFRGHFLIEGDLNPDNSDVDKLFIQLVQTYNQLFEENPINASGVDAKAILSARLSKSRRLENLIAQLPGEKKNGLFGNLIALSLGLTPNFKSNFDLAEDAKLQLSKDTYDDDLDNLLAQIGDQYADLFLAAKNLSDAILLSDILRVNTEITKAPLSASMIKRYDEHHQDLTLLKALVRQQLPEKYKEIFFDQSKNGYAGYIDGGASQEEFYKFIKPILEKMDGTEELLVKLNREDLLRKQRTFDNGSIPHQIHLGELHAILRRQEDFYPFLKDNREKIEKILTFRIPYYVGPLARGNSRFAWMTRKSEETITPWNFEEVVDKGASAQSFIERMTNFDKNLPNEKVLPKHSLLYEYFTVYNELTKVKYVTEGMRKPAFLSGEQKKAIVDLLFKTNRKVTVKQLKEDYFKKIECFDSVEISGVEDRFNASLGTYHDLLKIIKDKDFLDNEENEDILEDIVLTLTLFEDREMIEERLKTYAHLFDDKVMKQLKRRRYTGWGRLSRKLINGIRDKQSGKTILDFLKSDGFANRNFMQLIHDDSLTFKEDIQKAQVSGQGDSLHEHIANLAGSPAIKKGILQTVKVVDELVKVMGRHKPENIVIEMARENQTTQKGQKNSRERMKRIEEGIKELGSQILKEHPVENTQLQNEKLYLYYLQNGRDMYVDQELDINRLSDYDVDHIVPQSFLKDDSIDNKVLTRSDKARGKSDNVPSEEVVKKMKNYWRQLLNAKLITQRKFDNLTKAERGGLSELDKAGFIKRQLVETRQITKHVAQILDSRMNTKYDENDKLIREVKVITLKSKLVSDFRKDFQFYKVREINNYHHAHDAYLNAVVGTALIKKYPKLESEFVYGDYKVYDVRKMIAKSEQEIGKATAKYFFYSNIMNFFKTEITLANGEIRKRPLIETNGETGEIVWDKGRDFATVRKVLSMPQVNIVKKTEVQTGGFSKESILPKRNSDKLIARKKDWDPKKYGGFDSPTVAYSVLVVAKVEKGKSKKLKSVKELLGITIMERSSFEKNPIDFLEAKGYKEVKKDLIIKLPKYSLFELENGRKRMLASAGELQKGNELALPSKYVNFLYLASHYEKLKGSPEDNEQKQLFVEQHKHYLDEIIEQISEFSKRVILADANLDKVLSAYNKHRDKPIREQAENIIHLFTLTNLGAPAAFKYFDTTIDRKRYTSTKEVLDATLIHQSITGLYETRIDLSQLGGDGGPAPAPAPAPAPAPGGTLGDQGSRGSDPLPEPRVTLTVEGIPTEFLVNTGAEHSVLTKPMGKMGSKRTVVAGATGSKVYPWTTKRLLKIGQKQVTHSFLVIPECPAPLLGRDLLTKLKAQIQFSTEGPQVTWEDRPAMCLVLNLEEEYRLHEKPVPPSIDPSWLQLFPMVWAEKAGMGLANQVPPVVVELKSDASPVAVRQYPMSKEAREGIRPHIQRFLDLGILVPCQSPWNTPLLPVKKPGTNDYRPVQDLREVNKRVQDIHPTVPNPYNLLSSLPPSHTWYSVLDLKDAFFCLKLHPNSQPLFAFEWRDPEKGNTGQLTWTRLPQGFKNSPTLFNEALHRDLASFRALNPQVVMLQYVDDLLVAAPTYRDCKEGTRRLLQELSKLGYRVSAKKAQLCREEVTYLGYLLKGGKRWLTPARKATVMKIPTPTTPRQVREFLGKAGFCRLFIPGFASLAAPLYPLTRPKVPFTWTEAHQEAFGRIKEALLSAPALALPDLTKPFALYVDEKEGVARGVLTQTLGPWRRPVAYLSKKLDPVASGWPTCLKAIAAVALLLKDADKLTLGQNVLVIAPHNLESIVRQPPDRWMTNARMTHYQSLLLNERVSFAPPAILNPATLLPVESDDTPIHICSEILAEETGTRPDLRDQPLPGVPAWYTDGSSFIMDGRRQAGAAIVDNKRTVWASNLPEGTSAQKAELIALTQALRLAEGKSINIYTDSRYAFATAHVHGAIYKQRGWLTSAGKDIKNKEEILALLEAIHLPKRVAIIHCPGHQRGTDPVATGNRKADEAAKQAAQSTRILTETTKNAGKRTADGSEFEKRTADGSEFESPKKKAKVE

SEQ ID NO: 1794 - protein, 2213 aa, synthetic construct
MPAAKRVKLDGGDKKYSIGLDIGTNSVGWAVITDEYKVPSKKFKVLGNTDRHSIKKNLIGALLFDSGETAEATRLKRTARRRYTRRKNRICYLQEIFSNEMAKVDDSFFHRLEESFLVEEDKKHERHPIFGNIVDEVAYHEKYPTIYHLRKKLVDSTDKADLRLIYLALAHMIKFRGHFLIEGDLNPDNSDVDKLFIQLVQTYNQLFEENPINASGVDAKAILSARLSKSRRLENLIAQLPGEKKNGLFGNLIALSLGLTPNFKSNFDLAEDAKLQLSKDTYDDDLDNLLAQIGDQYADLFLAAKNLSDAILLSDILRVNTEITKAPLSASMIKRYDEHHQDLTLLKALVRQQLPEKYKEIFFDQSKNGYAGYIDGGASQEEFYKFIKPILEKMDGTEELLVKLNREDLLRKQRTFDNGSIPHQIHLGELHAILRRQEDFYPFLKDNREKIEKILTFRIPYYVGPLARGNSRFAWMTRKSEETITPWNFEEVVDKGASAQSFIERMTNFDKNLPNEKVLPKHSLLYEYFTVYNELTKVKYVTEGMRKPAFLSGEQKKAIVDLLFKTNRKVTVKQLKEDYFKKIECFDSVEISGVEDRFNASLGTYHDLLKIIKDKDFLDNEENEDILEDIVLTLTLFEDREMIEERLKTYAHLFDDKVMKQLKRRRYTGWGRLSRKLINGIRDKQSGKTILDFLKSDGFANRNFMQLIHDDSLTFKEDIQKAQVSGQGDSLHEHIANLAGSPAIKKGILQTVKVVDELVKVMGRHKPENIVIEMARENQTTQKGQKNSRERMKRIEEGIKELGSQILKEHPVENTQLQNEKLYLYYLQNGRDMYVDQELDINRLSDYDVDHIVPQSFLKDDSIDNKVLTRSDKARGKSDNVPSEEVVKKMKNYWRQLLNAKLITQRKFDNLTKAERGGLSELDKAGFIKRQLVETRQITKHVAQILDSRMNTKYDENDKLIREVKVITLKSKLVSDFRKDFQFYKVREINNYHHAHDAYLNAVVGTALIKKYPKLESEFVYGDYKVYDVRKMIAKSEQEIGKATAKYFFYSNIMNFFKTEITLANGEIRKRPLIETNGETGEIVWDKGRDFATVRKVLSMPQVNIVKKTEVQTGGFSKESILPKRNSDKLIARKKDWDPKKYGGFDSPTVAYSVLVVAKVEKGKSKKLKSVKELLGITIMERSSFEKNPIDFLEAKGYKEVKKDLIIKLPKYSLFELENGRKRMLASAGELQKGNELALPSKYVNFLYLASHYEKLKGSPEDNEQKQLFVEQHKHYLDEIIEQISEFSKRVILADANLDKVLSAYNKHRDKPIREQAENIIHLFTLTNLGAPAAFKYFDTTIDRKRYTSTKEVLDATLIHQSITGLYETRIDLSQLGGDGGPAPGGGGGTLGDQGSRGSDPLPEPRVTLTVEGIPTEFLVNTGAEHSVLTKPMGKMGSKRTVVAGATGSKVYPWTTKRLLKIGQKQVTHSFLVIPECPAPLLGRDLLTKLKAQIQFSTEGPQVTWEDRPAMCLVLNLEEEYRLHEKPVPPSIDPSWLQLFPMVWAEKAGMGLANQVPPVVVELKSDASPVAVRQYPMSKEAREGIRPHIQRFLDLGILVPCQSPWNTPLLPVKKPGTNDYRPVQDLREVNKRVQDIHPTVPNPYNLLSSLPPSHTWYSVLDLKDAFFCLKLHPNSQPLFAFEWRDPEKGNTGQLTWTRLPQGFKNSPTLFNEALHRDLASFRALNPQVVMLQYVDDLLVAAPTYRDCKEGTRRLLQELSKLGYRVSAKKAQLCREEVTYLGYLLKGGKRWLTPARKATVMKIPTPTTPRQVREFLGKAGFCRLFIPGFASLAAPLYPLTRPKVPFTWTEAHQEAFGRIKEALLSAPALALPDLTKPFALYVDEKEGVARGVLTQTLGPWRRPVAYLSKKLDPVASGWPTCLKAIAAVALLLKDADKLTLGQNVLVIAPHNLESIVRQPPDRWMTNARMTHYQSLLLNERVSFAPPAILNPATLLPVESDDTPIHICSEILAEETGTRPDLRDQPLPGVPAWYTDGSSFIMDGRRQAGAAIVDNKRTVWASNLPEGTSAQKAELIALTQALRLAEGKSINIYTDSRYAFATAHVHGAIYKQRGWLTSAGKDIKNKEEILALLEAIHLPKRVAIIHCPGHQRGTDPVATGNRKADEAAKQAAQSTRILTETTKNAGKRTADGSEFEKRTADGSEFESPKKKAKVE

SEQ ID NO: 1795 - protein, 2218 aa, synthetic construct
MPAAKRVKLDGGDKKYSIGLDIGTNSVGWAVITDEYKVPSKKFKVLGNTDRHSIKKNLIGALLFDSGETAEATRLKRTARRRYTRRKNRICYLQEIFSNEMAKVDDSFFHRLEESFLVEEDKKHERHPIFGNIVDEVAYHEKYPTIYHLRKKLVDSTDKADLRLIYLALAHMIKFRGHFLIEGDLNPDNSDVDKLFIQLVQTYNQLFEENPINASGVDAKAILSARLSKSRRLENLIAQLPGEKKNGLFGNLIALSLGLTPNFKSNFDLAEDAKLQLSKDTYDDDLDNLLAQIGDQYADLFLAAKNLSDAILLSDILRVNTEITKAPLSASMIKRYDEHHQDLTLLKALVRQQLPEKYKEIFFDQSKNGYAGYIDGGASQEEFYKFIKPILEKMDGTEELLVKLNREDLLRKQRTFDNGSIPHQIHLGELHAILRRQEDFYPFLKDNREKIEKILTFRIPYYVGPLARGNSRFAWMTRKSEETITPWNFEEVVDKGASAQSFIERMTNFDKNLPNEKVLPKHSLLYEYFTVYNELTKVKYVTEGMRKPAFLSGEQKKAIVDLLFKTNRKVTVKQLKEDYFKKIECFDSVEISGVEDRFNASLGTYHDLLKIIKDKDFLDNEENEDILEDIVLTLTLFEDREMIEERLKTYAHLFDDKVMKQLKRRRYTGWGRLSRKLINGIRDKQSGKTILDFLKSDGFANRNFMQLIHDDSLTFKEDIQKAQVSGQGDSLHEHIANLAGSPAIKKGILQTVKVVDELVKVMGRHKPENIVIEMARENQTTQKGQKNSRERMKRIEEGIKELGSQILKEHPVENTQLQNEKLYLYYLQNGRDMYVDQELDINRLSDYDVDHIVPQSFLKDDSIDNKVLTRSDKARGKSDNVPSEEVVKKMKNYWRQLLNAKLITQRKFDNLTKAERGGLSELDKAGFIKRQLVETRQITKHVAQILDSRMNTKYDENDKLIREVKVITLKSKLVSDFRKDFQFYKVREINNYHHAHDAYLNAVVGTALIKKYPKLESEFVYGDYKVYDVRKMIAKSEQEIGKATAKYFFYSNIMNFFKTEITLANGEIRKRPLIETNGETGEIVWDKGRDFATVRKVLSMPQVNIVKKTEVQTGGFSKESILPKRNSDKLIARKKDWDPKKYGGFDSPTVAYSVLVVAKVEKGKSKKLKSVKELLGITIMERSSFEKNPIDFLEAKGYKEVKKDLIIKLPKYSLFELENGRKRMLASAGELQKGNELALPSKYVNFLYLASHYEKLKGSPEDNEQKQLFVEQHKHYLDEIIEQISEFSKRVILADANLDKVLSAYNKHRDKPIREQAENIIHLFTLTNLGAPAAFKYFDTTIDRKRYTSTKEVLDATLIHQSITGLYETRIDLSQLGGDGGGSSPAPEAAAKGGTLGDQGSRGSDPLPEPRVTLTVEGIPTEFLVNTGAEHSVLTKPMGKMGSKRTVVAGATGSKVYPWTTKRLLKIGQKQVTHSFLVIPECPAPLLGRDLLTKLKAQIQFSTEGPQVTWEDRPAMCLVLNLEEEYRLHEKPVPPSIDPSWLQLFPMVWAEKAGMGLANQVPPVVVELKSDASPVAVRQYPMSKEAREGIRPHIQRFLDLGILVPCQSPWNTPLLPVKKPGTNDYRPVQDLREVNKRVQDIHPTVPNPYNLLSSLPPSHTWYSVLDLKDAFFCLKLHPNSQPLFAFEWRDPEKGNTGQLTWTRLPQGFKNSPTLFNEALHRDLASFRALNPQVVMLQYVDDLLVAAPTYRDCKEGTRRLLQELSKLGYRVSAKKAQLCREEVTYLGYLLKGGKRWLTPARKATVMKIPTPTTPRQVREFLGKAGFCRLFIPGFASLAAPLYPLTRPKVPFTWTEAHQEAFGRIKEALLSAPALALPDLTKPFALYVDEKEGVARGVLTQTLGPWRRPVAYLSKKLDPVASGWPTCLKAIAAVALLLKDADKLTLGQNVLVIAPHNLESIVRQPPDRWMTNARMTHYQSLLLNERVSFAPPAILNPATLLPVESDDTPIHICSEILAEETGTRPDLRDQPLPGVPAWYTDGSSFIMDGRRQAGAAIVDNKRTVWASNLPEGTSAQKAELIALTQALRLAEGKSINIYTDSRYAFATAHVHGAIYKQRGWLTSAGKDIKNKEEILALLEAIHLPKRVAIIHCPGHQRGTDPVATGNRKADEAAKQAAQSTRILTETTKNAGKRTADGSEFEKRTADGSEFESPKKKAKVE

SEQ ID NO: 1796 - protein, 2218 aa, synthetic construct
MPAAKRVKLDGGDKKYSIGLDIGTNSVGWAVITDEYKVPSKKFKVLGNTDRHSIKKNLIGALLFDSGETAEATRLKRTARRRYTRRKNRICYLQEIFSNEMAKVDDSFFHRLEESFLVEEDKKHERHPIFGNIVDEVAYHEKYPTIYHLRKKLVDSTDKADLRLIYLALAHMIKFRGHFLIEGDLNPDNSDVDKLFIQLVQTYNQLFEENPINASGVDAKAILSARLSKSRRLENLIAQLPGEKKNGLFGNLIALSLGLTPNFKSNFDLAEDAKLQLSKDTYDDDLDNLLAQIGDQYADLFLAAKNLSDAILLSDILRVNTEITKAPLSASMIKRYDEHHQDLTLLKALVRQQLPEKYKEIFFDQSKNGYAGYIDGGASQEEFYKFIKPILEKMDGTEELLVKLNREDLLRKQRTFDNGSIPHQIHLGELHAILRRQEDFYPFLKDNREKIEKILTFRIPYYVGPLARGNSRFAWMTRKSEETITPWNFEEVVDKGASAQSFIERMTNFDKNLPNEKVLPKHSLLYEYFTVYNELTKVKYVTEGMRKPAFLSGEQKKAIVDLLFKTNRKVTVKQLKEDYFKKIECFDSVEISGVEDRFNASLGTYHDLLKIIKDKDFLDNEENEDILEDIVLTLTLFEDREMIEERLKTYAHLFDDKVMKQLKRRRYTGWGRLSRKLINGIRDKQSGKTILDFLKSDGFANRNFMQLIHDDSLTFKEDIQKAQVSGQGDSLHEHIANLAGSPAIKKGILQTVKVVDELVKVMGRHKPENIVIEMARENQTTQKGQKNSRERMKRIEEGIKELGSQILKEHPVENTQLQNEKLYLYYLQNGRDMYVDQELDINRLSDYDVDHIVPQSFLKDDSIDNKVLTRSDKARGKSDNVPSEEVVKKMKNYWRQLLNAKLITQRKFDNLTKAERGGLSELDKAGFIKRQLVETRQITKHVAQILDSRMNTKYDENDKLIREVKVITLKSKLVSDFRKDFQFYKVREINNYHHAHDAYLNAVVGTALIKKYPKLESEFVYGDYKVYDVRKMIAKSEQEIGKATAKYFFYSNIMNFFKTEITLANGEIRKRPLIETNGETGEIVWDKGRDFATVRKVLSMPQVNIVKKTEVQTGGFSKESILPKRNSDKLIARKKDWDPKKYGGFDSPTVAYSVLVVAKVEKGKSKKLKSVKELLGITIMERSSFEKNPIDFLEAKGYKEVKKDLIIKLPKYSLFELENGRKRMLASAGELQKGNELALPSKYVNFLYLASHYEKLKGSPEDNEQKQLFVEQHKHYLDEIIEQISEFSKRVILADANLDKVLSAYNKHRDKPIREQAENIIHLFTLTNLGAPAAFKYFDTTIDRKRYTSTKEVLDATLIHQSITGLYETRIDLSQLGGDGGGGGEAAAKGSSGGTLGDQGSRGSDPLPEPRVTLTVEGIPTEFLVNTGAEHSVLTKPMGKMGSKRTVVAGATGSKVYPWTTKRLLKIGQKQVTHSFLVIPECPAPLLGRDLLTKLKAQIQFSTEGPQVTWEDRPAMCLVLNLEEEYRLHEKPVPPSIDPSWLQLFPMVWAEKAGMGLANQVPPVVVELKSDASPVAVRQYPMSKEAREGIRPHIQRFLDLGILVPCQSPWNTPLLPVKKPGTNDYRPVQDLREVNKRVQDIHPTVPNPYNLLSSLPPSHTWYSVLDLKDAFFCLKLHPNSQPLFAFEWRDPEKGNTGQLTWTRLPQGFKNSPTLFNEALHRDLASFRALNPQVVMLQYVDDLLVAAPTYRDCKEGTRRLLQELSKLGYRVSAKKAQLCREEVTYLGYLLKGGKRWLTPARKATVMKIPTPTTPRQVREFLGKAGFCRLFIPGFASLAAPLYPLTRPKVPFTWTEAHQEAFGRIKEALLSAPALALPDLTKPFALYVDEKEGVARGVLTQTLGPWRRPVAYLSKKLDPVASGWPTCLKAIAAVALLLKDADKLTLGQNVLVIAPHNLESIVRQPPDRWMTNARMTHYQSLLLNERVSFAPPAILNPATLLPVESDDTPIHICSEILAEETGTRPDLRDQPLPGVPAWYTDGSSFIMDGRRQAGAAIVDNKRTVWASNLPEGTSAQKAELIALTQALRLAEGKSINIYTDSRYAFATAHVHGAIYKQRGWLTSAGKDIKNKEEILALLEAIHLPKRVAIIHCPGHQRGTDPVATGNRKADEAAKQAAQSTRILTETTKNAGKRTADGSEFEKRTADGSEFESPKKKAKVE

SEQ ID NO: 1797 - protein, 2215 aa, synthetic construct
MPAAKRVKLDGGDKKYSIGLDIGTNSVGWAVITDEYKVPSKKFKVLGNTDRHSIKKNLIGALLFDSGETAEATRLKRTARRRYTRRKNRICYLQEIFSNEMAKVDDSFFHRLEESFLVEEDKKHERHPIFGNIVDEVAYHEKYPTIYHLRKKLVDSTDKADLRLIYLALAHMIKFRGHFLIEGDLNPDNSDVDKLFIQLVQTYNQLFEENPINASGVDAKAILSARLSKSRRLENLIAQLPGEKKNGLFGNLIALSLGLTPNFKSNFDLAEDAKLQLSKDTYDDDLDNLLAQIGDQYADLFLAAKNLSDAILLSDILRVNTEITKAPLSASMIKRYDEHHQDLTLLKALVRQQLPEKYKEIFFDQSKNGYAGYIDGGASQEEFYKFIKPILEKMDGTEELLVKLNREDLLRKQRTFDNGSIPHQIHLGELHAILRRQEDFYPFLKDNREKIEKILTFRIPYYVGPLARGNSRFAWMTRKSEETITPWNFEEVVDKGASAQSFIERMTNFDKNLPNEKVLPKHSLLYEYFTVYNELTKVKYVTEGMRKPAFLSGEQKKAIVDLLFKTNRKVTVKQLKEDYFKKIECFDSVEISGVEDRFNASLGTYHDLLKIIKDKDFLDNEENEDILEDIVLTLTLFEDREMIEERLKTYAHLFDDKVMKQLKRRRYTGWGRLSRKLINGIRDKQSGKTILDFLKSDGFANRNFMQLIHDDSLTFKEDIQKAQVSGQGDSLHEHIANLAGSPAIKKGILQTVKVVDELVKVMGRHKPENIVIEMARENQTTQKGQKNSRERMKRIEEGIKELGSQILKEHPVENTQLQNEKLYLYYLQNGRDMYVDQELDINRLSDYDVDHIVPQSFLKDDSIDNKVLTRSDKARGKSDNVPSEEVVKKMKNYWRQLLNAKLITQRKFDNLTKAERGGLSELDKAGFIKRQLVETRQITKHVAQILDSRMNTKYDENDKLIREVKVITLKSKLVSDFRKDFQFYKVREINNYHHAHDAYLNAVVGTALIKKYPKLESEFVYGDYKVYDVRKMIAKSEQEIGKATAKYFFYSNIMNFFKTEITLANGEIRKRPLIETNGETGEIVWDKGRDFATVRKVLSMPQVNIVKKTEVQTGGFSKESILPKRNSDKLIARKKDWDPKKYGGFDSPTVAYSVLVVAKVEKGKSKKLKSVKELLGITIMERSSFEKNPIDFLEAKGYKEVKKDLIIKLPKYSLFELENGRKRMLASAGELQKGNELALPSKYVNFLYLASHYEKLKGSPEDNEQKQLFVEQHKHYLDEIIEQISEFSKRVILADANLDKVLSAYNKHRDKPIREQAENIIHLFTLTNLGAPAAFKYFDTTIDRKRYTSTKEVLDATLIHQSITGLYETRIDLSQLGGDGGGSSEAAAKGGTLGDQGSRGSDPLPEPRVTLTVEGIPTEFLVNTGAEHSVLTKPMGKMGSKRTVVAGATGSKVYPWTTKRLLKIGQKQVTHSFLVIPECPAPLLGRDLLTKLKAQIQFSTEGPQVTWEDRPAMCLVLNLEEEYRLHEKPVPPSIDPSWLQLFPMVWAEKAGMGLANQVPPVVVELKSDASPVAVRQYPMSKEAREGIRPHIQRFLDLGILVPCQSPWNTPLLPVKKPGTNDYRPVQDLREVNKRVQDIHPTVPNPYNLLSSLPPSHTWYSVLDLKDAFFCLKLHPNSQPLFAFEWRDPEKGNTGQLTWTRLPQGFKNSPTLFNEALHRDLASFRALNPQVVMLQYVDDLLVAAPTYRDCKEGTRRLLQELSKLGYRVSAKKAQLCREEVTYLGYLLKGGKRWLTPARKATVMKIPTPTTPRQVREFLGKAGFCRLFIPGFASLAAPLYPLTRPKVPFTWTEAHQEAFGRIKEALLSAPALALPDLTKPFALYVDEKEGVARGVLTQTLGPWRRPVAYLSKKLDPVASGWPTCLKAIAAVALLLKDADKLTLGQNVLVIAPHNLESIVRQPPDRWMTNARMTHYQSLLLNERVSFAPPAILNPATLLPVESDDTPIHICSEILAEETGTRPDLRDQPLPGVPAWYTDGSSFIMDGRRQAGAAIVDNKRTVWASNLPEGTSAQKAELIALTQALRLAEGKSINIYTDSRYAFATAHVHGAIYKQRGWLTSAGKDIKNKEEILALLEAIHLPKRVAIIHCPGHQRGTDPVATGNRKADEAAKQAAQSTRILTETTKNAGKRTADGSEFEKRTADGSEFESPKKKAKVE

SEQ ID NO: 1798 - protein, 2211 aa, synthetic construct
MPAAKRVKLDGGDKKYSIGLDIGTNSVGWAVITDEYKVPSKKFKVLGNTDRHSIKKNLIGALLFDSGETAEATRLKRTARRRYTRRKNRICYLQEIFSNEMAKVDDSFFHRLEESFLVEEDKKHERHPIFGNIVDEVAYHEKYPTIYHLRKKLVDSTDKADLRLIYLALAHMIKFRGHFLIEGDLNPDNSDVDKLFIQLVQTYNQLFEENPINASGVDAKAILSARLSKSRRLENLIAQLPGEKKNGLFGNLIALSLGLTPNFKSNFDLAEDAKLQLSKDTYDDDLDNLLAQIGDQYADLFLAAKNLSDAILLSDILRVNTEITKAPLSASMIKRYDEHHQDLTLLKALVRQQLPEKYKEIFFDQSKNGYAGYIDGGASQEEFYKFIKPILEKMDGTEELLVKLNREDLLRKQRTFDNGSIPHQIHLGELHAILRRQEDFYPFLKDNREKIEKILTFRIPYYVGPLARGNSRFAWMTRKSEETITPWNFEEVVDKGASAQSFIERMTNFDKNLPNEKVLPKHSLLYEYFTVYNELTKVKYVTEGMRKPAFLSGEQKKAIVDLLFKTNRKVTVKQLKEDYFKKIECFDSVEISGVEDRFNASLGTYHDLLKIIKDKDFLDNEENEDILEDIVLTLTLFEDREMIEERLKTYAHLFDDKVMKQLKRRRYTGWGRLSRKLINGIRDKQSGKTILDFLKSDGFANRNFMQLIHDDSLTFKEDIQKAQVSGQGDSLHEHIANLAGSPAIKKGILQTVKVVDELVKVMGRHKPENIVIEMARENQTTQKGQKNSRERMKRIEEGIKELGSQILKEHPVENTQLQNEKLYLYYLQNGRDMYVDQELDINRLSDYDVDHIVPQSFLKDDSIDNKVLTRSDKARGKSDNVPSEEVVKKMKNYWRQLLNAKLITQRKFDNLTKAERGGLSELDKAGFIKRQLVETRQITKHVAQILDSRMNTKYDENDKLIREVKVITLKSKLVSDFRKDFQFYKVREINNYHHAHDAYLNAVVGTALIKKYPKLESEFVYGDYKVYDVRKMIAKSEQEIGKATAKYFFYSNIMNFFKTEITLANGEIRKRPLIETNGETGEIVWDKGRDFATVRKVLSMPQVNIVKKTEVQTGGFSKESILPKRNSDKLIARKKDWDPKKYGGFDSPTVAYSVLVVAKVEKGKSKKLKSVKELLGITIMERSSFEKNPIDFLEAKGYKEVKKDLIIKLPKYSLFELENGRKRMLASAGELQKGNELALPSKYVNFLYLASHYEKLKGSPEDNEQKQLFVEQHKHYLDEIIEQISEFSKRVILADANLDKVLSAYNKHRDKPIREQAENIIHLFTLTNLGAPAAFKYFDTTIDRKRYTSTKEVLDATLIHQSITGLYETRIDLSQLGGDGGGGGGGGTLGDQGSRGSDPLPEPRVTLTVEGIPTEFLVNTGAEHSVLTKPMGKMGSKRTVVAGATGSKVYPWTTKRLLKIGQKQVTHSFLVIPECPAPLLGRDLLTKLKAQIQFSTEGPQVTWEDRPAMCLVLNLEEEYRLHEKPVPPSIDPSWLQLFPMVWAEKAGMGLANQVPPVVVELKSDASPVAVRQYPMSKEAREGIRPHIQRFLDLGILVPCQSPWNTPLLPVKKPGTNDYRPVQDLREVNKRVQDIHPTVPNPYNLLSSLPPSHTWYSVLDLKDAFFCLKLHPNSQPLFAFEWRDPEKGNTGQLTWTRLPQGFKNSPTLFNEALHRDLASFRALNPQVVMLQYVDDLLVAAPTYRDCKEGTRRLLQELSKLGYRVSAKKAQLCREEVTYLGYLLKGGKRWLTPARKATVMKIPTPTTPRQVREFLGKAGFCRLFIPGFASLAAPLYPLTRPKVPFTWTEAHQEAFGRIKEALLSAPALALPDLTKPFALYVDEKEGVARGVLTQTLGPWRRPVAYLSKKLDPVASGWPTCLKAIAAVALLLKDADKLTLGQNVLVIAPHNLESIVRQPPDRWMTNARMTHYQSLLLNERVSFAPPAILNPATLLPVESDDTPIHICSEILAEETGTRPDLRDQPLPGVPAWYTDGSSFIMDGRRQAGAAIVDNKRTVWASNLPEGTSAQKAELIALTQALRLAEGKSINIYTDSRYAFATAHVHGAIYKQRGWLTSAGKDIKNKEEILALLEAIHLPKRVAIIHCPGHQRGTDPVATGNRKADEAAKQAAQSTRILTETTKNAGKRTADGSEFEKRTADGSEFESPKKKAKVE

SEQ ID NO: 1799 - protein, 2215 aa, synthetic construct
MPAAKRVKLDGGDKKYSIGLDIGTNSVGWAVITDEYKVPSKKFKVLGNTDRHSIKKNLIGALLFDSGETAEATRLKRTARRRYTRRKNRICYLQEIFSNEMAKVDDSFFHRLEESFLVEEDKKHERHPIFGNIVDEVAYHEKYPTIYHLRKKLVDSTDKADLRLIYLALAHMIKFRGHFLIEGDLNPDNSDVDKLFIQLVQTYNQLFEENPINASGVDAKAILSARLSKSRRLENLIAQLPGEKKNGLFGNLIALSLGLTPNFKSNFDLAEDAKLQLSKDTYDDDLDNLLAQIGDQYADLFLAAKNLSDAILLSDILRVNTEITKAPLSASMIKRYDEHHQDLTLLKALVRQQLPEKYKEIFFDQSKNGYAGYIDGGASQEEFYKFIKPILEKMDGTEELLVKLNREDLLRKQRTFDNGSIPHQIHLGELHAILRRQEDFYPFLKDNREKIEKILTFRIPYYVGPLARGNSRFAWMTRKSEETITPWNFEEVVDKGASAQSFIERMTNFDKNLPNEKVLPKHSLLYEYFTVYNELTKVKYVTEGMRKPAFLSGEQKKAIVDLLFKTNRKVTVKQLKEDYFKKIECFDSVEISGVEDRFNASLGTYHDLLKIIKDKDFLDNEENEDILEDIVLTLTLFEDREMIEERLKTYAHLFDDKVMKQLKRRRYTGWGRLSRKLINGIRDKQSGKTILDFLKSDGFANRNFMQLIHDDSLTFKEDIQKAQVSGQGDSLHEHIANLAGSPAIKKGILQTVKVVDELVKVMGRHKPENIVIEMARENQTTQKGQKNSRERMKRIEEGIKELGSQILKEHPVENTQLQNEKLYLYYLQNGRDMYVDQELDINRLSDYDVDHIVPQSFLKDDSIDNKVLTRSDKARGKSDNVPSEEVVKKMKNYWRQLLNAKLITQRKFDNLTKAERGGLSELDKAGFIKRQLVETRQITKHVAQILDSRMNTKYDENDKLIREVKVITLKSKLVSDFRKDFQFYKVREINNYHHAHDAYLNAVVGTALIKKYPKLESEFVYGDYKVYDVRKMIAKSEQEIGKATAKYFFYSNIMNFFKTEITLANGEIRKRPLIETNGETGEIVWDKGRDFATVRKVLSMPQVNIVKKTEVQTGGFSKESILPKRNSDKLIARKKDWDPKKYGGFDSPTVAYSVLVVAKVEKGKSKKLKSVKELLGITIMERSSFEKNPIDFLEAKGYKEVKKDLIIKLPKYSLFELENGRKRMLASAGELQKGNELALPSKYVNFLYLASHYEKLKGSPEDNEQKQLFVEQHKHYLDEIIEQISEFSKRVILADANLDKVLSAYNKHRDKPIREQAENIIHLFTLTNLGAPAAFKYFDTTIDRKRYTSTKEVLDATLIHQSITGLYETRIDLSQLGGDGGGGGGGGGGGGTLGDQGSRGSDPLPEPRVTLTVEGIPTEFLVNTGAEHSVLTKPMGKMGSKRTVVAGATGSKVYPWTTKRLLKIGQKQVTHSFLVIPECPAPLLGRDLLTKLKAQIQFSTEGPQVTWEDRPAMCLVLNLEEEYRLHEKPVPPSIDPSWLQLFPMVWAEKAGMGLANQVPPVVVELKSDASPVAVRQYPMSKEAREGIRPHIQRFLDLGILVPCQSPWNTPLLPVKKPGTNDYRPVQDLREVNKRVQDIHPTVPNPYNLLSSLPPSHTWYSVLDLKDAFFCLKLHPNSQPLFAFEWRDPEKGNTGQLTWTRLPQGFKNSPTLFNEALHRDLASFRALNPQVVMLQYVDDLLVAAPTYRDCKEGTRRLLQELSKLGYRVSAKKAQLCREEVTYLGYLLKGGKRWLTPARKATVMKIPTPTTPRQVREFLGKAGFCRLFIPGFASLAAPLYPLTRPKVPFTWTEAHQEAFGRIKEALLSAPALALPDLTKPFALYVDEKEGVARGVLTQTLGPWRRPVAYLSKKLDPVASGWPTCLKAIAAVALLLKDADKLTLGQNVLVIAPHNLESIVRQPPDRWMTNARMTHYQSLLLNERVSFAPPAILNPATLLPVESDDTPIHICSEILAEETGTRPDLRDQPLPGVPAWYTDGSSFIMDGRRQAGAAIVDNKRTVWASNLPEGTSAQKAELIALTQALRLAEGKSINIYTDSRYAFATAHVHGAIYKQRGWLTSAGKDIKNKEEILALLEAIHLPKRVAIIHCPGHQRGTDPVATGNRKADEAAKQAAQSTRILTETTKNAGKRTADGSEFEKRTADGSEFESPKKKAKVE

SEQ ID NO: 1800 - protein, 2223 aa, synthetic construct
MPAAKRVKLDGGDKKYSIGLDIGTNSVGWAVITDEYKVPSKKFKVLGNTDRHSIKKNLIGALLFDSGETAEATRLKRTARRRYTRRKNRICYLQEIFSNEMAKVDDSFFHRLEESFLVEEDKKHERHPIFGNIVDEVAYHEKYPTIYHLRKKLVDSTDKADLRLIYLALAHMIKFRGHFLIEGDLNPDNSDVDKLFIQLVQTYNQLFEENPINASGVDAKAILSARLSKSRRLENLIAQLPGEKKNGLFGNLIALSLGLTPNFKSNFDLAEDAKLQLSKDTYDDDLDNLLAQIGDQYADLFLAAKNLSDAILLSDILRVNTEITKAPLSASMIKRYDEHHQDLTLLKALVRQQLPEKYKEIFFDQSKNGYAGYIDGGASQEEFYKFIKPILEKMDGTEELLVKLNREDLLRKQRTFDNGSIPHQIHLGELHAILRRQEDFYPFLKDNREKIEKILTFRIPYYVGPLARGNSRFAWMTRKSEETITPWNFEEVVDKGASAQSFIERMTNFDKNLPNEKVLPKHSLLYEYFTVYNELTKVKYVTEGMRKPAFLSGEQKKAIVDLLFKTNRKVTVKQLKEDYFKKIECFDSVEISGVEDRFNASLGTYHDLLKIIKDKDFLDNEENEDILEDIVLTLTLFEDREMIEERLKTYAHLFDDKVMKQLKRRRYTGWGRLSRKLINGIRDKQSGKTILDFLKSDGFANRNFMQLIHDDSLTFKEDIQKAQVSGQGDSLHEHIANLAGSPAIKKGILQTVKVVDELVKVMGRHKPENIVIEMARENQTTQKGQKNSRERMKRIEEGIKELGSQILKEHPVENTQLQNEKLYLYYLQNGRDMYVDQELDINRLSDYDVDHIVPQSFLKDDSIDNKVLTRSDKARGKSDNVPSEEVVKKMKNYWRQLLNAKLITQRKFDNLTKAERGGLSELDKAGFIKRQLVETRQITKHVAQILDSRMNTKYDENDKLIREVKVITLKSKLVSDFRKDFQFYKVREINNYHHAHDAYLNAVVGTALIKKYPKLESEFVYGDYKVYDVRKMIAKSEQEIGKATAKYFFYSNIMNFFKTEITLANGEIRKRPLIETNGETGEIVWDKGRDFATVRKVLSMPQVNIVKKTEVQTGGFSKESILPKRNSDKLIARKKDWDPKKYGGFDSPTVAYSVLVVAKVEKGKSKKLKSVKELLGITIMERSSFEKNPIDFLEAKGYKEVKKDLIIKLPKYSLFELENGRKRMLASAGELQKGNELALPSKYVNFLYLASHYEKLKGSPEDNEQKQLFVEQHKHYLDEIIEQISEFSKRVILADANLDKVLSAYNKHRDKPIREQAENIIHLFTLTNLGAPAAFKYFDTTIDRKRYTSTKEVLDATLIHQSITGLYETRIDLSQLGGDGGSGSETPGTSESATPESGGTLGDQGSRGSDPLPEPRVTLTVEGIPTEFLVNTGAEHSVLTKPMGKMGSKRTVVAGATGSKVYPWTTKRLLKIGQKQVTHSFLVIPECPAPLLGRDLLTKLKAQIQFSTEGPQVTWEDRPAMCLVLNLEEEYRLHEKPVPPSIDPSWLQLFPMVWAEKAGMGLANQVPPVVVELKSDASPVAVRQYPMSKEAREGIRPHIQRFLDLGILVPCQSPWNTPLLPVKKPGTNDYRPVQDLREVNKRVQDIHPTVPNPYNLLSSLPPSHTWYSVLDLKDAFFCLKLHPNSQPLFAFEWRDPEKGNTGQLTWTRLPQGFKNSPTLFNEALHRDLASFRALNPQVVMLQYVDDLLVAAPTYRDCKEGTRRLLQELSKLGYRVSAKKAQLCREEVTYLGYLLKGGKRWLTPARKATVMKIPTPTTPRQVREFLGKAGFCRLFIPGFASLAAPLYPLTRPKVPFTWTEAHQEAFGRIKEALLSAPALALPDLTKPFALYVDEKEGVARGVLTQTLGPWRRPVAYLSKKLDPVASGWPTCLKAIAAVALLLKDADKLTLGQNVLVIAPHNLESIVRQPPDRWMTNARMTHYQSLLLNERVSFAPPAILNPATLLPVESDDTPIHICSEILAEETGTRPDLRDQPLPGVPAWYTDGSSFIMDGRRQAGAAIVDNKRTVWASNLPEGTSAQKAELIALTQALRLAEGKSINIYTDSRYAFATAHVHGAIYKQRGWLTSAGKDIKNKEEILALLEAIHLPKRVAIIHCPGHQRGTDPVATGNRKADEAAKQAAQSTRILTETTKNAGKRTADGSEFEKRTADGSEFESPKKKAKVE

SEQ ID NO: 1801 - protein, 2218 aa, synthetic construct
MPAAKRVKLDGGDKKYSIGLDIGTNSVGWAVITDEYKVPSKKFKVLGNTDRHSIKKNLIGALLFDSGETAEATRLKRTARRRYTRRKNRICYLQEIFSNEMAKVDDSFFHRLEESFLVEEDKKHERHPIFGNIVDEVAYHEKYPTIYHLRKKLVDSTDKADLRLIYLALAHMIKFRGHFLIEGDLNPDNSDVDKLFIQLVQTYNQLFEENPINASGVDAKAILSARLSKSRRLENLIAQLPGEKKNGLFGNLIALSLGLTPNFKSNFDLAEDAKLQLSKDTYDDDLDNLLAQIGDQYADLFLAAKNLSDAILLSDILRVNTEITKAPLSASMIKRYDEHHQDLTLLKALVRQQLPEKYKEIFFDQSKNGYAGYIDGGASQEEFYKFIKPILEKMDGTEELLVKLNREDLLRKQRTFDNGSIPHQIHLGELHAILRRQEDFYPFLKDNREKIEKILTFRIPYYVGPLARGNSRFAWMTRKSEETITPWNFEEVVDKGASAQSFIERMTNFDKNLPNEKVLPKHSLLYEYFTVYNELTKVKYVTEGMRKPAFLSGEQKKAIVDLLFKTNRKVTVKQLKEDYFKKIECFDSVEISGVEDRFNASLGTYHDLLKIIKDKDFLDNEENEDILEDIVLTLTLFEDREMIEERLKTYAHLFDDKVMKQLKRRRYTGWGRLSRKLINGIRDKQSGKTILDFLKSDGFANRNFMQLIHDDSLTFKEDIQKAQVSGQGDSLHEHIANLAGSPAIKKGILQTVKVVDELVKVMGRHKPENIVIEMARENQTTQKGQKNSRERMKRIEEGIKELGSQILKEHPVENTQLQNEKLYLYYLQNGRDMYVDQELDINRLSDYDVDHIVPQSFLKDDSIDNKVLTRSDKARGKSDNVPSEEVVKKMKNYWRQLLNAKLITQRKFDNLTKAERGGLSELDKAGFIKRQLVETRQITKHVAQILDSRMNTKYDENDKLIREVKVITLKSKLVSDFRKDFQFYKVREINNYHHAHDAYLNAVVGTALIKKYPKLESEFVYGDYKVYDVRKMIAKSEQEIGKATAKYFFYSNIMNFFKTEITLANGEIRKRPLIETNGETGEIVWDKGRDFATVRKVLSMPQVNIVKKTEVQTGGFSKESILPKRNSDKLIARKKDWDPKKYGGFDSPTVAYSVLVVAKVEKGKSKKLKSVKELLGITIMERSSFEKNPIDFLEAKGYKEVKKDLIIKLPKYSLFELENGRKRMLASAGELQKGNELALPSKYVNFLYLASHYEKLKGSPEDNEQKQLFVEQHKHYLDEIIEQISEFSKRVILADANLDKVLSAYNKHRDKPIREQAENIIHLFTLTNLGAPAAFKYFDTTIDRKRYTSTKEVLDATLIHQSITGLYETRIDLSQLGGDGGGSSGGSEAAAKGGTLGDQGSRGSDPLPEPRVTLTVEGIPTEFLVNTGAEHSVLTKPMGKMGSKRTVVAGATGSKVYPWTTKRLLKIGQKQVTHSFLVIPECPAPLLGRDLLTKLKAQIQFSTEGPQVTWEDRPAMCLVLNLEEEYRLHEKPVPPSIDPSWLQLFPMVWAEKAGMGLANQVPPVVVELKSDASPVAVRQYPMSKEAREGIRPHIQRFLDLGILVPCQSPWNTPLLPVKKPGTNDYRPVQDLREVNKRVQDIHPTVPNPYNLLSSLPPSHTWYSVLDLKDAFFCLKLHPNSQPLFAFEWRDPEKGNTGQLTWTRLPQGFKNSPTLFNEALHRDLASFRALNPQVVMLQYVDDLLVAAPTYRDCKEGTRRLLQELSKLGYRVSAKKAQLCREEVTYLGYLLKGGKRWLTPARKATVMKIPTPTTPRQVREFLGKAGFCRLFIPGFASLAAPLYPLTRPKVPFTWTEAHQEAFGRIKEALLSAPALALPDLTKPFALYVDEKEGVARGVLTQTLGPWRRPVAYLSKKLDPVASGWPTCLKAIAAVALLLKDADKLTLGQNVLVIAPHNLESIVRQPPDRWMTNARMTHYQSLLLNERVSFAPPAILNPATLLPVESDDTPIHICSEILAEETGTRPDLRDQPLPGVPAWYTDGSSFIMDGRRQAGAAIVDNKRTVWASNLPEGTSAQKAELIALTQALRLAEGKSINIYTDSRYAFATAHVHGAIYKQRGWLTSAGKDIKNKEEILALLEAIHLPKRVAIIHCPGHQRGTDPVATGNRKADEAAKQAAQSTRILTETTKNAGKRTADGSEFEKRTADGSEFESPKKKAKVE

SEQ ID NO: 1802 - protein, 2216 aa, synthetic construct
MPAAKRVKLDGGDKKYSIGLDIGTNSVGWAVITDEYKVPSKKFKVLGNTDRHSIKKNLIGALLFDSGETAEATRLKRTARRRYTRRKNRICYLQEIFSNEMAKVDDSFFHRLEESFLVEEDKKHERHPIFGNIVDEVAYHEKYPTIYHLRKKLVDSTDKADLRLIYLALAHMIKFRGHFLIEGDLNPDNSDVDKLFIQLVQTYNQLFEENPINASGVDAKAILSARLSKSRRLENLIAQLPGEKKNGLFGNLIALSLGLTPNFKSNFDLAEDAKLQLSKDTYDDDLDNLLAQIGDQYADLFLAAKNLSDAILLSDILRVNTEITKAPLSASMIKRYDEHHQDLTLLKALVRQQLPEKYKEIFFDQSKNGYAGYIDGGASQEEFYKFIKPILEKMDGTEELLVKLNREDLLRKQRTFDNGSIPHQIHLGELHAILRRQEDFYPFLKDNREKIEKILTFRIPYYVGPLARGNSRFAWMTRKSEETITPWNFEEVVDKGASAQSFIERMTNFDKNLPNEKVLPKHSLLYEYFTVYNELTKVKYVTEGMRKPAFLSGEQKKAIVDLLFKTNRKVTVKQLKEDYFKKIECFDSVEISGVEDRFNASLGTYHDLLKIIKDKDFLDNEENEDILEDIVLTLTLFEDREMIEERLKTYAHLFDDKVMKQLKRRRYTGWGRLSRKLINGIRDKQSGKTILDFLKSDGFANRNFMQLIHDDSLTFKEDIQKAQVSGQGDSLHEHIANLAGSPAIKKGILQTVKVVDELVKVMGRHKPENIVIEMARENQTTQKGQKNSRERMKRIEEGIKELGSQILKEHPVENTQLQNEKLYLYYLQNGRDMYVDQELDINRLSDYDVDHIVPQSFLKDDSIDNKVLTRSDKARGKSDNVPSEEVVKKMKNYWRQLLNAKLITQRKFDNLTKAERGGLSELDKAGFIKRQLVETRQITKHVAQILDSRMNTKYDENDKLIREVKVITLKSKLVSDFRKDFQFYKVREINNYHHAHDAYLNAVVGTALIKKYPKLESEFVYGDYKVYDVRKMIAKSEQEIGKATAKYFFYSNIMNFFKTEITLANGEIRKRPLIETNGETGEIVWDKGRDFATVRKVLSMPQVNIVKKTEVQTGGFSKESILPKRNSDKLIARKKDWDPKKYGGFDSPTVAYSVLVVAKVEKGKSKKLKSVKELLGITIMERSSFEKNPIDFLEAKGYKEVKKDLIIKLPKYSLFELENGRKRMLASAGELQKGNELALPSKYVNFLYLASHYEKLKGSPEDNEQKQLFVEQHKHYLDEIIEQISEFSKRVILADANLDKVLSAYNKHRDKPIREQAENIIHLFTLTNLGAPAAFKYFDTTIDRKRYTSTKEVLDATLIHQSITGLYETRIDLSQLGGDGGGGSPAPGSSGGTLGDQGSRGSDPLPEPRVTLTVEGIPTEFLVNTGAEHSVLTKPMGKMGSKRTVVAGATGSKVYPWTTKRLLKIGQKQVTHSFLVIPECPAPLLGRDLLTKLKAQIQFSTEGPQVTWEDRPAMCLVLNLEEEYRLHEKPVPPSIDPSWLQLFPMVWAEKAGMGLANQVPPVVVELKSDASPVAVRQYPMSKEAREGIRPHIQRFLDLGILVPCQSPWNTPLLPVKKPGTNDYRPVQDLREVNKRVQDIHPTVPNPYNLLSSLPPSHTWYSVLDLKDAFFCLKLHPNSQPLFAFEWRDPEKGNTGQLTWTRLPQGFKNSPTLFNEALHRDLASFRALNPQVVMLQYVDDLLVAAPTYRDCKEGTRRLLQELSKLGYRVSAKKAQLCREEVTYLGYLLKGGKRWLTPARKATVMKIPTPTTPRQVREFLGKAGFCRLFIPGFASLAAPLYPLTRPKVPFTWTEAHQEAFGRIKEALLSAPALALPDLTKPFALYVDEKEGVARGVLTQTLGPWRRPVAYLSKKLDPVASGWPTCLKAIAAVALLLKDADKLTLGQNVLVIAPHNLESIVRQPPDRWMTNARMTHYQSLLLNERVSFAPPAILNPATLLPVESDDTPIHICSEILAEETGTRPDLRDQPLPGVPAWYTDGSSFIMDGRRQAGAAIVDNKRTVWASNLPEGTSAQKAELIALTQALRLAEGKSINIYTDSRYAFATAHVHGAIYKQRGWLTSAGKDIKNKEEILALLEAIHLPKRVAIIHCPGHQRGTDPVATGNRKADEAAKQAAQSTRILTETTKNAGKRTADGSEFEKRTADGSEFESPKKKAKVE

SEQ ID NO: 1803 - protein, 2237 aa, synthetic construct
MPAAKRVKLDGGDKKYSIGLDIGTNSVGWAVITDEYKVPSKKFKVLGNTDRHSIKKNLIGALLFDSGETAEATRLKRTARRRYTRRKNRICYLQEIFSNEMAKVDDSFFHRLEESFLVEEDKKHERHPIFGNIVDEVAYHEKYPTIYHLRKKLVDSTDKADLRLIYLALAHMIKFRGHFLIEGDLNPDNSDVDKLFIQLVQTYNQLFEENPINASGVDAKAILSARLSKSRRLENLIAQLPGEKKNGLFGNLIALSLGLTPNFKSNFDLAEDAKLQLSKDTYDDDLDNLLAQIGDQYADLFLAAKNLSDAILLSDILRVNTEITKAPLSASMIKRYDEHHQDLTLLKALVRQQLPEKYKEIFFDQSKNGYAGYIDGGASQEEFYKFIKPILEKMDGTEELLVKLNREDLLRKQRTFDNGSIPHQIHLGELHAILRRQEDFYPFLKDNREKIEKILTFRIPYYVGPLARGNSRFAWMTRKSEETITPWNFEEVVDKGASAQSFIERMTNFDKNLPNEKVLPKHSLLYEYFTVYNELTKVKYVTEGMRKPAFLSGEQKKAIVDLLFKTNRKVTVKQLKEDYFKKIECFDSVEISGVEDRFNASLGTYHDLLKIIKDKDFLDNEENEDILEDIVLTLTLFEDREMIEERLKTYAHLFDDKVMKQLKRRRYTGWGRLSRKLINGIRDKQSGKTILDFLKSDGFANRNFMQLIHDDSLTFKEDIQKAQVSGQGDSLHEHIANLAGSPAIKKGILQTVKVVDELVKVMGRHKPENIVIEMARENQTTQKGQKNSRERMKRIEEGIKELGSQILKEHPVENTQLQNEKLYLYYLQNGRDMYVDQELDINRLSDYDVDHIVPQSFLKDDSIDNKVLTRSDKARGKSDNVPSEEVVKKMKNYWRQLLNAKLITQRKFDNLTKAERGGLSELDKAGFIKRQLVETRQITKHVAQILDSRMNTKYDENDKLIREVKVITLKSKLVSDFRKDFQFYKVREINNYHHAHDAYLNAVVGTALIKKYPKLESEFVYGDYKVYDVRKMIAKSEQEIGKATAKYFFYSNIMNFFKTEITLANGEIRKRPLIETNGETGEIVWDKGRDFATVRKVLSMPQVNIVKKTEVQTGGFSKESILPKRNSDKLIARKKDWDPKKYGGFDSPTVAYSVLVVAKVEKGKSKKLKSVKELLGITIMERSSFEKNPIDFLEAKGYKEVKKDLIIKLPKYSLFELENGRKRMLASAGELQKGNELALPSKYVNFLYLASHYEKLKGSPEDNEQKQLFVEQHKHYLDEIIEQISEFSKRVILADANLDKVLSAYNKHRDKPIREQAENIIHLFTLTNLGAPAAFKYFDTTIDRKRYTSTKEVLDATLIHQSITGLYETRIDLSQLGGDGGGGGGSGGGGSGGGGSGGGGSGGGGSGGGGSGGTLGDQGSRGSDPLPEPRVTLTVEGIPTEFLVNTGAEHSVLTKPMGKMGSKRTVVAGATGSKVYPWTTKRLLKIGQKQVTHSFLVIPECPAPLLGRDLLTKLKAQIQFSTEGPQVTWEDRPAMCLVLNLEEEYRLHEKPVPPSIDPSWLQLFPMVWAEKAGMGLANQVPPVVVELKSDASPVAVRQYPMSKEAREGIRPHIQRFLDLGILVPCQSPWNTPLLPVKKPGTNDYRPVQDLREVNKRVQDIHPTVPNPYNLLSSLPPSHTWYSVLDLKDAFFCLKLHPNSQPLFAFEWRDPEKGNTGQLTWTRLPQGFKNSPTLFNEALHRDLASFRALNPQVVMLQYVDDLLVAAPTYRDCKEGTRRLLQELSKLGYRVSAKKAQLCREEVTYLGYLLKGGKRWLTPARKATVMKIPTPTTPRQVREFLGKAGFCRLFIPGFASLAAPLYPLTRPKVPFTWTEAHQEAFGRIKEALLSAPALALPDLTKPFALYVDEKEGVARGVLTQTLGPWRRPVAYLSKKLDPVASGWPTCLKAIAAVALLLKDADKLTLGQNVLVIAPHNLESIVRQPPDRWMTNARMTHYQSLLLNERVSFAPPAILNPATLLPVESDDTPIHICSEILAEETGTRPDLRDQPLPGVPAWYTDGSSFIMDGRRQAGAAIVDNKRTVWASNLPEGTSAQKAELIALTQALRLAEGKSINIYTDSRYAFATAHVHGAIYKQRGWLTSAGKDIKNKEEILALLEAIHLPKRVAIIHCPGHQRGTDPVATGNRKADEAAKQAAQSTRILTETTKNAGKRTADGSEFEKRTADGSEFESPKKKAKVE

SEQ ID NO: 1804 - protein, 2218 aa, synthetic construct
MPAAKRVKLDGGDKKYSIGLDIGTNSVGWAVITDEYKVPSKKFKVLGNTDRHSIKKNLIGALLFDSGETAEATRLKRTARRRYTRRKNRICYLQEIFSNEMAKVDDSFFHRLEESFLVEEDKKHERHPIFGNIVDEVAYHEKYPTIYHLRKKLVDSTDKADLRLIYLALAHMIKFRGHFLIEGDLNPDNSDVDKLFIQLVQTYNQLFEENPINASGVDAKAILSARLSKSRRLENLIAQLPGEKKNGLFGNLIALSLGLTPNFKSNFDLAEDAKLQLSKDTYDDDLDNLLAQIGDQYADLFLAAKNLSDAILLSDILRVNTEITKAPLSASMIKRYDEHHQDLTLLKALVRQQLPEKYKEIFFDQSKNGYAGYIDGGASQEEFYKFIKPILEKMDGTEELLVKLNREDLLRKQRTFDNGSIPHQIHLGELHAILRRQEDFYPFLKDNREKIEKILTFRIPYYVGPLARGNSRFAWMTRKSEETITPWNFEEVVDKGASAQSFIERMTNFDKNLPNEKVLPKHSLLYEYFTVYNELTKVKYVTEGMRKPAFLSGEQKKAIVDLLFKTNRKVTVKQLKEDYFKKIECFDSVEISGVEDRFNASLGTYHDLLKIIKDKDFLDNEENEDILEDIVLTLTLFEDREMIEERLKTYAHLFDDKVMKQLKRRRYTGWGRLSRKLINGIRDKQSGKTILDFLKSDGFANRNFMQLIHDDSLTFKEDIQKAQVSGQGDSLHEHIANLAGSPAIKKGILQTVKVVDELVKVMGRHKPENIVIEMARENQTTQKGQKNSRERMKRIEEGIKELGSQILKEHPVENTQLQNEKLYLYYLQNGRDMYVDQELDINRLSDYDVDHIVPQSFLKDDSIDNKVLTRSDKARGKSDNVPSEEVVKKMKNYWRQLLNAKLITQRKFDNLTKAERGGLSELDKAGFIKRQLVETRQITKHVAQILDSRMNTKYDENDKLIREVKVITLKSKLVSDFRKDFQFYKVREINNYHHAHDAYLNAVVGTALIKKYPKLESEFVYGDYKVYDVRKMIAKSEQEIGKATAKYFFYSNIMNFFKTEITLANGEIRKRPLIETNGETGEIVWDKGRDFATVRKVLSMPQVNIVKKTEVQTGGFSKESILPKRNSDKLIARKKDWDPKKYGGFDSPTVAYSVLVVAKVEKGKSKKLKSVKELLGITIMERSSFEKNPIDFLEAKGYKEVKKDLIIKLPKYSLFELENGRKRMLASAGELQKGNELALPSKYVNFLYLASHYEKLKGSPEDNEQKQLFVEQHKHYLDEIIEQISEFSKRVILADANLDKVLSAYNKHRDKPIREQAENIIHLFTLTNLGAPAAFKYFDTTIDRKRYTSTKEVLDATLIHQSITGLYETRIDLSQLGGDGGEAAAKGSSPAPGGTLGDQGSRGSDPLPEPRVTLTVEGIPTEFLVNTGAEHSVLTKPMGKMGSKRTVVAGATGSKVYPWTTKRLLKIGQKQVTHSFLVIPECPAPLLGRDLLTKLKAQIQFSTEGPQVTWEDRPAMCLVLNLEEEYRLHEKPVPPSIDPSWLQLFPMVWAEKAGMGLANQVPPVVVELKSDASPVAVRQYPMSKEAREGIRPHIQRFLDLGILVPCQSPWNTPLLPVKKPGTNDYRPVQDLREVNKRVQDIHPTVPNPYNLLSSLPPSHTWYSVLDLKDAFFCLKLHPNSQPLFAFEWRDPEKGNTGQLTWTRLPQGFKNSPTLFNEALHRDLASFRALNPQVVMLQYVDDLLVAAPTYRDCKEGTRRLLQELSKLGYRVSAKKAQLCREEVTYLGYLLKGGKRWLTPARKATVMKIPTPTTPRQVREFLGKAGFCRLFIPGFASLAAPLYPLTRPKVPFTWTEAHQEAFGRIKEALLSAPALALPDLTKPFALYVDEKEGVARGVLTQTLGPWRRPVAYLSKKLDPVASGWPTCLKAIAAVALLLKDADKLTLGQNVLVIAPHNLESIVRQPPDRWMTNARMTHYQSLLLNERVSFAPPAILNPATLLPVESDDTPIHICSEILAEETGTRPDLRDQPLPGVPAWYTDGSSFIMDGRRQAGAAIVDNKRTVWASNLPEGTSAQKAELIALTQALRLAEGKSINIYTDSRYAFATAHVHGAIYKQRGWLTSAGKDIKNKEEILALLEAIHLPKRVAIIHCPGHQRGTDPVATGNRKADEAAKQAAQSTRILTETTKNAGKRTADGSEFEKRTADGSEFESPKKKAKVE

SEQ ID NO: 1805 - protein, 2218 aa, synthetic construct
MPAAKRVKLDGGDKKYSIGLDIGTNSVGWAVITDEYKVPSKKFKVLGNTDRHSIKKNLIGALLFDSGETAEATRLKRTARRRYTRRKNRICYLQEIFSNEMAKVDDSFFHRLEESFLVEEDKKHERHPIFGNIVDEVAYHEKYPTIYHLRKKLVDSTDKADLRLIYLALAHMIKFRGHFLIEGDLNPDNSDVDKLFIQLVQTYNQLFEENPINASGVDAKAILSARLSKSRRLENLIAQLPGEKKNGLFGNLIALSLGLTPNFKSNFDLAEDAKLQLSKDTYDDDLDNLLAQIGDQYADLFLAAKNLSDAILLSDILRVNTEITKAPLSASMIKRYDEHHQDLTLLKALVRQQLPEKYKEIFFDQSKNGYAGYIDGGASQEEFYKFIKPILEKMDGTEELLVKLNREDLLRKQRTFDNGSIPHQIHLGELHAILRRQEDFYPFLKDNREKIEKILTFRIPYYVGPLARGNSRFAWMTRKSEETITPWNFEEVVDKGASAQSFIERMTNFDKNLPNEKVLPKHSLLYEYFTVYNELTKVKYVTEGMRKPAFLSGEQKKAIVDLLFKTNRKVTVKQLKEDYFKKIECFDSVEISGVEDRFNASLGTYHDLLKIIKDKDFLDNEENEDILEDIVLTLTLFEDREMIEERLKTYAHLFDDKVMKQLKRRRYTGWGRLSRKLINGIRDKQSGKTILDFLKSDGFANRNFMQLIHDDSLTFKEDIQKAQVSGQGDSLHEHIANLAGSPAIKKGILQTVKVVDELVKVMGRHKPENIVIEMARENQTTQKGQKNSRERMKRIEEGIKELGSQILKEHPVENTQLQNEKLYLYYLQNGRDMYVDQELDINRLSDYDVDHIVPQSFLKDDSIDNKVLTRSDKARGKSDNVPSEEVVKKMKNYWRQLLNAKLITQRKFDNLTKAERGGLSELDKAGFIKRQLVETRQITKHVAQILDSRMNTKYDENDKLIREVKVITLKSKLVSDFRKDFQFYKVREINNYHHAHDAYLNAVVGTALIKKYPKLESEFVYGDYKVYDVRKMIAKSEQEIGKATAKYFFYSNIMNFFKTEITLANGEIRKRPLIETNGETGEIVWDKGRDFATVRKVLSMPQVNIVKKTEVQTGGFSKESILPKRNSDKLIARKKDWDPKKYGGFDSPTVAYSVLVVAKVEKGKSKKLKSVKELLGITIMERSSFEKNPIDFLEAKGYKEVKKDLIIKLPKYSLFELENGRKRMLASAGELQKGNELALPSKYVNFLYLASHYEKLKGSPEDNEQKQLFVEQHKHYLDEIIEQISEFSKRVILADANLDKVLSAYNKHRDKPIREQAENIIHLFTLTNLGAPAAFKYFDTTIDRKRYTSTKEVLDATLIHQSITGLYETRIDLSQLGGDGGGGSGSSEAAAKGGTLGDQGSRGSDPLPEPRVTLTVEGIPTEFLVNTGAEHSVLTKPMGKMGSKRTVVAGATGSKVYPWTTKRLLKIGQKQVTHSFLVIPECPAPLLGRDLLTKLKAQIQFSTEGPQVTWEDRPAMCLVLNLEEEYRLHEKPVPPSIDPSWLQLFPMVWAEKAGMGLANQVPPVVVELKSDASPVAVRQYPMSKEAREGIRPHIQRFLDLGILVPCQSPWNTPLLPVKKPGTNDYRPVQDLREVNKRVQDIHPTVPNPYNLLSSLPPSHTWYSVLDLKDAFFCLKLHPNSQPLFAFEWRDPEKGNTGQLTWTRLPQGFKNSPTLFNEALHRDLASFRALNPQVVMLQYVDDLLVAAPTYRDCKEGTRRLLQELSKLGYRVSAKKAQLCREEVTYLGYLLKGGKRWLTPARKATVMKIPTPTTPRQVREFLGKAGFCRLFIPGFASLAAPLYPLTRPKVPFTWTEAHQEAFGRIKEALLSAPALALPDLTKPFALYVDEKEGVARGVLTQTLGPWRRPVAYLSKKLDPVASGWPTCLKAIAAVALLLKDADKLTLGQNVLVIAPHNLESIVRQPPDRWMTNARMTHYQSLLLNERVSFAPPAILNPATLLPVESDDTPIHICSEILAEETGTRPDLRDQPLPGVPAWYTDGSSFIMDGRRQAGAAIVDNKRTVWASNLPEGTSAQKAELIALTQALRLAEGKSINIYTDSRYAFATAHVHGAIYKQRGWLTSAGKDIKNKEEILALLEAIHLPKRVAIIHCPGHQRGTDPVATGNRKADEAAKQAAQSTRILTETTKNAGKRTADGSEFEKRTADGSEFESPKKKAKVE

SEQ ID NO: 1806 - protein, 2216 aa, synthetic construct
MPAAKRVKLDGGDKKYSIGLDIGTNSVGWAVITDEYKVPSKKFKVLGNTDRHSIKKNLIGALLFDSGETAEATRLKRTARRRYTRRKNRICYLQEIFSNEMAKVDDSFFHRLEESFLVEEDKKHERHPIFGNIVDEVAYHEKYPTIYHLRKKLVDSTDKADLRLIYLALAHMIKFRGHFLIEGDLNPDNSDVDKLFIQLVQTYNQLFEENPINASGVDAKAILSARLSKSRRLENLIAQLPGEKKNGLFGNLIALSLGLTPNFKSNFDLAEDAKLQLSKDTYDDDLDNLLAQIGDQYADLFLAAKNLSDAILLSDILRVNTEITKAPLSASMIKRYDEHHQDLTLLKALVRQQLPEKYKEIFFDQSKNGYAGYIDGGASQEEFYKFIKPILEKMDGTEELLVKLNREDLLRKQRTFDNGSIPHQIHLGELHAILRRQEDFYPFLKDNREKIEKILTFRIPYYVGPLARGNSRFAWMTRKSEETITPWNFEEVVDKGASAQSFIERMTNFDKNLPNEKVLPKHSLLYEYFTVYNELTKVKYVTEGMRKPAFLSGEQKKAIVDLLFKTNRKVTVKQLKEDYFKKIECFDSVEISGVEDRFNASLGTYHDLLKIIKDKDFLDNEENEDILEDIVLTLTLFEDREMIEERLKTYAHLFDDKVMKQLKRRRYTGWGRLSRKLINGIRDKQSGKTILDFLKSDGFANRNFMQLIHDDSLTFKEDIQKAQVSGQGDSLHEHIANLAGSPAIKKGILQTVKVVDELVKVMGRHKPENIVIEMARENQTTQKGQKNSRERMKRIEEGIKELGSQILKEHPVENTQLQNEKLYLYYLQNGRDMYVDQELDINRLSDYDVDHIVPQSFLKDDSIDNKVLTRSDKARGKSDNVPSEEVVKKMKNYWRQLLNAKLITQRKFDNLTKAERGGLSELDKAGFIKRQLVETRQITKHVAQILDSRMNTKYDENDKLIREVKVITLKSKLVSDFRKDFQFYKVREINNYHHAHDAYLNAVVGTALIKKYPKLESEFVYGDYKVYDVRKMIAKSEQEIGKATAKYFFYSNIMNFFKTEITLANGEIRKRPLIETNGETGEIVWDKGRDFATVRKVLSMPQVNIVKKTEVQTGGFSKESILPKRNSDKLIARKKDWDPKKYGGFDSPTVAYSVLVVAKVEKGKSKKLKSVKELLGITIMERSSFEKNPIDFLEAKGYKEVKKDLIIKLPKYSLFELENGRKRMLASAGELQKGNELALPSKYVNFLYLASHYEKLKGSPEDNEQKQLFVEQHKHYLDEIIEQISEFSKRVILADANLDKVLSAYNKHRDKPIREQAENIIHLFTLTNLGAPAAFKYFDTTIDRKRYTSTKEVLDATLIHQSITGLYETRIDLSQLGGDGGPAPGSSGGGGGTLGDQGSRGSDPLPEPRVTLTVEGIPTEFLVNTGAEHSVLTKPMGKMGSKRTVVAGATGSKVYPWTTKRLLKIGQKQVTHSFLVIPECPAPLLGRDLLTKLKAQIQFSTEGPQVTWEDRPAMCLVLNLEEEYRLHEKPVPPSIDPSWLQLFPMVWAEKAGMGLANQVPPVVVELKSDASPVAVRQYPMSKEAREGIRPHIQRFLDLGILVPCQSPWNTPLLPVKKPGTNDYRPVQDLREVNKRVQDIHPTVPNPYNLLSSLPPSHTWYSVLDLKDAFFCLKLHPNSQPLFAFEWRDPEKGNTGQLTWTRLPQGFKNSPTLFNEALHRDLASFRALNPQVVMLQYVDDLLVAAPTYRDCKEGTRRLLQELSKLGYRVSAKKAQLCREEVTYLGYLLKGGKRWLTPARKATVMKIPTPTTPRQVREFLGKAGFCRLFIPGFASLAAPLYPLTRPKVPFTWTEAHQEAFGRIKEALLSAPALALPDLTKPFALYVDEKEGVARGVLTQTLGPWRRPVAYLSKKLDPVASGWPTCLKAIAAVALLLKDADKLTLGQNVLVIAPHNLESIVRQPPDRWMTNARMTHYQSLLLNERVSFAPPAILNPATLLPVESDDTPIHICSEILAEETGTRPDLRDQPLPGVPAWYTDGSSFIMDGRRQAGAAIVDNKRTVWASNLPEGTSAQKAELIALTQALRLAEGKSINIYTDSRYAFATAHVHGAIYKQRGWLTSAGKDIKNKEEILALLEAIHLPKRVAIIHCPGHQRGTDPVATGNRKADEAAKQAAQSTRILTETTKNAGKRTADGSEFEKRTADGSEFESPKKKAKVE

SEQ ID NO: 1807 - protein, 2213 aa, synthetic construct
MPAAKRVKLDGGDKKYSIGLDIGTNSVGWAVITDEYKVPSKKFKVLGNTDRHSIKKNLIGALLFDSGETAEATRLKRTARRRYTRRKNRICYLQEIFSNEMAKVDDSFFHRLEESFLVEEDKKHERHPIFGNIVDEVAYHEKYPTIYHLRKKLVDSTDKADLRLIYLALAHMIKFRGHFLIEGDLNPDNSDVDKLFIQLVQTYNQLFEENPINASGVDAKAILSARLSKSRRLENLIAQLPGEKKNGLFGNLIALSLGLTPNFKSNFDLAEDAKLQLSKDTYDDDLDNLLAQIGDQYADLFLAAKNLSDAILLSDILRVNTEITKAPLSASMIKRYDEHHQDLTLLKALVRQQLPEKYKEIFFDQSKNGYAGYIDGGASQEEFYKFIKPILEKMDGTEELLVKLNREDLLRKQRTFDNGSIPHQIHLGELHAILRRQEDFYPFLKDNREKIEKILTFRIPYYVGPLARGNSRFAWMTRKSEETITPWNFEEVVDKGASAQSFIERMTNFDKNLPNEKVLPKHSLLYEYFTVYNELTKVKYVTEGMRKPAFLSGEQKKAIVDLLFKTNRKVTVKQLKEDYFKKIECFDSVEISGVEDRFNASLGTYHDLLKIIKDKDFLDNEENEDILEDIVLTLTLFEDREMIEERLKTYAHLFDDKVMKQLKRRRYTGWGRLSRKLINGIRDKQSGKTILDFLKSDGFANRNFMQLIHDDSLTFKEDIQKAQVSGQGDSLHEHIANLAGSPAIKKGILQTVKVVDELVKVMGRHKPENIVIEMARENQTTQKGQKNSRERMKRIEEGIKELGSQILKEHPVENTQLQNEKLYLYYLQNGRDMYVDQELDINRLSDYDVDHIVPQSFLKDDSIDNKVLTRSDKARGKSDNVPSEEVVKKMKNYWRQLLNAKLITQRKFDNLTKAERGGLSELDKAGFIKRQLVETRQITKHVAQILDSRMNTKYDENDKLIREVKVITLKSKLVSDFRKDFQFYKVREINNYHHAHDAYLNAVVGTALIKKYPKLESEFVYGDYKVYDVRKMIAKSEQEIGKATAKYFFYSNIMNFFKTEITLANGEIRKRPLIETNGETGEIVWDKGRDFATVRKVLSMPQVNIVKKTEVQTGGFSKESILPKRNSDKLIARKKDWDPKKYGGFDSPTVAYSVLVVAKVEKGKSKKLKSVKELLGITIMERSSFEKNPIDFLEAKGYKEVKKDLIIKLPKYSLFELENGRKRMLASAGELQKGNELALPSKYVNFLYLASHYEKLKGSPEDNEQKQLFVEQHKHYLDEIIEQISEFSKRVILADANLDKVLSAYNKHRDKPIREQAENIIHLFTLTNLGAPAAFKYFDTTIDRKRYTSTKEVLDATLIHQSITGLYETRIDLSQLGGDGGGGGPAPGGTLGDQGSRGSDPLPEPRVTLTVEGIPTEFLVNTGAEHSVLTKPMGKMGSKRTVVAGATGSKVYPWTTKRLLKIGQKQVTHSFLVIPECPAPLLGRDLLTKLKAQIQFSTEGPQVTWEDRPAMCLVLNLEEEYRLHEKPVPPSIDPSWLQLFPMVWAEKAGMGLANQVPPVVVELKSDASPVAVRQYPMSKEAREGIRPHIQRFLDLGILVPCQSPWNTPLLPVKKPGTNDYRPVQDLREVNKRVQDIHPTVPNPYNLLSSLPPSHTWYSVLDLKDAFFCLKLHPNSQPLFAFEWRDPEKGNTGQLTWTRLPQGFKNSPTLFNEALHRDLASFRALNPQVVMLQYVDDLLVAAPTYRDCKEGTRRLLQELSKLGYRVSAKKAQLCREEVTYLGYLLKGGKRWLTPARKATVMKIPTPTTPRQVREFLGKAGFCRLFIPGFASLAAPLYPLTRPKVPFTWTEAHQEAFGRIKEALLSAPALALPDLTKPFALYVDEKEGVARGVLTQTLGPWRRPVAYLSKKLDPVASGWPTCLKAIAAVALLLKDADKLTLGQNVLVIAPHNLESIVRQPPDRWMTNARMTHYQSLLLNERVSFAPPAILNPATLLPVESDDTPIHICSEILAEETGTRPDLRDQPLPGVPAWYTDGSSFIMDGRRQAGAAIVDNKRTVWASNLPEGTSAQKAELIALTQALRLAEGKSINIYTDSRYAFATAHVHGAIYKQRGWLTSAGKDIKNKEEILALLEAIHLPKRVAIIHCPGHQRGTDPVATGNRKADEAAKQAAQSTRILTETTKNAGKRTADGSEFEKRTADGSEFESPKKKAKVE

SEQ ID NO: 1808 - protein, 2213 aa, synthetic construct
MPAAKRVKLDGGDKKYSIGLDIGTNSVGWAVITDEYKVPSKKFKVLGNTDRHSIKKNLIGALLFDSGETAEATRLKRTARRRYTRRKNRICYLQEIFSNEMAKVDDSFFHRLEESFLVEEDKKHERHPIFGNIVDEVAYHEKYPTIYHLRKKLVDSTDKADLRLIYLALAHMIKFRGHFLIEGDLNPDNSDVDKLFIQLVQTYNQLFEENPINASGVDAKAILSARLSKSRRLENLIAQLPGEKKNGLFGNLIALSLGLTPNFKSNFDLAEDAKLQLSKDTYDDDLDNLLAQIGDQYADLFLAAKNLSDAILLSDILRVNTEITKAPLSASMIKRYDEHHQDLTLLKALVRQQLPEKYKEIFFDQSKNGYAGYIDGGASQEEFYKFIKPILEKMDGTEELLVKLNREDLLRKQRTFDNGSIPHQIHLGELHAILRRQEDFYPFLKDNREKIEKILTFRIPYYVGPLARGNSRFAWMTRKSEETITPWNFEEVVDKGASAQSFIERMTNFDKNLPNEKVLPKHSLLYEYFTVYNELTKVKYVTEGMRKPAFLSGEQKKAIVDLLFKTNRKVTVKQLKEDYFKKIECFDSVEISGVEDRFNASLGTYHDLLKIIKDKDFLDNEENEDILEDIVLTLTLFEDREMIEERLKTYAHLFDDKVMKQLKRRRYTGWGRLSRKLINGIRDKQSGKTILDFLKSDGFANRNFMQLIHDDSLTFKEDIQKAQVSGQGDSLHEHIANLAGSPAIKKGILQTVKVVDELVKVMGRHKPENIVIEMARENQTTQKGQKNSRERMKRIEEGIKELGSQILKEHPVENTQLQNEKLYLYYLQNGRDMYVDQELDINRLSDYDVDHIVPQSFLKDDSIDNKVLTRSDKARGKSDNVPSEEVVKKMKNYWRQLLNAKLITQRKFDNLTKAERGGLSELDKAGFIKRQLVETRQITKHVAQILDSRMNTKYDENDKLIREVKVITLKSKLVSDFRKDFQFYKVREINNYHHAHDAYLNAVVGTALIKKYPKLESEFVYGDYKVYDVRKMIAKSEQEIGKATAKYFFYSNIMNFFKTEITLANGEIRKRPLIETNGETGEIVWDKGRDFATVRKVLSMPQVNIVKKTEVQTGGFSKESILPKRNSDKLIARKKDWDPKKYGGFDSPTVAYSVLVVAKVEKGKSKKLKSVKELLGITIMERSSFEKNPIDFLEAKGYKEVKKDLIIKLPKYSLFELENGRKRMLASAGELQKGNELALPSKYVNFLYLASHYEKLKGSPEDNEQKQLFVEQHKHYLDEIIEQISEFSKRVILADANLDKVLSAYNKHRDKPIREQAENIIHLFTLTNLGAPAAFKYFDTTIDRKRYTSTKEVLDATLIHQSITGLYETRIDLSQLGGDGGGGSGSSGGTLGDQGSRGSDPLPEPRVTLTVEGIPTEFLVNTGAEHSVLTKPMGKMGSKRTVVAGATGSKVYPWTTKRLLKIGQKQVTHSFLVIPECPAPLLGRDLLTKLKAQIQFSTEGPQVTWEDRPAMCLVLNLEEEYRLHEKPVPPSIDPSWLQLFPMVWAEKAGMGLANQVPPVVVELKSDASPVAVRQYPMSKEAREGIRPHIQRFLDLGILVPCQSPWNTPLLPVKKPGTNDYRPVQDLREVNKRVQDIHPTVPNPYNLLSSLPPSHTWYSVLDLKDAFFCLKLHPNSQPLFAFEWRDPEKGNTGQLTWTRLPQGFKNSPTLFNEALHRDLASFRALNPQVVMLQYVDDLLVAAPTYRDCKEGTRRLLQELSKLGYRVSAKKAQLCREEVTYLGYLLKGGKRWLTPARKATVMKIPTPTTPRQVREFLGKAGFCRLFIPGFASLAAPLYPLTRPKVPFTWTEAHQEAFGRIKEALLSAPALALPDLTKPFALYVDEKEGVARGVLTQTLGPWRRPVAYLSKKLDPVASGWPTCLKAIAAVALLLKDADKLTLGQNVLVIAPHNLESIVRQPPDRWMTNARMTHYQSLLLNERVSFAPPAILNPATLLPVESDDTPIHICSEILAEETGTRPDLRDQPLPGVPAWYTDGSSFIMDGRRQAGAAIVDNKRTVWASNLPEGTSAQKAELIALTQALRLAEGKSINIYTDSRYAFATAHVHGAIYKQRGWLTSAGKDIKNKEEILALLEAIHLPKRVAIIHCPGHQRGTDPVATGNRKADEAAKQAAQSTRILTETTKNAGKRTADGSEFEKRTADGSEFESPKKKAKVE

SEQ ID NO: 1809 - protein, 2227 aa, synthetic construct
MPAAKRVKLDGGDKKYSIGLDIGTNSVGWAVITDEYKVPSKKFKVLGNTDRHSIKKNLIGALLFDSGETAEATRLKRTARRRYTRRKNRICYLQEIFSNEMAKVDDSFFHRLEESFLVEEDKKHERHPIFGNIVDEVAYHEKYPTIYHLRKKLVDSTDKADLRLIYLALAHMIKFRGHFLIEGDLNPDNSDVDKLFIQLVQTYNQLFEENPINASGVDAKAILSARLSKSRRLENLIAQLPGEKKNGLFGNLIALSLGLTPNFKSNFDLAEDAKLQLSKDTYDDDLDNLLAQIGDQYADLFLAAKNLSDAILLSDILRVNTEITKAPLSASMIKRYDEHHQDLTLLKALVRQQLPEKYKEIFFDQSKNGYAGYIDGGASQEEFYKFIKPILEKMDGTEELLVKLNREDLLRKQRTFDNGSIPHQIHLGELHAILRRQEDFYPFLKDNREKIEKILTFRIPYYVGPLARGNSRFAWMTRKSEETITPWNFEEVVDKGASAQSFIERMTNFDKNLPNEKVLPKHSLLYEYFTVYNELTKVKYVTEGMRKPAFLSGEQKKAIVDLLFKTNRKVTVKQLKEDYFKKIECFDSVEISGVEDRFNASLGTYHDLLKIIKDKDFLDNEENEDILEDIVLTLTLFEDREMIEERLKTYAHLFDDKVMKQLKRRRYTGWGRLSRKLINGIRDKQSGKTILDFLKSDGFANRNFMQLIHDDSLTFKEDIQKAQVSGQGDSLHEHIANLAGSPAIKKGILQTVKVVDELVKVMGRHKPENIVIEMARENQTTQKGQKNSRERMKRIEEGIKELGSQILKEHPVENTQLQNEKLYLYYLQNGRDMYVDQELDINRLSDYDVDHIVPQSFLKDDSIDNKVLTRSDKARGKSDNVPSEEVVKKMKNYWRQLLNAKLITQRKFDNLTKAERGGLSELDKAGFIKRQLVETRQITKHVAQILDSRMNTKYDENDKLIREVKVITLKSKLVSDFRKDFQFYKVREINNYHHAHDAYLNAVVGTALIKKYPKLESEFVYGDYKVYDVRKMIAKSEQEIGKATAKYFFYSNIMNFFKTEITLANGEIRKRPLIETNGETGEIVWDKGRDFATVRKVLSMPQVNIVKKTEVQTGGFSKESILPKRNSDKLIARKKDWDPKKYGGFDSPTVAYSVLVVAKVEKGKSKKLKSVKELLGITIMERSSFEKNPIDFLEAKGYKEVKKDLIIKLPKYSLFELENGRKRMLASAGELQKGNELALPSKYVNFLYLASHYEKLKGSPEDNEQKQLFVEQHKHYLDEIIEQISEFSKRVILADANLDKVLSAYNKHRDKPIREQAENIIHLFTLTNLGAPAAFKYFDTTIDRKRYTSTKEVLDATLIHQSITGLYETRIDLSQLGGDGGEAAAKEAAAKEAAAKEAAAKGGTLGDQGSRGSDPLPEPRVTLTVEGIPTEFLVNTGAEHSVLTKPMGKMGSKRTVVAGATGSKVYPWTTKRLLKIGQKQVTHSFLVIPECPAPLLGRDLLTKLKAQIQFSTEGPQVTWEDRPAMCLVLNLEEEYRLHEKPVPPSIDPSWLQLFPMVWAEKAGMGLANQVPPVVVELKSDASPVAVRQYPMSKEAREGIRPHIQRFLDLGILVPCQSPWNTPLLPVKKPGTNDYRPVQDLREVNKRVQDIHPTVPNPYNLLSSLPPSHTWYSVLDLKDAFFCLKLHPNSQPLFAFEWRDPEKGNTGQLTWTRLPQGFKNSPTLFNEALHRDLASFRALNPQVVMLQYVDDLLVAAPTYRDCKEGTRRLLQELSKLGYRVSAKKAQLCREEVTYLGYLLKGGKRWLTPARKATVMKIPTPTTPRQVREFLGKAGFCRLFIPGFASLAAPLYPLTRPKVPFTWTEAHQEAFGRIKEALLSAPALALPDLTKPFALYVDEKEGVARGVLTQTLGPWRRPVAYLSKKLDPVASGWPTCLKAIAAVALLLKDADKLTLGQNVLVIAPHNLESIVRQPPDRWMTNARMTHYQSLLLNERVSFAPPAILNPATLLPVESDDTPIHICSEILAEETGTRPDLRDQPLPGVPAWYTDGSSFIMDGRRQAGAAIVDNKRTVWASNLPEGTSAQKAELIALTQALRLAEGKSINIYTDSRYAFATAHVHGAIYKQRGWLTSAGKDIKNKEEILALLEAIHLPKRVAIIHCPGHQRGTDPVATGNRKADEAAKQAAQSTRILTETTKNAGKRTADGSEFEKRTADGSEFESPKKKAKVE

SEQ ID NO: 1810 - protein, 2218 aa, synthetic construct
MPAAKRVKLDGGDKKYSIGLDIGTNSVGWAVITDEYKVPSKKFKVLGNTDRHSIKKNLIGALLFDSGETAEATRLKRTARRRYTRRKNRICYLQEIFSNEMAKVDDSFFHRLEESFLVEEDKKHERHPIFGNIVDEVAYHEKYPTIYHLRKKLVDSTDKADLRLIYLALAHMIKFRGHFLIEGDLNPDNSDVDKLFIQLVQTYNQLFEENPINASGVDAKAILSARLSKSRRLENLIAQLPGEKKNGLFGNLIALSLGLTPNFKSNFDLAEDAKLQLSKDTYDDDLDNLLAQIGDQYADLFLAAKNLSDAILLSDILRVNTEITKAPLSASMIKRYDEHHQDLTLLKALVRQQLPEKYKEIFFDQSKNGYAGYIDGGASQEEFYKFIKPILEKMDGTEELLVKLNREDLLRKQRTFDNGSIPHQIHLGELHAILRRQEDFYPFLKDNREKIEKILTFRIPYYVGPLARGNSRFAWMTRKSEETITPWNFEEVVDKGASAQSFIERMTNFDKNLPNEKVLPKHSLLYEYFTVYNELTKVKYVTEGMRKPAFLSGEQKKAIVDLLFKTNRKVTVKQLKEDYFKKIECFDSVEISGVEDRFNASLGTYHDLLKIIKDKDFLDNEENEDILEDIVLTLTLFEDREMIEERLKTYAHLFDDKVMKQLKRRRYTGWGRLSRKLINGIRDKQSGKTILDFLKSDGFANRNFMQLIHDDSLTFKEDIQKAQVSGQGDSLHEHIANLAGSPAIKKGILQTVKVVDELVKVMGRHKPENIVIEMARENQTTQKGQKNSRERMKRIEEGIKELGSQILKEHPVENTQLQNEKLYLYYLQNGRDMYVDQELDINRLSDYDVDHIVPQSFLKDDSIDNKVLTRSDKARGKSDNVPSEEVVKKMKNYWRQLLNAKLITQRKFDNLTKAERGGLSELDKAGFIKRQLVETRQITKHVAQILDSRMNTKYDENDKLIREVKVITLKSKLVSDFRKDFQFYKVREINNYHHAHDAYLNAVVGTALIKKYPKLESEFVYGDYKVYDVRKMIAKSEQEIGKATAKYFFYSNIMNFFKTEITLANGEIRKRPLIETNGETGEIVWDKGRDFATVRKVLSMPQVNIVKKTEVQTGGFSKESILPKRNSDKLIARKKDWDPKKYGGFDSPTVAYSVLVVAKVEKGKSKKLKSVKELLGITIMERSSFEKNPIDFLEAKGYKEVKKDLIIKLPKYSLFELENGRKRMLASAGELQKGNELALPSKYVNFLYLASHYEKLKGSPEDNEQKQLFVEQHKHYLDEIIEQISEFSKRVILADANLDKVLSAYNKHRDKPIREQAENIIHLFTLTNLGAPAAFKYFDTTIDRKRYTSTKEVLDATLIHQSITGLYETRIDLSQLGGDGGPAPGGSEAAAKGGTLGDQGSRGSDPLPEPRVTLTVEGIPTEFLVNTGAEHSVLTKPMGKMGSKRTVVAGATGSKVYPWTTKRLLKIGQKQVTHSFLVIPECPAPLLGRDLLTKLKAQIQFSTEGPQVTWEDRPAMCLVLNLEEEYRLHEKPVPPSIDPSWLQLFPMVWAEKAGMGLANQVPPVVVELKSDASPVAVRQYPMSKEAREGIRPHIQRFLDLGILVPCQSPWNTPLLPVKKPGTNDYRPVQDLREVNKRVQDIHPTVPNPYNLLSSLPPSHTWYSVLDLKDAFFCLKLHPNSQPLFAFEWRDPEKGNTGQLTWTRLPQGFKNSPTLFNEALHRDLASFRALNPQVVMLQYVDDLLVAAPTYRDCKEGTRRLLQELSKLGYRVSAKKAQLCREEVTYLGYLLKGGKRWLTPARKATVMKIPTPTTPRQVREFLGKAGFCRLFIPGFASLAAPLYPLTRPKVPFTWTEAHQEAFGRIKEALLSAPALALPDLTKPFALYVDEKEGVARGVLTQTLGPWRRPVAYLSKKLDPVASGWPTCLKAIAAVALLLKDADKLTLGQNVLVIAPHNLESIVRQPPDRWMTNARMTHYQSLLLNERVSFAPPAILNPATLLPVESDDTPIHICSEILAEETGTRPDLRDQPLPGVPAWYTDGSSFIMDGRRQAGAAIVDNKRTVWASNLPEGTSAQKAELIALTQALRLAEGKSINIYTDSRYAFATAHVHGAIYKQRGWLTSAGKDIKNKEEILALLEAIHLPKRVAIIHCPGHQRGTDPVATGNRKADEAAKQAAQSTRILTETTKNAGKRTADGSEFEKRTADGSEFESPKKKAKVE

SEQ ID NO: 1811 - protein, 2213 aa, synthetic construct
MPAAKRVKLDGGDKKYSIGLDIGTNSVGWAVITDEYKVPSKKFKVLGNTDRHSIKKNLIGALLFDSGETAEATRLKRTARRRYTRRKNRICYLQEIFSNEMAKVDDSFFHRLEESFLVEEDKKHERHPIFGNIVDEVAYHEKYPTIYHLRKKLVDSTDKADLRLIYLALAHMIKFRGHFLIEGDLNPDNSDVDKLFIQLVQTYNQLFEENPINASGVDAKAILSARLSKSRRLENLIAQLPGEKKNGLFGNLIALSLGLTPNFKSNFDLAEDAKLQLSKDTYDDDLDNLLAQIGDQYADLFLAAKNLSDAILLSDILRVNTEITKAPLSASMIKRYDEHHQDLTLLKALVRQQLPEKYKEIFFDQSKNGYAGYIDGGASQEEFYKFIKPILEKMDGTEELLVKLNREDLLRKQRTFDNGSIPHQIHLGELHAILRRQEDFYPFLKDNREKIEKILTFRIPYYVGPLARGNSRFAWMTRKSEETITPWNFEEVVDKGASAQSFIERMTNFDKNLPNEKVLPKHSLLYEYFTVYNELTKVKYVTEGMRKPAFLSGEQKKAIVDLLFKTNRKVTVKQLKEDYFKKIECFDSVEISGVEDRFNASLGTYHDLLKIIKDKDFLDNEENEDILEDIVLTLTLFEDREMIEERLKTYAHLFDDKVMKQLKRRRYTGWGRLSRKLINGIRDKQSGKTILDFLKSDGFANRNFMQLIHDDSLTFKEDIQKAQVSGQGDSLHEHIANLAGSPAIKKGILQTVKVVDELVKVMGRHKPENIVIEMARENQTTQKGQKNSRERMKRIEEGIKELGSQILKEHPVENTQLQNEKLYLYYLQNGRDMYVDQELDINRLSDYDVDHIVPQSFLKDDSIDNKVLTRSDKARGKSDNVPSEEVVKKMKNYWRQLLNAKLITQRKFDNLTKAERGGLSELDKAGFIKRQLVETRQITKHVAQILDSRMNTKYDENDKLIREVKVITLKSKLVSDFRKDFQFYKVREINNYHHAHDAYLNAVVGTALIKKYPKLESEFVYGDYKVYDVRKMIAKSEQEIGKATAKYFFYSNIMNFFKTEITLANGEIRKRPLIETNGETGEIVWDKGRDFATVRKVLSMPQVNIVKKTEVQTGGFSKESILPKRNSDKLIARKKDWDPKKYGGFDSPTVAYSVLVVAKVEKGKSKKLKSVKELLGITIMERSSFEKNPIDFLEAKGYKEVKKDLIIKLPKYSLFELENGRKRMLASAGELQKGNELALPSKYVNFLYLASHYEKLKGSPEDNEQKQLFVEQHKHYLDEIIEQISEFSKRVILADANLDKVLSAYNKHRDKPIREQAENIIHLFTLTNLGAPAAFKYFDTTIDRKRYTSTKEVLDATLIHQSITGLYETRIDLSQLGGDGGPAPGGSGGTLGDQGSRGSDPLPEPRVTLTVEGIPTEFLVNTGAEHSVLTKPMGKMGSKRTVVAGATGSKVYPWTTKRLLKIGQKQVTHSFLVIPECPAPLLGRDLLTKLKAQIQFSTEGPQVTWEDRPAMCLVLNLEEEYRLHEKPVPPSIDPSWLQLFPMVWAEKAGMGLANQVPPVVVELKSDASPVAVRQYPMSKEAREGIRPHIQRFLDLGILVPCQSPWNTPLLPVKKPGTNDYRPVQDLREVNKRVQDIHPTVPNPYNLLSSLPPSHTWYSVLDLKDAFFCLKLHPNSQPLFAFEWRDPEKGNTGQLTWTRLPQGFKNSPTLFNEALHRDLASFRALNPQVVMLQYVDDLLVAAPTYRDCKEGTRRLLQELSKLGYRVSAKKAQLCREEVTYLGYLLKGGKRWLTPARKATVMKIPTPTTPRQVREFLGKAGFCRLFIPGFASLAAPLYPLTRPKVPFTWTEAHQEAFGRIKEALLSAPALALPDLTKPFALYVDEKEGVARGVLTQTLGPWRRPVAYLSKKLDPVASGWPTCLKAIAAVALLLKDADKLTLGQNVLVIAPHNLESIVRQPPDRWMTNARMTHYQSLLLNERVSFAPPAILNPATLLPVESDDTPIHICSEILAEETGTRPDLRDQPLPGVPAWYTDGSSFIMDGRRQAGAAIVDNKRTVWASNLPEGTSAQKAELIALTQALRLAEGKSINIYTDSRYAFATAHVHGAIYKQRGWLTSAGKDIKNKEEILALLEAIHLPKRVAIIHCPGHQRGTDPVATGNRKADEAAKQAAQSTRILTETTKNAGKRTADGSEFEKRTADGSEFESPKKKAKVE

SEQ ID NO: 1812 - protein, 2218 aa, synthetic construct
MPAAKRVKLDGGDKKYSIGLDIGTNSVGWAVITDEYKVPSKKFKVLGNTDRHSIKKNLIGALLFDSGETAEATRLKRTARRRYTRRKNRICYLQEIFSNEMAKVDDSFFHRLEESFLVEEDKKHERHPIFGNIVDEVAYHEKYPTIYHLRKKLVDSTDKADLRLIYLALAHMIKFRGHFLIEGDLNPDNSDVDKLFIQLVQTYNQLFEENPINASGVDAKAILSARLSKSRRLENLIAQLPGEKKNGLFGNLIALSLGLTPNFKSNFDLAEDAKLQLSKDTYDDDLDNLLAQIGDQYADLFLAAKNLSDAILLSDILRVNTEITKAPLSASMIKRYDEHHQDLTLLKALVRQQLPEKYKEIFFDQSKNGYAGYIDGGASQEEFYKFIKPILEKMDGTEELLVKLNREDLLRKQRTFDNGSIPHQIHLGELHAILRRQEDFYPFLKDNREKIEKILTFRIPYYVGPLARGNSRFAWMTRKSEETITPWNFEEVVDKGASAQSFIERMTNFDKNLPNEKVLPKHSLLYEYFTVYNELTKVKYVTEGMRKPAFLSGEQKKAIVDLLFKTNRKVTVKQLKEDYFKKIECFDSVEISGVEDRFNASLGTYHDLLKIIKDKDFLDNEENEDILEDIVLTLTLFEDREMIEERLKTYAHLFDDKVMKQLKRRRYTGWGRLSRKLINGIRDKQSGKTILDFLKSDGFANRNFMQLIHDDSLTFKEDIQKAQVSGQGDSLHEHIANLAGSPAIKKGILQTVKVVDELVKVMGRHKPENIVIEMARENQTTQKGQKNSRERMKRIEEGIKELGSQILKEHPVENTQLQNEKLYLYYLQNGRDMYVDQELDINRLSDYDVDHIVPQSFLKDDSIDNKVLTRSDKARGKSDNVPSEEVVKKMKNYWRQLLNAKLITQRKFDNLTKAERGGLSELDKAGFIKRQLVETRQITKHVAQILDSRMNTKYDENDKLIREVKVITLKSKLVSDFRKDFQFYKVREINNYHHAHDAYLNAVVGTALIKKYPKLESEFVYGDYKVYDVRKMIAKSEQEIGKATAKYFFYSNIMNFFKTEITLANGEIRKRPLIETNGETGEIVWDKGRDFATVRKVLSMPQVNIVKKTEVQTGGFSKESILPKRNSDKLIARKKDWDPKKYGGFDSPTVAYSVLVVAKVEKGKSKKLKSVKELLGITIMERSSFEKNPIDFLEAKGYKEVKKDLIIKLPKYSLFELENGRKRMLASAGELQKGNELALPSKYVNFLYLASHYEKLKGSPEDNEQKQLFVEQHKHYLDEIIEQISEFSKRVILADANLDKVLSAYNKHRDKPIREQAENIIHLFTLTNLGAPAAFKYFDTTIDRKRYTSTKEVLDATLIHQSITGLYETRIDLSQLGGDGGGGGPAPEAAAKGGTLGDQGSRGSDPLPEPRVTLTVEGIPTEFLVNTGAEHSVLTKPMGKMGSKRTVVAGATGSKVYPWTTKRLLKIGQKQVTHSFLVIPECPAPLLGRDLLTKLKAQIQFSTEGPQVTWEDRPAMCLVLNLEEEYRLHEKPVPPSIDPSWLQLFPMVWAEKAGMGLANQVPPVVVELKSDASPVAVRQYPMSKEAREGIRPHIQRFLDLGILVPCQSPWNTPLLPVKKPGTNDYRPVQDLREVNKRVQDIHPTVPNPYNLLSSLPPSHTWYSVLDLKDAFFCLKLHPNSQPLFAFEWRDPEKGNTGQLTWTRLPQGFKNSPTLFNEALHRDLASFRALNPQVVMLQYVDDLLVAAPTYRDCKEGTRRLLQELSKLGYRVSAKKAQLCREEVTYLGYLLKGGKRWLTPARKATVMKIPTPTTPRQVREFLGKAGFCRLFIPGFASLAAPLYPLTRPKVPFTWTEAHQEAFGRIKEALLSAPALALPDLTKPFALYVDEKEGVARGVLTQTLGPWRRPVAYLSKKLDPVASGWPTCLKAIAAVALLLKDADKLTLGQNVLVIAPHNLESIVRQPPDRWMTNARMTHYQSLLLNERVSFAPPAILNPATLLPVESDDTPIHICSEILAEETGTRPDLRDQPLPGVPAWYTDGSSFIMDGRRQAGAAIVDNKRTVWASNLPEGTSAQKAELIALTQALRLAEGKSINIYTDSRYAFATAHVHGAIYKQRGWLTSAGKDIKNKEEILALLEAIHLPKRVAIIHCPGHQRGTDPVATGNRKADEAAKQAAQSTRILTETTKNAGKRTADGSEFEKRTADGSEFESPKKKAKVE

SEQ ID NO: 1813 - protein, 2222 aa, synthetic construct
MPAAKRVKLDGGDKKYSIGLDIGTNSVGWAVITDEYKVPSKKFKVLGNTDRHSIKKNLIGALLFDSGETAEATRLKRTARRRYTRRKNRICYLQEIFSNEMAKVDDSFFHRLEESFLVEEDKKHERHPIFGNIVDEVAYHEKYPTIYHLRKKLVDSTDKADLRLIYLALAHMIKFRGHFLIEGDLNPDNSDVDKLFIQLVQTYNQLFEENPINASGVDAKAILSARLSKSRRLENLIAQLPGEKKNGLFGNLIALSLGLTPNFKSNFDLAEDAKLQLSKDTYDDDLDNLLAQIGDQYADLFLAAKNLSDAILLSDILRVNTEITKAPLSASMIKRYDEHHQDLTLLKALVRQQLPEKYKEIFFDQSKNGYAGYIDGGASQEEFYKFIKPILEKMDGTEELLVKLNREDLLRKQRTFDNGSIPHQIHLGELHAILRRQEDFYPFLKDNREKIEKILTFRIPYYVGPLARGNSRFAWMTRKSEETITPWNFEEVVDKGASAQSFIERMTNFDKNLPNEKVLPKHSLLYEYFTVYNELTKVKYVTEGMRKPAFLSGEQKKAIVDLLFKTNRKVTVKQLKEDYFKKIECFDSVEISGVEDRFNASLGTYHDLLKIIKDKDFLDNEENEDILEDIVLTLTLFEDREMIEERLKTYAHLFDDKVMKQLKRRRYTGWGRLSRKLINGIRDKQSGKTILDFLKSDGFANRNFMQLIHDDSLTFKEDIQKAQVSGQGDSLHEHIANLAGSPAIKKGILQTVKVVDELVKVMGRHKPENIVIEMARENQTTQKGQKNSRERMKRIEEGIKELGSQILKEHPVENTQLQNEKLYLYYLQNGRDMYVDQELDINRLSDYDVDHIVPQSFLKDDSIDNKVLTRSDKARGKSDNVPSEEVVKKMKNYWRQLLNAKLITQRKFDNLTKAERGGLSELDKAGFIKRQLVETRQITKHVAQILDSRMNTKYDENDKLIREVKVITLKSKLVSDFRKDFQFYKVREINNYHHAHDAYLNAVVGTALIKKYPKLESEFVYGDYKVYDVRKMIAKSEQEIGKATAKYFFYSNIMNFFKTEITLANGEIRKRPLIETNGETGEIVWDKGRDFATVRKVLSMPQVNIVKKTEVQTGGFSKESILPKRNSDKLIARKKDWDPKKYGGFDSPTVAYSVLVVAKVEKGKSKKLKSVKELLGITIMERSSFEKNPIDFLEAKGYKEVKKDLIIKLPKYSLFELENGRKRMLASAGELQKGNELALPSKYVNFLYLASHYEKLKGSPEDNEQKQLFVEQHKHYLDEIIEQISEFSKRVILADANLDKVLSAYNKHRDKPIREQAENIIHLFTLTNLGAPAAFKYFDTTIDRKRYTSTKEVLDATLIHQSITGLYETRIDLSQLGGDGGGSSGSSGSSGSSGSSGGTLGDQGSRGSDPLPEPRVTLTVEGIPTEFLVNTGAEHSVLTKPMGKMGSKRTVVAGATGSKVYPWTTKRLLKIGQKQVTHSFLVIPECPAPLLGRDLLTKLKAQIQFSTEGPQVTWEDRPAMCLVLNLEEEYRLHEKPVPPSIDPSWLQLFPMVWAEKAGMGLANQVPPVVVELKSDASPVAVRQYPMSKEAREGIRPHIQRFLDLGILVPCQSPWNTPLLPVKKPGTNDYRPVQDLREVNKRVQDIHPTVPNPYNLLSSLPPSHTWYSVLDLKDAFFCLKLHPNSQPLFAFEWRDPEKGNTGQLTWTRLPQGFKNSPTLFNEALHRDLASFRALNPQVVMLQYVDDLLVAAPTYRDCKEGTRRLLQELSKLGYRVSAKKAQLCREEVTYLGYLLKGGKRWLTPARKATVMKIPTPTTPRQVREFLGKAGFCRLFIPGFASLAAPLYPLTRPKVPFTWTEAHQEAFGRIKEALLSAPALALPDLTKPFALYVDEKEGVARGVLTQTLGPWRRPVAYLSKKLDPVASGWPTCLKAIAAVALLLKDADKLTLGQNVLVIAPHNLESIVRQPPDRWMTNARMTHYQSLLLNERVSFAPPAILNPATLLPVESDDTPIHICSEILAEETGTRPDLRDQPLPGVPAWYTDGSSFIMDGRRQAGAAIVDNKRTVWASNLPEGTSAQKAELIALTQALRLAEGKSINIYTDSRYAFATAHVHGAIYKQRGWLTSAGKDIKNKEEILALLEAIHLPKRVAIIHCPGHQRGTDPVATGNRKADEAAKQAAQSTRILTETTKNAGKRTADGSEFEKRTADGSEFESPKKKAKVE

SEQ ID NO: 1814 - protein, 2216 aa, synthetic construct
MPAAKRVKLDGGDKKYSIGLDIGTNSVGWAVITDEYKVPSKKFKVLGNTDRHSIKKNLIGALLFDSGETAEATRLKRTARRRYTRRKNRICYLQEIFSNEMAKVDDSFFHRLEESFLVEEDKKHERHPIFGNIVDEVAYHEKYPTIYHLRKKLVDSTDKADLRLIYLALAHMIKFRGHFLIEGDLNPDNSDVDKLFIQLVQTYNQLFEENPINASGVDAKAILSARLSKSRRLENLIAQLPGEKKNGLFGNLIALSLGLTPNFKSNFDLAEDAKLQLSKDTYDDDLDNLLAQIGDQYADLFLAAKNLSDAILLSDILRVNTEITKAPLSASMIKRYDEHHQDLTLLKALVRQQLPEKYKEIFFDQSKNGYAGYIDGGASQEEFYKFIKPILEKMDGTEELLVKLNREDLLRKQRTFDNGSIPHQIHLGELHAILRRQEDFYPFLKDNREKIEKILTFRIPYYVGPLARGNSRFAWMTRKSEETITPWNFEEVVDKGASAQSFIERMTNFDKNLPNEKVLPKHSLLYEYFTVYNELTKVKYVTEGMRKPAFLSGEQKKAIVDLLFKTNRKVTVKQLKEDYFKKIECFDSVEISGVEDRFNASLGTYHDLLKIIKDKDFLDNEENEDILEDIVLTLTLFEDREMIEERLKTYAHLFDDKVMKQLKRRRYTGWGRLSRKLINGIRDKQSGKTILDFLKSDGFANRNFMQLIHDDSLTFKEDIQKAQVSGQGDSLHEHIANLAGSPAIKKGILQTVKVVDELVKVMGRHKPENIVIEMARENQTTQKGQKNSRERMKRIEEGIKELGSQILKEHPVENTQLQNEKLYLYYLQNGRDMYVDQELDINRLSDYDVDHIVPQSFLKDDSIDNKVLTRSDKARGKSDNVPSEEVVKKMKNYWRQLLNAKLITQRKFDNLTKAERGGLSELDKAGFIKRQLVETRQITKHVAQILDSRMNTKYDENDKLIREVKVITLKSKLVSDFRKDFQFYKVREINNYHHAHDAYLNAVVGTALIKKYPKLESEFVYGDYKVYDVRKMIAKSEQEIGKATAKYFFYSNIMNFFKTEITLANGEIRKRPLIETNGETGEIVWDKGRDFATVRKVLSMPQVNIVKKTEVQTGGFSKESILPKRNSDKLIARKKDWDPKKYGGFDSPTVAYSVLVVAKVEKGKSKKLKSVKELLGITIMERSSFEKNPIDFLEAKGYKEVKKDLIIKLPKYSLFELENGRKRMLASAGELQKGNELALPSKYVNFLYLASHYEKLKGSPEDNEQKQLFVEQHKHYLDEIIEQISEFSKRVILADANLDKVLSAYNKHRDKPIREQAENIIHLFTLTNLGAPAAFKYFDTTIDRKRYTSTKEVLDATLIHQSITGLYETRIDLSQLGGDGGGSSGSSGSSGGTLGDQGSRGSDPLPEPRVTLTVEGIPTEFLVNTGAEHSVLTKPMGKMGSKRTVVAGATGSKVYPWTTKRLLKIGQKQVTHSFLVIPECPAPLLGRDLLTKLKAQIQFSTEGPQVTWEDRPAMCLVLNLEEEYRLHEKPVPPSIDPSWLQLFPMVWAEKAGMGLANQVPPVVVELKSDASPVAVRQYPMSKEAREGIRPHIQRFLDLGILVPCQSPWNTPLLPVKKPGTNDYRPVQDLREVNKRVQDIHPTVPNPYNLLSSLPPSHTWYSVLDLKDAFFCLKLHPNSQPLFAFEWRDPEKGNTGQLTWTRLPQGFKNSPTLFNEALHRDLASFRALNPQVVMLQYVDDLLVAAPTYRDCKEGTRRLLQELSKLGYRVSAKKAQLCREEVTYLGYLLKGGKRWLTPARKATVMKIPTPTTPRQVREFLGKAGFCRLFIPGFASLAAPLYPLTRPKVPFTWTEAHQEAFGRIKEALLSAPALALPDLTKPFALYVDEKEGVARGVLTQTLGPWRRPVAYLSKKLDPVASGWPTCLKAIAAVALLLKDADKLTLGQNVLVIAPHNLESIVRQPPDRWMTNARMTHYQSLLLNERVSFAPPAILNPATLLPVESDDTPIHICSEILAEETGTRPDLRDQPLPGVPAWYTDGSSFIMDGRRQAGAAIVDNKRTVWASNLPEGTSAQKAELIALTQALRLAEGKSINIYTDSRYAFATAHVHGAIYKQRGWLTSAGKDIKNKEEILALLEAIHLPKRVAIIHCPGHQRGTDPVATGNRKADEAAKQAAQSTRILTETTKNAGKRTADGSEFEKRTADGSEFESPKKKAKVE

SEQ ID NO: 1815 - protein, 2213 aa, synthetic construct
MPAAKRVKLDGGDKKYSIGLDIGTNSVGWAVITDEYKVPSKKFKVLGNTDRHSIKKNLIGALLFDSGETAEATRLKRTARRRYTRRKNRICYLQEIFSNEMAKVDDSFFHRLEESFLVEEDKKHERHPIFGNIVDEVAYHEKYPTIYHLRKKLVDSTDKADLRLIYLALAHMIKFRGHFLIEGDLNPDNSDVDKLFIQLVQTYNQLFEENPINASGVDAKAILSARLSKSRRLENLIAQLPGEKKNGLFGNLIALSLGLTPNFKSNFDLAEDAKLQLSKDTYDDDLDNLLAQIGDQYADLFLAAKNLSDAILLSDILRVNTEITKAPLSASMIKRYDEHHQDLTLLKALVRQQLPEKYKEIFFDQSKNGYAGYIDGGASQEEFYKFIKPILEKMDGTEELLVKLNREDLLRKQRTFDNGSIPHQIHLGELHAILRRQEDFYPFLKDNREKIEKILTFRIPYYVGPLARGNSRFAWMTRKSEETITPWNFEEVVDKGASAQSFIERMTNFDKNLPNEKVLPKHSLLYEYFTVYNELTKVKYVTEGMRKPAFLSGEQKKAIVDLLFKTNRKVTVKQLKEDYFKKIECFDSVEISGVEDRFNASLGTYHDLLKIIKDKDFLDNEENEDILEDIVLTLTLFEDREMIEERLKTYAHLFDDKVMKQLKRRRYTGWGRLSRKLINGIRDKQSGKTILDFLKSDGFANRNFMQLIHDDSLTFKEDIQKAQVSGQGDSLHEHIANLAGSPAIKKGILQTVKVVDELVKVMGRHKPENIVIEMARENQTTQKGQKNSRERMKRIEEGIKELGSQILKEHPVENTQLQNEKLYLYYLQNGRDMYVDQELDINRLSDYDVDHIVPQSFLKDDSIDNKVLTRSDKARGKSDNVPSEEVVKKMKNYWRQLLNAKLITQRKFDNLTKAERGGLSELDKAGFIKRQLVETRQITKHVAQILDSRMNTKYDENDKLIREVKVITLKSKLVSDFRKDFQFYKVREINNYHHAHDAYLNAVVGTALIKKYPKLESEFVYGDYKVYDVRKMIAKSEQEIGKATAKYFFYSNIMNFFKTEITLANGEIRKRPLIETNGETGEIVWDKGRDFATVRKVLSMPQVNIVKKTEVQTGGFSKESILPKRNSDKLIARKKDWDPKKYGGFDSPTVAYSVLVVAKVEKGKSKKLKSVKELLGITIMERSSFEKNPIDFLEAKGYKEVKKDLIIKLPKYSLFELENGRKRMLASAGELQKGNELALPSKYVNFLYLASHYEKLKGSPEDNEQKQLFVEQHKHYLDEIIEQISEFSKRVILADANLDKVLSAYNKHRDKPIREQAENIIHLFTLTNLGAPAAFKYFDTTIDRKRYTSTKEVLDATLIHQSITGLYETRIDLSQLGGDGGGSSPAPGGTLGDQGSRGSDPLPEPRVTLTVEGIPTEFLVNTGAEHSVLTKPMGKMGSKRTVVAGATGSKVYPWTTKRLLKIGQKQVTHSFLVIPECPAPLLGRDLLTKLKAQIQFSTEGPQVTWEDRPAMCLVLNLEEEYRLHEKPVPPSIDPSWLQLFPMVWAEKAGMGLANQVPPVVVELKSDASPVAVRQYPMSKEAREGIRPHIQRFLDLGILVPCQSPWNTPLLPVKKPGTNDYRPVQDLREVNKRVQDIHPTVPNPYNLLSSLPPSHTWYSVLDLKDAFFCLKLHPNSQPLFAFEWRDPEKGNTGQLTWTRLPQGFKNSPTLFNEALHRDLASFRALNPQVVMLQYVDDLLVAAPTYRDCKEGTRRLLQELSKLGYRVSAKKAQLCREEVTYLGYLLKGGKRWLTPARKATVMKIPTPTTPRQVREFLGKAGFCRLFIPGFASLAAPLYPLTRPKVPFTWTEAHQEAFGRIKEALLSAPALALPDLTKPFALYVDEKEGVARGVLTQTLGPWRRPVAYLSKKLDPVASGWPTCLKAIAAVALLLKDADKLTLGQNVLVIAPHNLESIVRQPPDRWMTNARMTHYQSLLLNERVSFAPPAILNPATLLPVESDDTPIHICSEILAEETGTRPDLRDQPLPGVPAWYTDGSSFIMDGRRQAGAAIVDNKRTVWASNLPEGTSAQKAELIALTQALRLAEGKSINIYTDSRYAFATAHVHGAIYKQRGWLTSAGKDIKNKEEILALLEAIHLPKRVAIIHCPGHQRGTDPVATGNRKADEAAKQAAQSTRILTETTKNAGKRTADGSEFEKRTADGSEFESPKKKAKVE

SEQ ID NO: 1816 - protein, 2218 aa, synthetic construct
MPAAKRVKLDGGDKKYSIGLDIGTNSVGWAVITDEYKVPSKKFKVLGNTDRHSIKKNLIGALLFDSGETAEATRLKRTARRRYTRRKNRICYLQEIFSNEMAKVDDSFFHRLEESFLVEEDKKHERHPIFGNIVDEVAYHEKYPTIYHLRKKLVDSTDKADLRLIYLALAHMIKFRGHFLIEGDLNPDNSDVDKLFIQLVQTYNQLFEENPINASGVDAKAILSARLSKSRRLENLIAQLPGEKKNGLFGNLIALSLGLTPNFKSNFDLAEDAKLQLSKDTYDDDLDNLLAQIGDQYADLFLAAKNLSDAILLSDILRVNTEITKAPLSASMIKRYDEHHQDLTLLKALVRQQLPEKYKEIFFDQSKNGYAGYIDGGASQEEFYKFIKPILEKMDGTEELLVKLNREDLLRKQRTFDNGSIPHQIHLGELHAILRRQEDFYPFLKDNREKIEKILTFRIPYYVGPLARGNSRFAWMTRKSEETITPWNFEEVVDKGASAQSFIERMTNFDKNLPNEKVLPKHSLLYEYFTVYNELTKVKYVTEGMRKPAFLSGEQKKAIVDLLFKTNRKVTVKQLKEDYFKKIECFDSVEISGVEDRFNASLGTYHDLLKIIKDKDFLDNEENEDILEDIVLTLTLFEDREMIEERLKTYAHLFDDKVMKQLKRRRYTGWGRLSRKLINGIRDKQSGKTILDFLKSDGFANRNFMQLIHDDSLTFKEDIQKAQVSGQGDSLHEHIANLAGSPAIKKGILQTVKVVDELVKVMGRHKPENIVIEMARENQTTQKGQKNSRERMKRIEEGIKELGSQILKEHPVENTQLQNEKLYLYYLQNGRDMYVDQELDINRLSDYDVDHIVPQSFLKDDSIDNKVLTRSDKARGKSDNVPSEEVVKKMKNYWRQLLNAKLITQRKFDNLTKAERGGLSELDKAGFIKRQLVETRQITKHVAQILDSRMNTKYDENDKLIREVKVITLKSKLVSDFRKDFQFYKVREINNYHHAHDAYLNAVVGTALIKKYPKLESEFVYGDYKVYDVRKMIAKSEQEIGKATAKYFFYSNIMNFFKTEITLANGEIRKRPLIETNGETGEIVWDKGRDFATVRKVLSMPQVNIVKKTEVQTGGFSKESILPKRNSDKLIARKKDWDPKKYGGFDSPTVAYSVLVVAKVEKGKSKKLKSVKELLGITIMERSSFEKNPIDFLEAKGYKEVKKDLIIKLPKYSLFELENGRKRMLASAGELQKGNELALPSKYVNFLYLASHYEKLKGSPEDNEQKQLFVEQHKHYLDEIIEQISEFSKRVILADANLDKVLSAYNKHRDKPIREQAENIIHLFTLTNLGAPAAFKYFDTTIDRKRYTSTKEVLDATLIHQSITGLYETRIDLSQLGGDGGPAPEAAAKGSSGGTLGDQGSRGSDPLPEPRVTLTVEGIPTEFLVNTGAEHSVLTKPMGKMGSKRTVVAGATGSKVYPWTTKRLLKIGQKQVTHSFLVIPECPAPLLGRDLLTKLKAQIQFSTEGPQVTWEDRPAMCLVLNLEEEYRLHEKPVPPSIDPSWLQLFPMVWAEKAGMGLANQVPPVVVELKSDASPVAVRQYPMSKEAREGIRPHIQRFLDLGILVPCQSPWNTPLLPVKKPGTNDYRPVQDLREVNKRVQDIHPTVPNPYNLLSSLPPSHTWYSVLDLKDAFFCLKLHPNSQPLFAFEWRDPEKGNTGQLTWTRLPQGFKNSPTLFNEALHRDLASFRALNPQVVMLQYVDDLLVAAPTYRDCKEGTRRLLQELSKLGYRVSAKKAQLCREEVTYLGYLLKGGKRWLTPARKATVMKIPTPTTPRQVREFLGKAGFCRLFIPGFASLAAPLYPLTRPKVPFTWTEAHQEAFGRIKEALLSAPALALPDLTKPFALYVDEKEGVARGVLTQTLGPWRRPVAYLSKKLDPVASGWPTCLKAIAAVALLLKDADKLTLGQNVLVIAPHNLESIVRQPPDRWMTNARMTHYQSLLLNERVSFAPPAILNPATLLPVESDDTPIHICSEILAEETGTRPDLRDQPLPGVPAWYTDGSSFIMDGRRQAGAAIVDNKRTVWASNLPEGTSAQKAELIALTQALRLAEGKSINIYTDSRYAFATAHVHGAIYKQRGWLTSAGKDIKNKEEILALLEAIHLPKRVAIIHCPGHQRGTDPVATGNRKADEAAKQAAQSTRILTETTKNAGKRTADGSEFEKRTADGSEFESPKKKAKVE

SEQ ID NO: 1817 - protein, 2218 aa, synthetic construct
MPAAKRVKLDGGDKKYSIGLDIGTNSVGWAVITDEYKVPSKKFKVLGNTDRHSIKKNLIGALLFDSGETAEATRLKRTARRRYTRRKNRICYLQEIFSNEMAKVDDSFFHRLEESFLVEEDKKHERHPIFGNIVDEVAYHEKYPTIYHLRKKLVDSTDKADLRLIYLALAHMIKFRGHFLIEGDLNPDNSDVDKLFIQLVQTYNQLFEENPINASGVDAKAILSARLSKSRRLENLIAQLPGEKKNGLFGNLIALSLGLTPNFKSNFDLAEDAKLQLSKDTYDDDLDNLLAQIGDQYADLFLAAKNLSDAILLSDILRVNTEITKAPLSASMIKRYDEHHQDLTLLKALVRQQLPEKYKEIFFDQSKNGYAGYIDGGASQEEFYKFIKPILEKMDGTEELLVKLNREDLLRKQRTFDNGSIPHQIHLGELHAILRRQEDFYPFLKDNREKIEKILTFRIPYYVGPLARGNSRFAWMTRKSEETITPWNFEEVVDKGASAQSFIERMTNFDKNLPNEKVLPKHSLLYEYFTVYNELTKVKYVTEGMRKPAFLSGEQKKAIVDLLFKTNRKVTVKQLKEDYFKKIECFDSVEISGVEDRFNASLGTYHDLLKIIKDKDFLDNEENEDILEDIVLTLTLFEDREMIEERLKTYAHLFDDKVMKQLKRRRYTGWGRLSRKLINGIRDKQSGKTILDFLKSDGFANRNFMQLIHDDSLTFKEDIQKAQVSGQGDSLHEHIANLAGSPAIKKGILQTVKVVDELVKVMGRHKPENIVIEMARENQTTQKGQKNSRERMKRIEEGIKELGSQILKEHPVENTQLQNEKLYLYYLQNGRDMYVDQELDINRLSDYDVDHIVPQSFLKDDSIDNKVLTRSDKARGKSDNVPSEEVVKKMKNYWRQLLNAKLITQRKFDNLTKAERGGLSELDKAGFIKRQLVETRQITKHVAQILDSRMNTKYDENDKLIREVKVITLKSKLVSDFRKDFQFYKVREINNYHHAHDAYLNAVVGTALIKKYPKLESEFVYGDYKVYDVRKMIAKSEQEIGKATAKYFFYSNIMNFFKTEITLANGEIRKRPLIETNGETGEIVWDKGRDFATVRKVLSMPQVNIVKKTEVQTGGFSKESILPKRNSDKLIARKKDWDPKKYGGFDSPTVAYSVLVVAKVEKGKSKKLKSVKELLGITIMERSSFEKNPIDFLEAKGYKEVKKDLIIKLPKYSLFELENGRKRMLASAGELQKGNELALPSKYVNFLYLASHYEKLKGSPEDNEQKQLFVEQHKHYLDEIIEQISEFSKRVILADANLDKVLSAYNKHRDKPIREQAENIIHLFTLTNLGAPAAFKYFDTTIDRKRYTSTKEVLDATLIHQSITGLYETRIDLSQLGGDGGGSSGGGEAAAKGGTLGDQGSRGSDPLPEPRVTLTVEGIPTEFLVNTGAEHSVLTKPMGKMGSKRTVVAGATGSKVYPWTTKRLLKIGQKQVTHSFLVIPECPAPLLGRDLLTKLKAQIQFSTEGPQVTWEDRPAMCLVLNLEEEYRLHEKPVPPSIDPSWLQLFPMVWAEKAGMGLANQVPPVVVELKSDASPVAVRQYPMSKEAREGIRPHIQRFLDLGILVPCQSPWNTPLLPVKKPGTNDYRPVQDLREVNKRVQDIHPTVPNPYNLLSSLPPSHTWYSVLDLKDAFFCLKLHPNSQPLFAFEWRDPEKGNTGQLTWTRLPQGFKNSPTLFNEALHRDLASFRALNPQVVMLQYVDDLLVAAPTYRDCKEGTRRLLQELSKLGYRVSAKKAQLCREEVTYLGYLLKGGKRWLTPARKATVMKIPTPTTPRQVREFLGKAGFCRLFIPGFASLAAPLYPLTRPKVPFTWTEAHQEAFGRIKEALLSAPALALPDLTKPFALYVDEKEGVARGVLTQTLGPWRRPVAYLSKKLDPVASGWPTCLKAIAAVALLLKDADKLTLGQNVLVIAPHNLESIVRQPPDRWMTNARMTHYQSLLLNERVSFAPPAILNPATLLPVESDDTPIHICSEILAEETGTRPDLRDQPLPGVPAWYTDGSSFIMDGRRQAGAAIVDNKRTVWASNLPEGTSAQKAELIALTQALRLAEGKSINIYTDSRYAFATAHVHGAIYKQRGWLTSAGKDIKNKEEILALLEAIHLPKRVAIIHCPGHQRGTDPVATGNRKADEAAKQAAQSTRILTETTKNAGKRTADGSEFEKRTADGSEFESPKKKAKVE

SEQ ID NO: 1818 - protein, 2216 aa, synthetic construct
MPAAKRVKLDGGDKKYSIGLDIGTNSVGWAVITDEYKVPSKKFKVLGNTDRHSIKKNLIGALLFDSGETAEATRLKRTARRRYTRRKNRICYLQEIFSNEMAKVDDSFFHRLEESFLVEEDKKHERHPIFGNIVDEVAYHEKYPTIYHLRKKLVDSTDKADLRLIYLALAHMIKFRGHFLIEGDLNPDNSDVDKLFIQLVQTYNQLFEENPINASGVDAKAILSARLSKSRRLENLIAQLPGEKKNGLFGNLIALSLGLTPNFKSNFDLAEDAKLQLSKDTYDDDLDNLLAQIGDQYADLFLAAKNLSDAILLSDILRVNTEITKAPLSASMIKRYDEHHQDLTLLKALVRQQLPEKYKEIFFDQSKNGYAGYIDGGASQEEFYKFIKPILEKMDGTEELLVKLNREDLLRKQRTFDNGSIPHQIHLGELHAILRRQEDFYPFLKDNREKIEKILTFRIPYYVGPLARGNSRFAWMTRKSEETITPWNFEEVVDKGASAQSFIERMTNFDKNLPNEKVLPKHSLLYEYFTVYNELTKVKYVTEGMRKPAFLSGEQKKAIVDLLFKTNRKVTVKQLKEDYFKKIECFDSVEISGVEDRFNASLGTYHDLLKIIKDKDFLDNEENEDILEDIVLTLTLFEDREMIEERLKTYAHLFDDKVMKQLKRRRYTGWGRLSRKLINGIRDKQSGKTILDFLKSDGFANRNFMQLIHDDSLTFKEDIQKAQVSGQGDSLHEHIANLAGSPAIKKGILQTVKVVDELVKVMGRHKPENIVIEMARENQTTQKGQKNSRERMKRIEEGIKELGSQILKEHPVENTQLQNEKLYLYYLQNGRDMYVDQELDINRLSDYDVDHIVPQSFLKDDSIDNKVLTRSDKARGKSDNVPSEEVVKKMKNYWRQLLNAKLITQRKFDNLTKAERGGLSELDKAGFIKRQLVETRQITKHVAQILDSRMNTKYDENDKLIREVKVITLKSKLVSDFRKDFQFYKVREINNYHHAHDAYLNAVVGTALIKKYPKLESEFVYGDYKVYDVRKMIAKSEQEIGKATAKYFFYSNIMNFFKTEITLANGEIRKRPLIETNGETGEIVWDKGRDFATVRKVLSMPQVNIVKKTEVQTGGFSKESILPKRNSDKLIARKKDWDPKKYGGFDSPTVAYSVLVVAKVEKGKSKKLKSVKELLGITIMERSSFEKNPIDFLEAKGYKEVKKDLIIKLPKYSLFELENGRKRMLASAGELQKGNELALPSKYVNFLYLASHYEKLKGSPEDNEQKQLFVEQHKHYLDEIIEQISEFSKRVILADANLDKVLSAYNKHRDKPIREQAENIIHLFTLTNLGAPAAFKYFDTTIDRKRYTSTKEVLDATLIHQSITGLYETRIDLSQLGGDGGGGGGSSPAPGGTLGDQGSRGSDPLPEPRVTLTVEGIPTEFLVNTGAEHSVLTKPMGKMGSKRTVVAGATGSKVYPWTTKRLLKIGQKQVTHSFLVIPECPAPLLGRDLLTKLKAQIQFSTEGPQVTWEDRPAMCLVLNLEEEYRLHEKPVPPSIDPSWLQLFPMVWAEKAGMGLANQVPPVVVELKSDASPVAVRQYPMSKEAREGIRPHIQRFLDLGILVPCQSPWNTPLLPVKKPGTNDYRPVQDLREVNKRVQDIHPTVPNPYNLLSSLPPSHTWYSVLDLKDAFFCLKLHPNSQPLFAFEWRDPEKGNTGQLTWTRLPQGFKNSPTLFNEALHRDLASFRALNPQVVMLQYVDDLLVAAPTYRDCKEGTRRLLQELSKLGYRVSAKKAQLCREEVTYLGYLLKGGKRWLTPARKATVMKIPTPTTPRQVREFLGKAGFCRLFIPGFASLAAPLYPLTRPKVPFTWTEAHQEAFGRIKEALLSAPALALPDLTKPFALYVDEKEGVARGVLTQTLGPWRRPVAYLSKKLDPVASGWPTCLKAIAAVALLLKDADKLTLGQNVLVIAPHNLESIVRQPPDRWMTNARMTHYQSLLLNERVSFAPPAILNPATLLPVESDDTPIHICSEILAEETGTRPDLRDQPLPGVPAWYTDGSSFIMDGRRQAGAAIVDNKRTVWASNLPEGTSAQKAELIALTQALRLAEGKSINIYTDSRYAFATAHVHGAIYKQRGWLTSAGKDIKNKEEILALLEAIHLPKRVAIIHCPGHQRGTDPVATGNRKADEAAKQAAQSTRILTETTKNAGKRTADGSEFEKRTADGSEFESPKKKAKVE

SEQ ID NO: 1819 - protein, 2216 aa, synthetic construct
MPAAKRVKLDGGDKKYSIGLDIGTNSVGWAVITDEYKVPSKKFKVLGNTDRHSIKKNLIGALLFDSGETAEATRLKRTARRRYTRRKNRICYLQEIFSNEMAKVDDSFFHRLEESFLVEEDKKHERHPIFGNIVDEVAYHEKYPTIYHLRKKLVDSTDKADLRLIYLALAHMIKFRGHFLIEGDLNPDNSDVDKLFIQLVQTYNQLFEENPINASGVDAKAILSARLSKSRRLENLIAQLPGEKKNGLFGNLIALSLGLTPNFKSNFDLAEDAKLQLSKDTYDDDLDNLLAQIGDQYADLFLAAKNLSDAILLSDILRVNTEITKAPLSASMIKRYDEHHQDLTLLKALVRQQLPEKYKEIFFDQSKNGYAGYIDGGASQEEFYKFIKPILEKMDGTEELLVKLNREDLLRKQRTFDNGSIPHQIHLGELHAILRRQEDFYPFLKDNREKIEKILTFRIPYYVGPLARGNSRFAWMTRKSEETITPWNFEEVVDKGASAQSFIERMTNFDKNLPNEKVLPKHSLLYEYFTVYNELTKVKYVTEGMRKPAFLSGEQKKAIVDLLFKTNRKVTVKQLKEDYFKKIECFDSVEISGVEDRFNASLGTYHDLLKIIKDKDFLDNEENEDILEDIVLTLTLFEDREMIEERLKTYAHLFDDKVMKQLKRRRYTGWGRLSRKLINGIRDKQSGKTILDFLKSDGFANRNFMQLIHDDSLTFKEDIQKAQVSGQGDSLHEHIANLAGSPAIKKGILQTVKVVDELVKVMGRHKPENIVIEMARENQTTQKGQKNSRERMKRIEEGIKELGSQILKEHPVENTQLQNEKLYLYYLQNGRDMYVDQELDINRLSDYDVDHIVPQSFLKDDSIDNKVLTRSDKARGKSDNVPSEEVVKKMKNYWRQLLNAKLITQRKFDNLTKAERGGLSELDKAGFIKRQLVETRQITKHVAQILDSRMNTKYDENDKLIREVKVITLKSKLVSDFRKDFQFYKVREINNYHHAHDAYLNAVVGTALIKKYPKLESEFVYGDYKVYDVRKMIAKSEQEIGKATAKYFFYSNIMNFFKTEITLANGEIRKRPLIETNGETGEIVWDKGRDFATVRKVLSMPQVNIVKKTEVQTGGFSKESILPKRNSDKLIARKKDWDPKKYGGFDSPTVAYSVLVVAKVEKGKSKKLKSVKELLGITIMERSSFEKNPIDFLEAKGYKEVKKDLIIKLPKYSLFELENGRKRMLASAGELQKGNELALPSKYVNFLYLASHYEKLKGSPEDNEQKQLFVEQHKHYLDEIIEQISEFSKRVILADANLDKVLSAYNKHRDKPIREQAENIIHLFTLTNLGAPAAFKYFDTTIDRKRYTSTKEVLDATLIHQSITGLYETRIDLSQLGGDGGGGSGGGGSSGGTLGDQGSRGSDPLPEPRVTLTVEGIPTEFLVNTGAEHSVLTKPMGKMGSKRTVVAGATGSKVYPWTTKRLLKIGQKQVTHSFLVIPECPAPLLGRDLLTKLKAQIQFSTEGPQVTWEDRPAMCLVLNLEEEYRLHEKPVPPSIDPSWLQLFPMVWAEKAGMGLANQVPPVVVELKSDASPVAVRQYPMSKEAREGIRPHIQRFLDLGILVPCQSPWNTPLLPVKKPGTNDYRPVQDLREVNKRVQDIHPTVPNPYNLLSSLPPSHTWYSVLDLKDAFFCLKLHPNSQPLFAFEWRDPEKGNTGQLTWTRLPQGFKNSPTLFNEALHRDLASFRALNPQVVMLQYVDDLLVAAPTYRDCKEGTRRLLQELSKLGYRVSAKKAQLCREEVTYLGYLLKGGKRWLTPARKATVMKIPTPTTPRQVREFLGKAGFCRLFIPGFASLAAPLYPLTRPKVPFTWTEAHQEAFGRIKEALLSAPALALPDLTKPFALYVDEKEGVARGVLTQTLGPWRRPVAYLSKKLDPVASGWPTCLKAIAAVALLLKDADKLTLGQNVLVIAPHNLESIVRQPPDRWMTNARMTHYQSLLLNERVSFAPPAILNPATLLPVESDDTPIHICSEILAEETGTRPDLRDQPLPGVPAWYTDGSSFIMDGRRQAGAAIVDNKRTVWASNLPEGTSAQKAELIALTQALRLAEGKSINIYTDSRYAFATAHVHGAIYKQRGWLTSAGKDIKNKEEILALLEAIHLPKRVAIIHCPGHQRGTDPVATGNRKADEAAKQAAQSTRILTETTKNAGKRTADGSEFEKRTADGSEFESPKKKAKVE

SEQ ID NO: 1820 - protein, 2215 aa, synthetic construct
MPAAKRVKLDGGDKKYSIGLDIGTNSVGWAVITDEYKVPSKKFKVLGNTDRHSIKKNLIGALLFDSGETAEATRLKRTARRRYTRRKNRICYLQEIFSNEMAKVDDSFFHRLEESFLVEEDKKHERHPIFGNIVDEVAYHEKYPTIYHLRKKLVDSTDKADLRLIYLALAHMIKFRGHFLIEGDLNPDNSDVDKLFIQLVQTYNQLFEENPINASGVDAKAILSARLSKSRRLENLIAQLPGEKKNGLFGNLIALSLGLTPNFKSNFDLAEDAKLQLSKDTYDDDLDNLLAQIGDQYADLFLAAKNLSDAILLSDILRVNTEITKAPLSASMIKRYDEHHQDLTLLKALVRQQLPEKYKEIFFDQSKNGYAGYIDGGASQEEFYKFIKPILEKMDGTEELLVKLNREDLLRKQRTFDNGSIPHQIHLGELHAILRRQEDFYPFLKDNREKIEKILTFRIPYYVGPLARGNSRFAWMTRKSEETITPWNFEEVVDKGASAQSFIERMTNFDKNLPNEKVLPKHSLLYEYFTVYNELTKVKYVTEGMRKPAFLSGEQKKAIVDLLFKTNRKVTVKQLKEDYFKKIECFDSVEISGVEDRFNASLGTYHDLLKIIKDKDFLDNEENEDILEDIVLTLTLFEDREMIEERLKTYAHLFDDKVMKQLKRRRYTGWGRLSRKLINGIRDKQSGKTILDFLKSDGFANRNFMQLIHDDSLTFKEDIQKAQVSGQGDSLHEHIANLAGSPAIKKGILQTVKVVDELVKVMGRHKPENIVIEMARENQTTQKGQKNSRERMKRIEEGIKELGSQILKEHPVENTQLQNEKLYLYYLQNGRDMYVDQELDINRLSDYDVDHIVPQSFLKDDSIDNKVLTRSDKARGKSDNVPSEEVVKKMKNYWRQLLNAKLITQRKFDNLTKAERGGLSELDKAGFIKRQLVETRQITKHVAQILDSRMNTKYDENDKLIREVKVITLKSKLVSDFRKDFQFYKVREINNYHHAHDAYLNAVVGTALIKKYPKLESEFVYGDYKVYDVRKMIAKSEQEIGKATAKYFFYSNIMNFFKTEITLANGEIRKRPLIETNGETGEIVWDKGRDFATVRKVLSMPQVNIVKKTEVQTGGFSKESILPKRNSDKLIARKKDWDPKKYGGFDSPTVAYSVLVVAKVEKGKSKKLKSVKELLGITIMERSSFEKNPIDFLEAKGYKEVKKDLIIKLPKYSLFELENGRKRMLASAGELQKGNELALPSKYVNFLYLASHYEKLKGSPEDNEQKQLFVEQHKHYLDEIIEQISEFSKRVILADANLDKVLSAYNKHRDKPIREQAENIIHLFTLTNLGAPAAFKYFDTTIDRKRYTSTKEVLDATLIHQSITGLYETRIDLSQLGGDGGEAAAKGGGGGTLGDQGSRGSDPLPEPRVTLTVEGIPTEFLVNTGAEHSVLTKPMGKMGSKRTVVAGATGSKVYPWTTKRLLKIGQKQVTHSFLVIPECPAPLLGRDLLTKLKAQIQFSTEGPQVTWEDRPAMCLVLNLEEEYRLHEKPVPPSIDPSWLQLFPMVWAEKAGMGLANQVPPVVVELKSDASPVAVRQYPMSKEAREGIRPHIQRFLDLGILVPCQSPWNTPLLPVKKPGTNDYRPVQDLREVNKRVQDIHPTVPNPYNLLSSLPPSHTWYSVLDLKDAFFCLKLHPNSQPLFAFEWRDPEKGNTGQLTWTRLPQGFKNSPTLFNEALHRDLASFRALNPQVVMLQYVDDLLVAAPTYRDCKEGTRRLLQELSKLGYRVSAKKAQLCREEVTYLGYLLKGGKRWLTPARKATVMKIPTPTTPRQVREFLGKAGFCRLFIPGFASLAAPLYPLTRPKVPFTWTEAHQEAFGRIKEALLSAPALALPDLTKPFALYVDEKEGVARGVLTQTLGPWRRPVAYLSKKLDPVASGWPTCLKAIAAVALLLKDADKLTLGQNVLVIAPHNLESIVRQPPDRWMTNARMTHYQSLLLNERVSFAPPAILNPATLLPVESDDTPIHICSEILAEETGTRPDLRDQPLPGVPAWYTDGSSFIMDGRRQAGAAIVDNKRTVWASNLPEGTSAQKAELIALTQALRLAEGKSINIYTDSRYAFATAHVHGAIYKQRGWLTSAGKDIKNKEEILALLEAIHLPKRVAIIHCPGHQRGTDPVATGNRKADEAAKQAAQSTRILTETTKNAGKRTADGSEFEKRTADGSEFESPKKKAKVE

SEQ ID NO: 1821 - protein, 2215 aa, synthetic construct
MPAAKRVKLDGGDKKYSIGLDIGTNSVGWAVITDEYKVPSKKFKVLGNTDRHSIKKNLIGALLFDSGETAEATRLKRTARRRYTRRKNRICYLQEIFSNEMAKVDDSFFHRLEESFLVEEDKKHERHPIFGNIVDEVAYHEKYPTIYHLRKKLVDSTDKADLRLIYLALAHMIKFRGHFLIEGDLNPDNSDVDKLFIQLVQTYNQLFEENPINASGVDAKAILSARLSKSRRLENLIAQLPGEKKNGLFGNLIALSLGLTPNFKSNFDLAEDAKLQLSKDTYDDDLDNLLAQIGDQYADLFLAAKNLSDAILLSDILRVNTEITKAPLSASMIKRYDEHHQDLTLLKALVRQQLPEKYKEIFFDQSKNGYAGYIDGGASQEEFYKFIKPILEKMDGTEELLVKLNREDLLRKQRTFDNGSIPHQIHLGELHAILRRQEDFYPFLKDNREKIEKILTFRIPYYVGPLARGNSRFAWMTRKSEETITPWNFEEVVDKGASAQSFIERMTNFDKNLPNEKVLPKHSLLYEYFTVYNELTKVKYVTEGMRKPAFLSGEQKKAIVDLLFKTNRKVTVKQLKEDYFKKIECFDSVEISGVEDRFNASLGTYHDLLKIIKDKDFLDNEENEDILEDIVLTLTLFEDREMIEERLKTYAHLFDDKVMKQLKRRRYTGWGRLSRKLINGIRDKQSGKTILDFLKSDGFANRNFMQLIHDDSLTFKEDIQKAQVSGQGDSLHEHIANLAGSPAIKKGILQTVKVVDELVKVMGRHKPENIVIEMARENQTTQKGQKNSRERMKRIEEGIKELGSQILKEHPVENTQLQNEKLYLYYLQNGRDMYVDQELDINRLSDYDVDHIVPQSFLKDDSIDNKVLTRSDKARGKSDNVPSEEVVKKMKNYWRQLLNAKLITQRKFDNLTKAERGGLSELDKAGFIKRQLVETRQITKHVAQILDSRMNTKYDENDKLIREVKVITLKSKLVSDFRKDFQFYKVREINNYHHAHDAYLNAVVGTALIKKYPKLESEFVYGDYKVYDVRKMIAKSEQEIGKATAKYFFYSNIMNFFKTEITLANGEIRKRPLIETNGETGEIVWDKGRDFATVRKVLSMPQVNIVKKTEVQTGGFSKESILPKRNSDKLIARKKDWDPKKYGGFDSPTVAYSVLVVAKVEKGKSKKLKSVKELLGITIMERSSFEKNPIDFLEAKGYKEVKKDLIIKLPKYSLFELENGRKRMLASAGELQKGNELALPSKYVNFLYLASHYEKLKGSPEDNEQKQLFVEQHKHYLDEIIEQISEFSKRVILADANLDKVLSAYNKHRDKPIREQAENIIHLFTLTNLGAPAAFKYFDTTIDRKRYTSTKEVLDATLIHQSITGLYETRIDLSQLGGDGGEAAAKGGSGGTLGDQGSRGSDPLPEPRVTLTVEGIPTEFLVNTGAEHSVLTKPMGKMGSKRTVVAGATGSKVYPWTTKRLLKIGQKQVTHSFLVIPECPAPLLGRDLLTKLKAQIQFSTEGPQVTWEDRPAMCLVLNLEEEYRLHEKPVPPSIDPSWLQLFPMVWAEKAGMGLANQVPPVVVELKSDASPVAVRQYPMSKEAREGIRPHIQRFLDLGILVPCQSPWNTPLLPVKKPGTNDYRPVQDLREVNKRVQDIHPTVPNPYNLLSSLPPSHTWYSVLDLKDAFFCLKLHPNSQPLFAFEWRDPEKGNTGQLTWTRLPQGFKNSPTLFNEALHRDLASFRALNPQVVMLQYVDDLLVAAPTYRDCKEGTRRLLQELSKLGYRVSAKKAQLCREEVTYLGYLLKGGKRWLTPARKATVMKIPTPTTPRQVREFLGKAGFCRLFIPGFASLAAPLYPLTRPKVPFTWTEAHQEAFGRIKEALLSAPALALPDLTKPFALYVDEKEGVARGVLTQTLGPWRRPVAYLSKKLDPVASGWPTCLKAIAAVALLLKDADKLTLGQNVLVIAPHNLESIVRQPPDRWMTNARMTHYQSLLLNERVSFAPPAILNPATLLPVESDDTPIHICSEILAEETGTRPDLRDQPLPGVPAWYTDGSSFIMDGRRQAGAAIVDNKRTVWASNLPEGTSAQKAELIALTQALRLAEGKSINIYTDSRYAFATAHVHGAIYKQRGWLTSAGKDIKNKEEILALLEAIHLPKRVAIIHCPGHQRGTDPVATGNRKADEAAKQAAQSTRILTETTKNAGKRTADGSEFEKRTADGSEFESPKKKAKVE

SEQ ID NO: 1822 - protein, 2218 aa, synthetic construct
MPAAKRVKLDGGDKKYSIGLDIGTNSVGWAVITDEYKVPSKKFKVLGNTDRHSIKKNLIGALLFDSGETAEATRLKRTARRRYTRRKNRICYLQEIFSNEMAKVDDSFFHRLEESFLVEEDKKHERHPIFGNIVDEVAYHEKYPTIYHLRKKLVDSTDKADLRLIYLALAHMIKFRGHFLIEGDLNPDNSDVDKLFIQLVQTYNQLFEENPINASGVDAKAILSARLSKSRRLENLIAQLPGEKKNGLFGNLIALSLGLTPNFKSNFDLAEDAKLQLSKDTYDDDLDNLLAQIGDQYADLFLAAKNLSDAILLSDILRVNTEITKAPLSASMIKRYDEHHQDLTLLKALVRQQLPEKYKEIFFDQSKNGYAGYIDGGASQEEFYKFIKPILEKMDGTEELLVKLNREDLLRKQRTFDNGSIPHQIHLGELHAILRRQEDFYPFLKDNREKIEKILTFRIPYYVGPLARGNSRFAWMTRKSEETITPWNFEEVVDKGASAQSFIERMTNFDKNLPNEKVLPKHSLLYEYFTVYNELTKVKYVTEGMRKPAFLSGEQKKAIVDLLFKTNRKVTVKQLKEDYFKKIECFDSVEISGVEDRFNASLGTYHDLLKIIKDKDFLDNEENEDILEDIVLTLTLFEDREMIEERLKTYAHLFDDKVMKQLKRRRYTGWGRLSRKLINGIRDKQSGKTILDFLKSDGFANRNFMQLIHDDSLTFKEDIQKAQVSGQGDSLHEHIANLAGSPAIKKGILQTVKVVDELVKVMGRHKPENIVIEMARENQTTQKGQKNSRERMKRIEEGIKELGSQILKEHPVENTQLQNEKLYLYYLQNGRDMYVDQELDINRLSDYDVDHIVPQSFLKDDSIDNKVLTRSDKARGKSDNVPSEEVVKKMKNYWRQLLNAKLITQRKFDNLTKAERGGLSELDKAGFIKRQLVETRQITKHVAQILDSRMNTKYDENDKLIREVKVITLKSKLVSDFRKDFQFYKVREINNYHHAHDAYLNAVVGTALIKKYPKLESEFVYGDYKVYDVRKMIAKSEQEIGKATAKYFFYSNIMNFFKTEITLANGEIRKRPLIETNGETGEIVWDKGRDFATVRKVLSMPQVNIVKKTEVQTGGFSKESILPKRNSDKLIARKKDWDPKKYGGFDSPTVAYSVLVVAKVEKGKSKKLKSVKELLGITIMERSSFEKNPIDFLEAKGYKEVKKDLIIKLPKYSLFELENGRKRMLASAGELQKGNELALPSKYVNFLYLASHYEKLKGSPEDNEQKQLFVEQHKHYLDEIIEQISEFSKRVILADANLDKVLSAYNKHRDKPIREQAENIIHLFTLTNLGAPAAFKYFDTTIDRKRYTSTKEVLDATLIHQSITGLYETRIDLSQLGGDGGEAAAKPAPGSSGGTLGDQGSRGSDPLPEPRVTLTVEGIPTEFLVNTGAEHSVLTKPMGKMGSKRTVVAGATGSKVYPWTTKRLLKIGQKQVTHSFLVIPECPAPLLGRDLLTKLKAQIQFSTEGPQVTWEDRPAMCLVLNLEEEYRLHEKPVPPSIDPSWLQLFPMVWAEKAGMGLANQVPPVVVELKSDASPVAVRQYPMSKEAREGIRPHIQRFLDLGILVPCQSPWNTPLLPVKKPGTNDYRPVQDLREVNKRVQDIHPTVPNPYNLLSSLPPSHTWYSVLDLKDAFFCLKLHPNSQPLFAFEWRDPEKGNTGQLTWTRLPQGFKNSPTLFNEALHRDLASFRALNPQVVMLQYVDDLLVAAPTYRDCKEGTRRLLQELSKLGYRVSAKKAQLCREEVTYLGYLLKGGKRWLTPARKATVMKIPTPTTPRQVREFLGKAGFCRLFIPGFASLAAPLYPLTRPKVPFTWTEAHQEAFGRIKEALLSAPALALPDLTKPFALYVDEKEGVARGVLTQTLGPWRRPVAYLSKKLDPVASGWPTCLKAIAAVALLLKDADKLTLGQNVLVIAPHNLESIVRQPPDRWMTNARMTHYQSLLLNERVSFAPPAILNPATLLPVESDDTPIHICSEILAEETGTRPDLRDQPLPGVPAWYTDGSSFIMDGRRQAGAAIVDNKRTVWASNLPEGTSAQKAELIALTQALRLAEGKSINIYTDSRYAFATAHVHGAIYKQRGWLTSAGKDIKNKEEILALLEAIHLPKRVAIIHCPGHQRGTDPVATGNRKADEAAKQAAQSTRILTETTKNAGKRTADGSEFEKRTADGSEFESPKKKAKVE

SEQ ID NO: 1823 - protein, 2218 aa, synthetic construct
MPAAKRVKLDGGDKKYSIGLDIGTNSVGWAVITDEYKVPSKKFKVLGNTDRHSIKKNLIGALLFDSGETAEATRLKRTARRRYTRRKNRICYLQEIFSNEMAKVDDSFFHRLEESFLVEEDKKHERHPIFGNIVDEVAYHEKYPTIYHLRKKLVDSTDKADLRLIYLALAHMIKFRGHFLIEGDLNPDNSDVDKLFIQLVQTYNQLFEENPINASGVDAKAILSARLSKSRRLENLIAQLPGEKKNGLFGNLIALSLGLTPNFKSNFDLAEDAKLQLSKDTYDDDLDNLLAQIGDQYADLFLAAKNLSDAILLSDILRVNTEITKAPLSASMIKRYDEHHQDLTLLKALVRQQLPEKYKEIFFDQSKNGYAGYIDGGASQEEFYKFIKPILEKMDGTEELLVKLNREDLLRKQRTFDNGSIPHQIHLGELHAILRRQEDFYPFLKDNREKIEKILTFRIPYYVGPLARGNSRFAWMTRKSEETITPWNFEEVVDKGASAQSFIERMTNFDKNLPNEKVLPKHSLLYEYFTVYNELTKVKYVTEGMRKPAFLSGEQKKAIVDLLFKTNRKVTVKQLKEDYFKKIECFDSVEISGVEDRFNASLGTYHDLLKIIKDKDFLDNEENEDILEDIVLTLTLFEDREMIEERLKTYAHLFDDKVMKQLKRRRYTGWGRLSRKLINGIRDKQSGKTILDFLKSDGFANRNFMQLIHDDSLTFKEDIQKAQVSGQGDSLHEHIANLAGSPAIKKGILQTVKVVDELVKVMGRHKPENIVIEMARENQTTQKGQKNSRERMKRIEEGIKELGSQILKEHPVENTQLQNEKLYLYYLQNGRDMYVDQELDINRLSDYDVDHIVPQSFLKDDSIDNKVLTRSDKARGKSDNVPSEEVVKKMKNYWRQLLNAKLITQRKFDNLTKAERGGLSELDKAGFIKRQLVETRQITKHVAQILDSRMNTKYDENDKLIREVKVITLKSKLVSDFRKDFQFYKVREINNYHHAHDAYLNAVVGTALIKKYPKLESEFVYGDYKVYDVRKMIAKSEQEIGKATAKYFFYSNIMNFFKTEITLANGEIRKRPLIETNGETGEIVWDKGRDFATVRKVLSMPQVNIVKKTEVQTGGFSKESILPKRNSDKLIARKKDWDPKKYGGFDSPTVAYSVLVVAKVEKGKSKKLKSVKELLGITIMERSSFEKNPIDFLEAKGYKEVKKDLIIKLPKYSLFELENGRKRMLASAGELQKGNELALPSKYVNFLYLASHYEKLKGSPEDNEQKQLFVEQHKHYLDEIIEQISEFSKRVILADANLDKVLSAYNKHRDKPIREQAENIIHLFTLTNLGAPAAFKYFDTTIDRKRYTSTKEVLDATLIHQSITGLYETRIDLSQLGGDGGGGGGSSEAAAKGGTLGDQGSRGSDPLPEPRVTLTVEGIPTEFLVNTGAEHSVLTKPMGKMGSKRTVVAGATGSKVYPWTTKRLLKIGQKQVTHSFLVIPECPAPLLGRDLLTKLKAQIQFSTEGPQVTWEDRPAMCLVLNLEEEYRLHEKPVPPSIDPSWLQLFPMVWAEKAGMGLANQVPPVVVELKSDASPVAVRQYPMSKEAREGIRPHIQRFLDLGILVPCQSPWNTPLLPVKKPGTNDYRPVQDLREVNKRVQDIHPTVPNPYNLLSSLPPSHTWYSVLDLKDAFFCLKLHPNSQPLFAFEWRDPEKGNTGQLTWTRLPQGFKNSPTLFNEALHRDLASFRALNPQVVMLQYVDDLLVAAPTYRDCKEGTRRLLQELSKLGYRVSAKKAQLCREEVTYLGYLLKGGKRWLTPARKATVMKIPTPTTPRQVREFLGKAGFCRLFIPGFASLAAPLYPLTRPKVPFTWTEAHQEAFGRIKEALLSAPALALPDLTKPFALYVDEKEGVARGVLTQTLGPWRRPVAYLSKKLDPVASGWPTCLKAIAAVALLLKDADKLTLGQNVLVIAPHNLESIVRQPPDRWMTNARMTHYQSLLLNERVSFAPPAILNPATLLPVESDDTPIHICSEILAEETGTRPDLRDQPLPGVPAWYTDGSSFIMDGRRQAGAAIVDNKRTVWASNLPEGTSAQKAELIALTQALRLAEGKSINIYTDSRYAFATAHVHGAIYKQRGWLTSAGKDIKNKEEILALLEAIHLPKRVAIIHCPGHQRGTDPVATGNRKADEAAKQAAQSTRILTETTKNAGKRTADGSEFEKRTADGSEFESPKKKAKVE

SEQ ID NO: 1824 - protein, 2216 aa, synthetic construct
MPAAKRVKLDGGDKKYSIGLDIGTNSVGWAVITDEYKVPSKKFKVLGNTDRHSIKKNLIGALLFDSGETAEATRLKRTARRRYTRRKNRICYLQEIFSNEMAKVDDSFFHRLEESFLVEEDKKHERHPIFGNIVDEVAYHEKYPTIYHLRKKLVDSTDKADLRLIYLALAHMIKFRGHFLIEGDLNPDNSDVDKLFIQLVQTYNQLFEENPINASGVDAKAILSARLSKSRRLENLIAQLPGEKKNGLFGNLIALSLGLTPNFKSNFDLAEDAKLQLSKDTYDDDLDNLLAQIGDQYADLFLAAKNLSDAILLSDILRVNTEITKAPLSASMIKRYDEHHQDLTLLKALVRQQLPEKYKEIFFDQSKNGYAGYIDGGASQEEFYKFIKPILEKMDGTEELLVKLNREDLLRKQRTFDNGSIPHQIHLGELHAILRRQEDFYPFLKDNREKIEKILTFRIPYYVGPLARGNSRFAWMTRKSEETITPWNFEEVVDKGASAQSFIERMTNFDKNLPNEKVLPKHSLLYEYFTVYNELTKVKYVTEGMRKPAFLSGEQKKAIVDLLFKTNRKVTVKQLKEDYFKKIECFDSVEISGVEDRFNASLGTYHDLLKIIKDKDFLDNEENEDILEDIVLTLTLFEDREMIEERLKTYAHLFDDKVMKQLKRRRYTGWGRLSRKLINGIRDKQSGKTILDFLKSDGFANRNFMQLIHDDSLTFKEDIQKAQVSGQGDSLHEHIANLAGSPAIKKGILQTVKVVDELVKVMGRHKPENIVIEMARENQTTQKGQKNSRERMKRIEEGIKELGSQILKEHPVENTQLQNEKLYLYYLQNGRDMYVDQELDINRLSDYDVDHIVPQSFLKDDSIDNKVLTRSDKARGKSDNVPSEEVVKKMKNYWRQLLNAKLITQRKFDNLTKAERGGLSELDKAGFIKRQLVETRQITKHVAQILDSRMNTKYDENDKLIREVKVITLKSKLVSDFRKDFQFYKVREINNYHHAHDAYLNAVVGTALIKKYPKLESEFVYGDYKVYDVRKMIAKSEQEIGKATAKYFFYSNIMNFFKTEITLANGEIRKRPLIETNGETGEIVWDKGRDFATVRKVLSMPQVNIVKKTEVQTGGFSKESILPKRNSDKLIARKKDWDPKKYGGFDSPTVAYSVLVVAKVEKGKSKKLKSVKELLGITIMERSSFEKNPIDFLEAKGYKEVKKDLIIKLPKYSLFELENGRKRMLASAGELQKGNELALPSKYVNFLYLASHYEKLKGSPEDNEQKQLFVEQHKHYLDEIIEQISEFSKRVILADANLDKVLSAYNKHRDKPIREQAENIIHLFTLTNLGAPAAFKYFDTTIDRKRYTSTKEVLDATLIHQSITGLYETRIDLSQLGGDGGPAPAPAPAPGGTLGDQGSRGSDPLPEPRVTLTVEGIPTEFLVNTGAEHSVLTKPMGKMGSKRTVVAGATGSKVYPWTTKRLLKIGQKQVTHSFLVIPECPAPLLGRDLLTKLKAQIQFSTEGPQVTWEDRPAMCLVLNLEEEYRLHEKPVPPSIDPSWLQLFPMVWAEKAGMGLANQVPPVVVELKSDASPVAVRQYPMSKEAREGIRPHIQRFLDLGILVPCQSPWNTPLLPVKKPGTNDYRPVQDLREVNKRVQDIHPTVPNPYNLLSSLPPSHTWYSVLDLKDAFFCLKLHPNSQPLFAFEWRDPEKGNTGQLTWTRLPQGFKNSPTLFNEALHRDLASFRALNPQVVMLQYVDDLLVAAPTYRDCKEGTRRLLQELSKLGYRVSAKKAQLCREEVTYLGYLLKGGKRWLTPARKATVMKIPTPTTPRQVREFLGKAGFCRLFIPGFASLAAPLYPLTRPKVPFTWTEAHQEAFGRIKEALLSAPALALPDLTKPFALYVDEKEGVARGVLTQTLGPWRRPVAYLSKKLDPVASGWPTCLKAIAAVALLLKDADKLTLGQNVLVIAPHNLESIVRQPPDRWMTNARMTHYQSLLLNERVSFAPPAILNPATLLPVESDDTPIHICSEILAEETGTRPDLRDQPLPGVPAWYTDGSSFIMDGRRQAGAAIVDNKRTVWASNLPEGTSAQKAELIALTQALRLAEGKSINIYTDSRYAFATAHVHGAIYKQRGWLTSAGKDIKNKEEILALLEAIHLPKRVAIIHCPGHQRGTDPVATGNRKADEAAKQAAQSTRILTETTKNAGKRTADGSEFEKRTADGSEFESPKKKAKVE

SEQ ID NO: 1825 - protein, 2215 aa, synthetic construct
MPAAKRVKLDGGDKKYSIGLDIGTNSVGWAVITDEYKVPSKKFKVLGNTDRHSIKKNLIGALLFDSGETAEATRLKRTARRRYTRRKNRICYLQEIFSNEMAKVDDSFFHRLEESFLVEEDKKHERHPIFGNIVDEVAYHEKYPTIYHLRKKLVDSTDKADLRLIYLALAHMIKFRGHFLIEGDLNPDNSDVDKLFIQLVQTYNQLFEENPINASGVDAKAILSARLSKSRRLENLIAQLPGEKKNGLFGNLIALSLGLTPNFKSNFDLAEDAKLQLSKDTYDDDLDNLLAQIGDQYADLFLAAKNLSDAILLSDILRVNTEITKAPLSASMIKRYDEHHQDLTLLKALVRQQLPEKYKEIFFDQSKNGYAGYIDGGASQEEFYKFIKPILEKMDGTEELLVKLNREDLLRKQRTFDNGSIPHQIHLGELHAILRRQEDFYPFLKDNREKIEKILTFRIPYYVGPLARGNSRFAWMTRKSEETITPWNFEEVVDKGASAQSFIERMTNFDKNLPNEKVLPKHSLLYEYFTVYNELTKVKYVTEGMRKPAFLSGEQKKAIVDLLFKTNRKVTVKQLKEDYFKKIECFDSVEISGVEDRFNASLGTYHDLLKIIKDKDFLDNEENEDILEDIVLTLTLFEDREMIEERLKTYAHLFDDKVMKQLKRRRYTGWGRLSRKLINGIRDKQSGKTILDFLKSDGFANRNFMQLIHDDSLTFKEDIQKAQVSGQGDSLHEHIANLAGSPAIKKGILQTVKVVDELVKVMGRHKPENIVIEMARENQTTQKGQKNSRERMKRIEEGIKELGSQILKEHPVENTQLQNEKLYLYYLQNGRDMYVDQELDINRLSDYDVDHIVPQSFLKDDSIDNKVLTRSDKARGKSDNVPSEEVVKKMKNYWRQLLNAKLITQRKFDNLTKAERGGLSELDKAGFIKRQLVETRQITKHVAQILDSRMNTKYDENDKLIREVKVITLKSKLVSDFRKDFQFYKVREINNYHHAHDAYLNAVVGTALIKKYPKLESEFVYGDYKVYDVRKMIAKSEQEIGKATAKYFFYSNIMNFFKTEITLANGEIRKRPLIETNGETGEIVWDKGRDFATVRKVLSMPQVNIVKKTEVQTGGFSKESILPKRNSDKLIARKKDWDPKKYGGFDSPTVAYSVLVVAKVEKGKSKKLKSVKELLGITIMERSSFEKNPIDFLEAKGYKEVKKDLIIKLPKYSLFELENGRKRMLASAGELQKGNELALPSKYVNFLYLASHYEKLKGSPEDNEQKQLFVEQHKHYLDEIIEQISEFSKRVILADANLDKVLSAYNKHRDKPIREQAENIIHLFTLTNLGAPAAFKYFDTTIDRKRYTSTKEVLDATLIHQSITGLYETRIDLSQLGGDGGGGSEAAAKGGTLGDQGSRGSDPLPEPRVTLTVEGIPTEFLVNTGAEHSVLTKPMGKMGSKRTVVAGATGSKVYPWTTKRLLKIGQKQVTHSFLVIPECPAPLLGRDLLTKLKAQIQFSTEGPQVTWEDRPAMCLVLNLEEEYRLHEKPVPPSIDPSWLQLFPMVWAEKAGMGLANQVPPVVVELKSDASPVAVRQYPMSKEAREGIRPHIQRFLDLGILVPCQSPWNTPLLPVKKPGTNDYRPVQDLREVNKRVQDIHPTVPNPYNLLSSLPPSHTWYSVLDLKDAFFCLKLHPNSQPLFAFEWRDPEKGNTGQLTWTRLPQGFKNSPTLFNEALHRDLASFRALNPQVVMLQYVDDLLVAAPTYRDCKEGTRRLLQELSKLGYRVSAKKAQLCREEVTYLGYLLKGGKRWLTPARKATVMKIPTPTTPRQVREFLGKAGFCRLFIPGFASLAAPLYPLTRPKVPFTWTEAHQEAFGRIKEALLSAPALALPDLTKPFALYVDEKEGVARGVLTQTLGPWRRPVAYLSKKLDPVASGWPTCLKAIAAVALLLKDADKLTLGQNVLVIAPHNLESIVRQPPDRWMTNARMTHYQSLLLNERVSFAPPAILNPATLLPVESDDTPIHICSEILAEETGTRPDLRDQPLPGVPAWYTDGSSFIMDGRRQAGAAIVDNKRTVWASNLPEGTSAQKAELIALTQALRLAEGKSINIYTDSRYAFATAHVHGAIYKQRGWLTSAGKDIKNKEEILALLEAIHLPKRVAIIHCPGHQRGTDPVATGNRKADEAAKQAAQSTRILTETTKNAGKRTADGSEFEKRTADGSEFESPKKKAKVE

SEQ ID NO: 1826 - protein, 2216 aa, synthetic construct
MPAAKRVKLDGGDKKYSIGLDIGTNSVGWAVITDEYKVPSKKFKVLGNTDRHSIKKNLIGALLFDSGETAEATRLKRTARRRYTRRKNRICYLQEIFSNEMAKVDDSFFHRLEESFLVEEDKKHERHPIFGNIVDEVAYHEKYPTIYHLRKKLVDSTDKADLRLIYLALAHMIKFRGHFLIEGDLNPDNSDVDKLFIQLVQTYNQLFEENPINASGVDAKAILSARLSKSRRLENLIAQLPGEKKNGLFGNLIALSLGLTPNFKSNFDLAEDAKLQLSKDTYDDDLDNLLAQIGDQYADLFLAAKNLSDAILLSDILRVNTEITKAPLSASMIKRYDEHHQDLTLLKALVRQQLPEKYKEIFFDQSKNGYAGYIDGGASQEEFYKFIKPILEKMDGTEELLVKLNREDLLRKQRTFDNGSIPHQIHLGELHAILRRQEDFYPFLKDNREKIEKILTFRIPYYVGPLARGNSRFAWMTRKSEETITPWNFEEVVDKGASAQSFIERMTNFDKNLPNEKVLPKHSLLYEYFTVYNELTKVKYVTEGMRKPAFLSGEQKKAIVDLLFKTNRKVTVKQLKEDYFKKIECFDSVEISGVEDRFNASLGTYHDLLKIIKDKDFLDNEENEDILEDIVLTLTLFEDREMIEERLKTYAHLFDDKVMKQLKRRRYTGWGRLSRKLINGIRDKQSGKTILDFLKSDGFANRNFMQLIHDDSLTFKEDIQKAQVSGQGDSLHEHIANLAGSPAIKKGILQTVKVVDELVKVMGRHKPENIVIEMARENQTTQKGQKNSRERMKRIEEGIKELGSQILKEHPVENTQLQNEKLYLYYLQNGRDMYVDQELDINRLSDYDVDHIVPQSFLKDDSIDNKVLTRSDKARGKSDNVPSEEVVKKMKNYWRQLLNAKLITQRKFDNLTKAERGGLSELDKAGFIKRQLVETRQITKHVAQILDSRMNTKYDENDKLIREVKVITLKSKLVSDFRKDFQFYKVREINNYHHAHDAYLNAVVGTALIKKYPKLESEFVYGDYKVYDVRKMIAKSEQEIGKATAKYFFYSNIMNFFKTEITLANGEIRKRPLIETNGETGEIVWDKGRDFATVRKVLSMPQVNIVKKTEVQTGGFSKESILPKRNSDKLIARKKDWDPKKYGGFDSPTVAYSVLVVAKVEKGKSKKLKSVKELLGITIMERSSFEKNPIDFLEAKGYKEVKKDLIIKLPKYSLFELENGRKRMLASAGELQKGNELALPSKYVNFLYLASHYEKLKGSPEDNEQKQLFVEQHKHYLDEIIEQISEFSKRVILADANLDKVLSAYNKHRDKPIREQAENIIHLFTLTNLGAPAAFKYFDTTIDRKRYTSTKEVLDATLIHQSITGLYETRIDLSQLGGDGGGGGPAPGGSGGTLGDQGSRGSDPLPEPRVTLTVEGIPTEFLVNTGAEHSVLTKPMGKMGSKRTVVAGATGSKVYPWTTKRLLKIGQKQVTHSFLVIPECPAPLLGRDLLTKLKAQIQFSTEGPQVTWEDRPAMCLVLNLEEEYRLHEKPVPPSIDPSWLQLFPMVWAEKAGMGLANQVPPVVVELKSDASPVAVRQYPMSKEAREGIRPHIQRFLDLGILVPCQSPWNTPLLPVKKPGTNDYRPVQDLREVNKRVQDIHPTVPNPYNLLSSLPPSHTWYSVLDLKDAFFCLKLHPNSQPLFAFEWRDPEKGNTGQLTWTRLPQGFKNSPTLFNEALHRDLASFRALNPQVVMLQYVDDLLVAAPTYRDCKEGTRRLLQELSKLGYRVSAKKAQLCREEVTYLGYLLKGGKRWLTPARKATVMKIPTPTTPRQVREFLGKAGFCRLFIPGFASLAAPLYPLTRPKVPFTWTEAHQEAFGRIKEALLSAPALALPDLTKPFALYVDEKEGVARGVLTQTLGPWRRPVAYLSKKLDPVASGWPTCLKAIAAVALLLKDADKLTLGQNVLVIAPHNLESIVRQPPDRWMTNARMTHYQSLLLNERVSFAPPAILNPATLLPVESDDTPIHICSEILAEETGTRPDLRDQPLPGVPAWYTDGSSFIMDGRRQAGAAIVDNKRTVWASNLPEGTSAQKAELIALTQALRLAEGKSINIYTDSRYAFATAHVHGAIYKQRGWLTSAGKDIKNKEEILALLEAIHLPKRVAIIHCPGHQRGTDPVATGNRKADEAAKQAAQSTRILTETTKNAGKRTADGSEFEKRTADGSEFESPKKKAKVE

SEQ ID NO: 1827 - protein, 2216 aa, synthetic construct
MPAAKRVKLDGGDKKYSIGLDIGTNSVGWAVITDEYKVPSKKFKVLGNTDRHSIKKNLIGALLFDSGETAEATRLKRTARRRYTRRKNRICYLQEIFSNEMAKVDDSFFHRLEESFLVEEDKKHERHPIFGNIVDEVAYHEKYPTIYHLRKKLVDSTDKADLRLIYLALAHMIKFRGHFLIEGDLNPDNSDVDKLFIQLVQTYNQLFEENPINASGVDAKAILSARLSKSRRLENLIAQLPGEKKNGLFGNLIALSLGLTPNFKSNFDLAEDAKLQLSKDTYDDDLDNLLAQIGDQYADLFLAAKNLSDAILLSDILRVNTEITKAPLSASMIKRYDEHHQDLTLLKALVRQQLPEKYKEIFFDQSKNGYAGYIDGGASQEEFYKFIKPILEKMDGTEELLVKLNREDLLRKQRTFDNGSIPHQIHLGELHAILRRQEDFYPFLKDNREKIEKILTFRIPYYVGPLARGNSRFAWMTRKSEETITPWNFEEVVDKGASAQSFIERMTNFDKNLPNEKVLPKHSLLYEYFTVYNELTKVKYVTEGMRKPAFLSGEQKKAIVDLLFKTNRKVTVKQLKEDYFKKIECFDSVEISGVEDRFNASLGTYHDLLKIIKDKDFLDNEENEDILEDIVLTLTLFEDREMIEERLKTYAHLFDDKVMKQLKRRRYTGWGRLSRKLINGIRDKQSGKTILDFLKSDGFANRNFMQLIHDDSLTFKEDIQKAQVSGQGDSLHEHIANLAGSPAIKKGILQTVKVVDELVKVMGRHKPENIVIEMARENQTTQKGQKNSRERMKRIEEGIKELGSQILKEHPVENTQLQNEKLYLYYLQNGRDMYVDQELDINRLSDYDVDHIVPQSFLKDDSIDNKVLTRSDKARGKSDNVPSEEVVKKMKNYWRQLLNAKLITQRKFDNLTKAERGGLSELDKAGFIKRQLVETRQITKHVAQILDSRMNTKYDENDKLIREVKVITLKSKLVSDFRKDFQFYKVREINNYHHAHDAYLNAVVGTALIKKYPKLESEFVYGDYKVYDVRKMIAKSEQEIGKATAKYFFYSNIMNFFKTEITLANGEIRKRPLIETNGETGEIVWDKGRDFATVRKVLSMPQVNIVKKTEVQTGGFSKESILPKRNSDKLIARKKDWDPKKYGGFDSPTVAYSVLVVAKVEKGKSKKLKSVKELLGITIMERSSFEKNPIDFLEAKGYKEVKKDLIIKLPKYSLFELENGRKRMLASAGELQKGNELALPSKYVNFLYLASHYEKLKGSPEDNEQKQLFVEQHKHYLDEIIEQISEFSKRVILADANLDKVLSAYNKHRDKPIREQAENIIHLFTLTNLGAPAAFKYFDTTIDRKRYTSTKEVLDATLIHQSITGLYETRIDLSQLGGDGGPAPGGSGSSGGTLGDQGSRGSDPLPEPRVTLTVEGIPTEFLVNTGAEHSVLTKPMGKMGSKRTVVAGATGSKVYPWTTKRLLKIGQKQVTHSFLVIPECPAPLLGRDLLTKLKAQIQFSTEGPQVTWEDRPAMCLVLNLEEEYRLHEKPVPPSIDPSWLQLFPMVWAEKAGMGLANQVPPVVVELKSDASPVAVRQYPMSKEAREGIRPHIQRFLDLGILVPCQSPWNTPLLPVKKPGTNDYRPVQDLREVNKRVQDIHPTVPNPYNLLSSLPPSHTWYSVLDLKDAFFCLKLHPNSQPLFAFEWRDPEKGNTGQLTWTRLPQGFKNSPTLFNEALHRDLASFRALNPQVVMLQYVDDLLVAAPTYRDCKEGTRRLLQELSKLGYRVSAKKAQLCREEVTYLGYLLKGGKRWLTPARKATVMKIPTPTTPRQVREFLGKAGFCRLFIPGFASLAAPLYPLTRPKVPFTWTEAHQEAFGRIKEALLSAPALALPDLTKPFALYVDEKEGVARGVLTQTLGPWRRPVAYLSKKLDPVASGWPTCLKAIAAVALLLKDADKLTLGQNVLVIAPHNLESIVRQPPDRWMTNARMTHYQSLLLNERVSFAPPAILNPATLLPVESDDTPIHICSEILAEETGTRPDLRDQPLPGVPAWYTDGSSFIMDGRRQAGAAIVDNKRTVWASNLPEGTSAQKAELIALTQALRLAEGKSINIYTDSRYAFATAHVHGAIYKQRGWLTSAGKDIKNKEEILALLEAIHLPKRVAIIHCPGHQRGTDPVATGNRKADEAAKQAAQSTRILTETTKNAGKRTADGSEFEKRTADGSEFESPKKKAKVE

SEQ ID NO: 1828 - protein, 2212 aa, synthetic construct
MPAAKRVKLDGGDKKYSIGLDIGTNSVGWAVITDEYKVPSKKFKVLGNTDRHSIKKNLIGALLFDSGETAEATRLKRTARRRYTRRKNRICYLQEIFSNEMAKVDDSFFHRLEESFLVEEDKKHERHPIFGNIVDEVAYHEKYPTIYHLRKKLVDSTDKADLRLIYLALAHMIKFRGHFLIEGDLNPDNSDVDKLFIQLVQTYNQLFEENPINASGVDAKAILSARLSKSRRLENLIAQLPGEKKNGLFGNLIALSLGLTPNFKSNFDLAEDAKLQLSKDTYDDDLDNLLAQIGDQYADLFLAAKNLSDAILLSDILRVNTEITKAPLSASMIKRYDEHHQDLTLLKALVRQQLPEKYKEIFFDQSKNGYAGYIDGGASQEEFYKFIKPILEKMDGTEELLVKLNREDLLRKQRTFDNGSIPHQIHLGELHAILRRQEDFYPFLKDNREKIEKILTFRIPYYVGPLARGNSRFAWMTRKSEETITPWNFEEVVDKGASAQSFIERMTNFDKNLPNEKVLPKHSLLYEYFTVYNELTKVKYVTEGMRKPAFLSGEQKKAIVDLLFKTNRKVTVKQLKEDYFKKIECFDSVEISGVEDRFNASLGTYHDLLKIIKDKDFLDNEENEDILEDIVLTLTLFEDREMIEERLKTYAHLFDDKVMKQLKRRRYTGWGRLSRKLINGIRDKQSGKTILDFLKSDGFANRNFMQLIHDDSLTFKEDIQKAQVSGQGDSLHEHIANLAGSPAIKKGILQTVKVVDELVKVMGRHKPENIVIEMARENQTTQKGQKNSRERMKRIEEGIKELGSQILKEHPVENTQLQNEKLYLYYLQNGRDMYVDQELDINRLSDYDVDHIVPQSFLKDDSIDNKVLTRSDKARGKSDNVPSEEVVKKMKNYWRQLLNAKLITQRKFDNLTKAERGGLSELDKAGFIKRQLVETRQITKHVAQILDSRMNTKYDENDKLIREVKVITLKSKLVSDFRKDFQFYKVREINNYHHAHDAYLNAVVGTALIKKYPKLESEFVYGDYKVYDVRKMIAKSEQEIGKATAKYFFYSNIMNFFKTEITLANGEIRKRPLIETNGETGEIVWDKGRDFATVRKVLSMPQVNIVKKTEVQTGGFSKESILPKRNSDKLIARKKDWDPKKYGGFDSPTVAYSVLVVAKVEKGKSKKLKSVKELLGITIMERSSFEKNPIDFLEAKGYKEVKKDLIIKLPKYSLFELENGRKRMLASAGELQKGNELALPSKYVNFLYLASHYEKLKGSPEDNEQKQLFVEQHKHYLDEIIEQISEFSKRVILADANLDKVLSAYNKHRDKPIREQAENIIHLFTLTNLGAPAAFKYFDTTIDRKRYTSTKEVLDATLIHQSITGLYETRIDLSQLGGDGGGGGGGGGTLGDQGSRGSDPLPEPRVTLTVEGIPTEFLVNTGAEHSVLTKPMGKMGSKRTVVAGATGSKVYPWTTKRLLKIGQKQVTHSFLVIPECPAPLLGRDLLTKLKAQIQFSTEGPQVTWEDRPAMCLVLNLEEEYRLHEKPVPPSIDPSWLQLFPMVWAEKAGMGLANQVPPVVVELKSDASPVAVRQYPMSKEAREGIRPHIQRFLDLGILVPCQSPWNTPLLPVKKPGTNDYRPVQDLREVNKRVQDIHPTVPNPYNLLSSLPPSHTWYSVLDLKDAFFCLKLHPNSQPLFAFEWRDPEKGNTGQLTWTRLPQGFKNSPTLFNEALHRDLASFRALNPQVVMLQYVDDLLVAAPTYRDCKEGTRRLLQELSKLGYRVSAKKAQLCREEVTYLGYLLKGGKRWLTPARKATVMKIPTPTTPRQVREFLGKAGFCRLFIPGFASLAAPLYPLTRPKVPFTWTEAHQEAFGRIKEALLSAPALALPDLTKPFALYVDEKEGVARGVLTQTLGPWRRPVAYLSKKLDPVASGWPTCLKAIAAVALLLKDADKLTLGQNVLVIAPHNLESIVRQPPDRWMTNARMTHYQSLLLNERVSFAPPAILNPATLLPVESDDTPIHICSEILAEETGTRPDLRDQPLPGVPAWYTDGSSFIMDGRRQAGAAIVDNKRTVWASNLPEGTSAQKAELIALTQALRLAEGKSINIYTDSRYAFATAHVHGAIYKQRGWLTSAGKDIKNKEEILALLEAIHLPKRVAIIHCPGHQRGTDPVATGNRKADEAAKQAAQSTRILTETTKNAGKRTADGSEFEKRTADGSEFESPKKKAKVE

SEQ ID NO: 1829 - protein, 2218 aa, synthetic construct
MPAAKRVKLDGGDKKYSIGLDIGTNSVGWAVITDEYKVPSKKFKVLGNTDRHSIKKNLIGALLFDSGETAEATRLKRTARRRYTRRKNRICYLQEIFSNEMAKVDDSFFHRLEESFLVEEDKKHERHPIFGNIVDEVAYHEKYPTIYHLRKKLVDSTDKADLRLIYLALAHMIKFRGHFLIEGDLNPDNSDVDKLFIQLVQTYNQLFEENPINASGVDAKAILSARLSKSRRLENLIAQLPGEKKNGLFGNLIALSLGLTPNFKSNFDLAEDAKLQLSKDTYDDDLDNLLAQIGDQYADLFLAAKNLSDAILLSDILRVNTEITKAPLSASMIKRYDEHHQDLTLLKALVRQQLPEKYKEIFFDQSKNGYAGYIDGGASQEEFYKFIKPILEKMDGTEELLVKLNREDLLRKQRTFDNGSIPHQIHLGELHAILRRQEDFYPFLKDNREKIEKILTFRIPYYVGPLARGNSRFAWMTRKSEETITPWNFEEVVDKGASAQSFIERMTNFDKNLPNEKVLPKHSLLYEYFTVYNELTKVKYVTEGMRKPAFLSGEQKKAIVDLLFKTNRKVTVKQLKEDYFKKIECFDSVEISGVEDRFNASLGTYHDLLKIIKDKDFLDNEENEDILEDIVLTLTLFEDREMIEERLKTYAHLFDDKVMKQLKRRRYTGWGRLSRKLINGIRDKQSGKTILDFLKSDGFANRNFMQLIHDDSLTFKEDIQKAQVSGQGDSLHEHIANLAGSPAIKKGILQTVKVVDELVKVMGRHKPENIVIEMARENQTTQKGQKNSRERMKRIEEGIKELGSQILKEHPVENTQLQNEKLYLYYLQNGRDMYVDQELDINRLSDYDVDHIVPQSFLKDDSIDNKVLTRSDKARGKSDNVPSEEVVKKMKNYWRQLLNAKLITQRKFDNLTKAERGGLSELDKAGFIKRQLVETRQITKHVAQILDSRMNTKYDENDKLIREVKVITLKSKLVSDFRKDFQFYKVREINNYHHAHDAYLNAVVGTALIKKYPKLESEFVYGDYKVYDVRKMIAKSEQEIGKATAKYFFYSNIMNFFKTEITLANGEIRKRPLIETNGETGEIVWDKGRDFATVRKVLSMPQVNIVKKTEVQTGGFSKESILPKRNSDKLIARKKDWDPKKYGGFDSPTVAYSVLVVAKVEKGKSKKLKSVKELLGITIMERSSFEKNPIDFLEAKGYKEVKKDLIIKLPKYSLFELENGRKRMLASAGELQKGNELALPSKYVNFLYLASHYEKLKGSPEDNEQKQLFVEQHKHYLDEIIEQISEFSKRVILADANLDKVLSAYNKHRDKPIREQAENIIHLFTLTNLGAPAAFKYFDTTIDRKRYTSTKEVLDATLIHQSITGLYETRIDLSQLGGDGGGGSEAAAKGGGGGTLGDQGSRGSDPLPEPRVTLTVEGIPTEFLVNTGAEHSVLTKPMGKMGSKRTVVAGATGSKVYPWTTKRLLKIGQKQVTHSFLVIPECPAPLLGRDLLTKLKAQIQFSTEGPQVTWEDRPAMCLVLNLEEEYRLHEKPVPPSIDPSWLQLFPMVWAEKAGMGLANQVPPVVVELKSDASPVAVRQYPMSKEAREGIRPHIQRFLDLGILVPCQSPWNTPLLPVKKPGTNDYRPVQDLREVNKRVQDIHPTVPNPYNLLSSLPPSHTWYSVLDLKDAFFCLKLHPNSQPLFAFEWRDPEKGNTGQLTWTRLPQGFKNSPTLFNEALHRDLASFRALNPQVVMLQYVDDLLVAAPTYRDCKEGTRRLLQELSKLGYRVSAKKAQLCREEVTYLGYLLKGGKRWLTPARKATVMKIPTPTTPRQVREFLGKAGFCRLFIPGFASLAAPLYPLTRPKVPFTWTEAHQEAFGRIKEALLSAPALALPDLTKPFALYVDEKEGVARGVLTQTLGPWRRPVAYLSKKLDPVASGWPTCLKAIAAVALLLKDADKLTLGQNVLVIAPHNLESIVRQPPDRWMTNARMTHYQSLLLNERVSFAPPAILNPATLLPVESDDTPIHICSEILAEETGTRPDLRDQPLPGVPAWYTDGSSFIMDGRRQAGAAIVDNKRTVWASNLPEGTSAQKAELIALTQALRLAEGKSINIYTDSRYAFATAHVHGAIYKQRGWLTSAGKDIKNKEEILALLEAIHLPKRVAIIHCPGHQRGTDPVATGNRKADEAAKQAAQSTRILTETTKNAGKRTADGSEFEKRTADGSEFESPKKKAKVE

SEQ ID NO: 1830 - protein, 2216 aa, synthetic construct
MPAAKRVKLDGGDKKYSIGLDIGTNSVGWAVITDEYKVPSKKFKVLGNTDRHSIKKNLIGALLFDSGETAEATRLKRTARRRYTRRKNRICYLQEIFSNEMAKVDDSFFHRLEESFLVEEDKKHERHPIFGNIVDEVAYHEKYPTIYHLRKKLVDSTDKADLRLIYLALAHMIKFRGHFLIEGDLNPDNSDVDKLFIQLVQTYNQLFEENPINASGVDAKAILSARLSKSRRLENLIAQLPGEKKNGLFGNLIALSLGLTPNFKSNFDLAEDAKLQLSKDTYDDDLDNLLAQIGDQYADLFLAAKNLSDAILLSDILRVNTEITKAPLSASMIKRYDEHHQDLTLLKALVRQQLPEKYKEIFFDQSKNGYAGYIDGGASQEEFYKFIKPILEKMDGTEELLVKLNREDLLRKQRTFDNGSIPHQIHLGELHAILRRQEDFYPFLKDNREKIEKILTFRIPYYVGPLARGNSRFAWMTRKSEETITPWNFEEVVDKGASAQSFIERMTNFDKNLPNEKVLPKHSLLYEYFTVYNELTKVKYVTEGMRKPAFLSGEQKKAIVDLLFKTNRKVTVKQLKEDYFKKIECFDSVEISGVEDRFNASLGTYHDLLKIIKDKDFLDNEENEDILEDIVLTLTLFEDREMIEERLKTYAHLFDDKVMKQLKRRRYTGWGRLSRKLINGIRDKQSGKTILDFLKSDGFANRNFMQLIHDDSLTFKEDIQKAQVSGQGDSLHEHIANLAGSPAIKKGILQTVKVVDELVKVMGRHKPENIVIEMARENQTTQKGQKNSRERMKRIEEGIKELGSQILKEHPVENTQLQNEKLYLYYLQNGRDMYVDQELDINRLSDYDVDHIVPQSFLKDDSIDNKVLTRSDKARGKSDNVPSEEVVKKMKNYWRQLLNAKLITQRKFDNLTKAERGGLSELDKAGFIKRQLVETRQITKHVAQILDSRMNTKYDENDKLIREVKVITLKSKLVSDFRKDFQFYKVREINNYHHAHDAYLNAVVGTALIKKYPKLESEFVYGDYKVYDVRKMIAKSEQEIGKATAKYFFYSNIMNFFKTEITLANGEIRKRPLIETNGETGEIVWDKGRDFATVRKVLSMPQVNIVKKTEVQTGGFSKESILPKRNSDKLIARKKDWDPKKYGGFDSPTVAYSVLVVAKVEKGKSKKLKSVKELLGITIMERSSFEKNPIDFLEAKGYKEVKKDLIIKLPKYSLFELENGRKRMLASAGELQKGNELALPSKYVNFLYLASHYEKLKGSPEDNEQKQLFVEQHKHYLDEIIEQISEFSKRVILADANLDKVLSAYNKHRDKPIREQAENIIHLFTLTNLGAPAAFKYFDTTIDRKRYTSTKEVLDATLIHQSITGLYETRIDLSQLGGDGGGSSGGSPAPGGTLGDQGSRGSDPLPEPRVTLTVEGIPTEFLVNTGAEHSVLTKPMGKMGSKRTVVAGATGSKVYPWTTKRLLKIGQKQVTHSFLVIPECPAPLLGRDLLTKLKAQIQFSTEGPQVTWEDRPAMCLVLNLEEEYRLHEKPVPPSIDPSWLQLFPMVWAEKAGMGLANQVPPVVVELKSDASPVAVRQYPMSKEAREGIRPHIQRFLDLGILVPCQSPWNTPLLPVKKPGTNDYRPVQDLREVNKRVQDIHPTVPNPYNLLSSLPPSHTWYSVLDLKDAFFCLKLHPNSQPLFAFEWRDPEKGNTGQLTWTRLPQGFKNSPTLFNEALHRDLASFRALNPQVVMLQYVDDLLVAAPTYRDCKEGTRRLLQELSKLGYRVSAKKAQLCREEVTYLGYLLKGGKRWLTPARKATVMKIPTPTTPRQVREFLGKAGFCRLFIPGFASLAAPLYPLTRPKVPFTWTEAHQEAFGRIKEALLSAPALALPDLTKPFALYVDEKEGVARGVLTQTLGPWRRPVAYLSKKLDPVASGWPTCLKAIAAVALLLKDADKLTLGQNVLVIAPHNLESIVRQPPDRWMTNARMTHYQSLLLNERVSFAPPAILNPATLLPVESDDTPIHICSEILAEETGTRPDLRDQPLPGVPAWYTDGSSFIMDGRRQAGAAIVDNKRTVWASNLPEGTSAQKAELIALTQALRLAEGKSINIYTDSRYAFATAHVHGAIYKQRGWLTSAGKDIKNKEEILALLEAIHLPKRVAIIHCPGHQRGTDPVATGNRKADEAAKQAAQSTRILTETTKNAGKRTADGSEFEKRTADGSEFESPKKKAKVE

SEQ ID NO: 1831 - protein, 2213 aa, synthetic construct
MPAAKRVKLDGGDKKYSIGLDIGTNSVGWAVITDEYKVPSKKFKVLGNTDRHSIKKNLIGALLFDSGETAEATRLKRTARRRYTRRKNRICYLQEIFSNEMAKVDDSFFHRLEESFLVEEDKKHERHPIFGNIVDEVAYHEKYPTIYHLRKKLVDSTDKADLRLIYLALAHMIKFRGHFLIEGDLNPDNSDVDKLFIQLVQTYNQLFEENPINASGVDAKAILSARLSKSRRLENLIAQLPGEKKNGLFGNLIALSLGLTPNFKSNFDLAEDAKLQLSKDTYDDDLDNLLAQIGDQYADLFLAAKNLSDAILLSDILRVNTEITKAPLSASMIKRYDEHHQDLTLLKALVRQQLPEKYKEIFFDQSKNGYAGYIDGGASQEEFYKFIKPILEKMDGTEELLVKLNREDLLRKQRTFDNGSIPHQIHLGELHAILRRQEDFYPFLKDNREKIEKILTFRIPYYVGPLARGNSRFAWMTRKSEETITPWNFEEVVDKGASAQSFIERMTNFDKNLPNEKVLPKHSLLYEYFTVYNELTKVKYVTEGMRKPAFLSGEQKKAIVDLLFKTNRKVTVKQLKEDYFKKIECFDSVEISGVEDRFNASLGTYHDLLKIIKDKDFLDNEENEDILEDIVLTLTLFEDREMIEERLKTYAHLFDDKVMKQLKRRRYTGWGRLSRKLINGIRDKQSGKTILDFLKSDGFANRNFMQLIHDDSLTFKEDIQKAQVSGQGDSLHEHIANLAGSPAIKKGILQTVKVVDELVKVMGRHKPENIVIEMARENQTTQKGQKNSRERMKRIEEGIKELGSQILKEHPVENTQLQNEKLYLYYLQNGRDMYVDQELDINRLSDYDVDHIVPQSFLKDDSIDNKVLTRSDKARGKSDNVPSEEVVKKMKNYWRQLLNAKLITQRKFDNLTKAERGGLSELDKAGFIKRQLVETRQITKHVAQILDSRMNTKYDENDKLIREVKVITLKSKLVSDFRKDFQFYKVREINNYHHAHDAYLNAVVGTALIKKYPKLESEFVYGDYKVYDVRKMIAKSEQEIGKATAKYFFYSNIMNFFKTEITLANGEIRKRPLIETNGETGEIVWDKGRDFATVRKVLSMPQVNIVKKTEVQTGGFSKESILPKRNSDKLIARKKDWDPKKYGGFDSPTVAYSVLVVAKVEKGKSKKLKSVKELLGITIMERSSFEKNPIDFLEAKGYKEVKKDLIIKLPKYSLFELENGRKRMLASAGELQKGNELALPSKYVNFLYLASHYEKLKGSPEDNEQKQLFVEQHKHYLDEIIEQISEFSKRVILADANLDKVLSAYNKHRDKPIREQAENIIHLFTLTNLGAPAAFKYFDTTIDRKRYTSTKEVLDATLIHQSITGLYETRIDLSQLGGDGGGSSGSSGGTLGDQGSRGSDPLPEPRVTLTVEGIPTEFLVNTGAEHSVLTKPMGKMGSKRTVVAGATGSKVYPWTTKRLLKIGQKQVTHSFLVIPECPAPLLGRDLLTKLKAQIQFSTEGPQVTWEDRPAMCLVLNLEEEYRLHEKPVPPSIDPSWLQLFPMVWAEKAGMGLANQVPPVVVELKSDASPVAVRQYPMSKEAREGIRPHIQRFLDLGILVPCQSPWNTPLLPVKKPGTNDYRPVQDLREVNKRVQDIHPTVPNPYNLLSSLPPSHTWYSVLDLKDAFFCLKLHPNSQPLFAFEWRDPEKGNTGQLTWTRLPQGFKNSPTLFNEALHRDLASFRALNPQVVMLQYVDDLLVAAPTYRDCKEGTRRLLQELSKLGYRVSAKKAQLCREEVTYLGYLLKGGKRWLTPARKATVMKIPTPTTPRQVREFLGKAGFCRLFIPGFASLAAPLYPLTRPKVPFTWTEAHQEAFGRIKEALLSAPALALPDLTKPFALYVDEKEGVARGVLTQTLGPWRRPVAYLSKKLDPVASGWPTCLKAIAAVALLLKDADKLTLGQNVLVIAPHNLESIVRQPPDRWMTNARMTHYQSLLLNERVSFAPPAILNPATLLPVESDDTPIHICSEILAEETGTRPDLRDQPLPGVPAWYTDGSSFIMDGRRQAGAAIVDNKRTVWASNLPEGTSAQKAELIALTQALRLAEGKSINIYTDSRYAFATAHVHGAIYKQRGWLTSAGKDIKNKEEILALLEAIHLPKRVAIIHCPGHQRGTDPVATGNRKADEAAKQAAQSTRILTETTKNAGKRTADGSEFEKRTADGSEFESPKKKAKVE

SEQ ID NO: 1832 - protein, 2216 aa, synthetic construct
MPAAKRVKLDGGDKKYSIGLDIGTNSVGWAVITDEYKVPSKKFKVLGNTDRHSIKKNLIGALLFDSGETAEATRLKRTARRRYTRRKNRICYLQEIFSNEMAKVDDSFFHRLEESFLVEEDKKHERHPIFGNIVDEVAYHEKYPTIYHLRKKLVDSTDKADLRLIYLALAHMIKFRGHFLIEGDLNPDNSDVDKLFIQLVQTYNQLFEENPINASGVDAKAILSARLSKSRRLENLIAQLPGEKKNGLFGNLIALSLGLTPNFKSNFDLAEDAKLQLSKDTYDDDLDNLLAQIGDQYADLFLAAKNLSDAILLSDILRVNTEITKAPLSASMIKRYDEHHQDLTLLKALVRQQLPEKYKEIFFDQSKNGYAGYIDGGASQEEFYKFIKPILEKMDGTEELLVKLNREDLLRKQRTFDNGSIPHQIHLGELHAILRRQEDFYPFLKDNREKIEKILTFRIPYYVGPLARGNSRFAWMTRKSEETITPWNFEEVVDKGASAQSFIERMTNFDKNLPNEKVLPKHSLLYEYFTVYNELTKVKYVTEGMRKPAFLSGEQKKAIVDLLFKTNRKVTVKQLKEDYFKKIECFDSVEISGVEDRFNASLGTYHDLLKIIKDKDFLDNEENEDILEDIVLTLTLFEDREMIEERLKTYAHLFDDKVMKQLKRRRYTGWGRLSRKLINGIRDKQSGKTILDFLKSDGFANRNFMQLIHDDSLTFKEDIQKAQVSGQGDSLHEHIANLAGSPAIKKGILQTVKVVDELVKVMGRHKPENIVIEMARENQTTQKGQKNSRERMKRIEEGIKELGSQILKEHPVENTQLQNEKLYLYYLQNGRDMYVDQELDINRLSDYDVDHIVPQSFLKDDSIDNKVLTRSDKARGKSDNVPSEEVVKKMKNYWRQLLNAKLITQRKFDNLTKAERGGLSELDKAGFIKRQLVETRQITKHVAQILDSRMNTKYDENDKLIREVKVITLKSKLVSDFRKDFQFYKVREINNYHHAHDAYLNAVVGTALIKKYPKLESEFVYGDYKVYDVRKMIAKSEQEIGKATAKYFFYSNIMNFFKTEITLANGEIRKRPLIETNGETGEIVWDKGRDFATVRKVLSMPQVNIVKKTEVQTGGFSKESILPKRNSDKLIARKKDWDPKKYGGFDSPTVAYSVLVVAKVEKGKSKKLKSVKELLGITIMERSSFEKNPIDFLEAKGYKEVKKDLIIKLPKYSLFELENGRKRMLASAGELQKGNELALPSKYVNFLYLASHYEKLKGSPEDNEQKQLFVEQHKHYLDEIIEQISEFSKRVILADANLDKVLSAYNKHRDKPIREQAENIIHLFTLTNLGAPAAFKYFDTTIDRKRYTSTKEVLDATLIHQSITGLYETRIDLSQLGGDGGGGSGGGPAPGGTLGDQGSRGSDPLPEPRVTLTVEGIPTEFLVNTGAEHSVLTKPMGKMGSKRTVVAGATGSKVYPWTTKRLLKIGQKQVTHSFLVIPECPAPLLGRDLLTKLKAQIQFSTEGPQVTWEDRPAMCLVLNLEEEYRLHEKPVPPSIDPSWLQLFPMVWAEKAGMGLANQVPPVVVELKSDASPVAVRQYPMSKEAREGIRPHIQRFLDLGILVPCQSPWNTPLLPVKKPGTNDYRPVQDLREVNKRVQDIHPTVPNPYNLLSSLPPSHTWYSVLDLKDAFFCLKLHPNSQPLFAFEWRDPEKGNTGQLTWTRLPQGFKNSPTLFNEALHRDLASFRALNPQVVMLQYVDDLLVAAPTYRDCKEGTRRLLQELSKLGYRVSAKKAQLCREEVTYLGYLLKGGKRWLTPARKATVMKIPTPTTPRQVREFLGKAGFCRLFIPGFASLAAPLYPLTRPKVPFTWTEAHQEAFGRIKEALLSAPALALPDLTKPFALYVDEKEGVARGVLTQTLGPWRRPVAYLSKKLDPVASGWPTCLKAIAAVALLLKDADKLTLGQNVLVIAPHNLESIVRQPPDRWMTNARMTHYQSLLLNERVSFAPPAILNPATLLPVESDDTPIHICSEILAEETGTRPDLRDQPLPGVPAWYTDGSSFIMDGRRQAGAAIVDNKRTVWASNLPEGTSAQKAELIALTQALRLAEGKSINIYTDSRYAFATAHVHGAIYKQRGWLTSAGKDIKNKEEILALLEAIHLPKRVAIIHCPGHQRGTDPVATGNRKADEAAKQAAQSTRILTETTKNAGKRTADGSEFEKRTADGSEFESPKKKAKVE

SEQ ID NO: 1833 - protein, 2218 aa, synthetic construct
MPAAKRVKLDGGDKKYSIGLDIGTNSVGWAVITDEYKVPSKKFKVLGNTDRHSIKKNLIGALLFDSGETAEATRLKRTARRRYTRRKNRICYLQEIFSNEMAKVDDSFFHRLEESFLVEEDKKHERHPIFGNIVDEVAYHEKYPTIYHLRKKLVDSTDKADLRLIYLALAHMIKFRGHFLIEGDLNPDNSDVDKLFIQLVQTYNQLFEENPINASGVDAKAILSARLSKSRRLENLIAQLPGEKKNGLFGNLIALSLGLTPNFKSNFDLAEDAKLQLSKDTYDDDLDNLLAQIGDQYADLFLAAKNLSDAILLSDILRVNTEITKAPLSASMIKRYDEHHQDLTLLKALVRQQLPEKYKEIFFDQSKNGYAGYIDGGASQEEFYKFIKPILEKMDGTEELLVKLNREDLLRKQRTFDNGSIPHQIHLGELHAILRRQEDFYPFLKDNREKIEKILTFRIPYYVGPLARGNSRFAWMTRKSEETITPWNFEEVVDKGASAQSFIERMTNFDKNLPNEKVLPKHSLLYEYFTVYNELTKVKYVTEGMRKPAFLSGEQKKAIVDLLFKTNRKVTVKQLKEDYFKKIECFDSVEISGVEDRFNASLGTYHDLLKIIKDKDFLDNEENEDILEDIVLTLTLFEDREMIEERLKTYAHLFDDKVMKQLKRRRYTGWGRLSRKLINGIRDKQSGKTILDFLKSDGFANRNFMQLIHDDSLTFKEDIQKAQVSGQGDSLHEHIANLAGSPAIKKGILQTVKVVDELVKVMGRHKPENIVIEMARENQTTQKGQKNSRERMKRIEEGIKELGSQILKEHPVENTQLQNEKLYLYYLQNGRDMYVDQELDINRLSDYDVDHIVPQSFLKDDSIDNKVLTRSDKARGKSDNVPSEEVVKKMKNYWRQLLNAKLITQRKFDNLTKAERGGLSELDKAGFIKRQLVETRQITKHVAQILDSRMNTKYDENDKLIREVKVITLKSKLVSDFRKDFQFYKVREINNYHHAHDAYLNAVVGTALIKKYPKLESEFVYGDYKVYDVRKMIAKSEQEIGKATAKYFFYSNIMNFFKTEITLANGEIRKRPLIETNGETGEIVWDKGRDFATVRKVLSMPQVNIVKKTEVQTGGFSKESILPKRNSDKLIARKKDWDPKKYGGFDSPTVAYSVLVVAKVEKGKSKKLKSVKELLGITIMERSSFEKNPIDFLEAKGYKEVKKDLIIKLPKYSLFELENGRKRMLASAGELQKGNELALPSKYVNFLYLASHYEKLKGSPEDNEQKQLFVEQHKHYLDEIIEQISEFSKRVILADANLDKVLSAYNKHRDKPIREQAENIIHLFTLTNLGAPAAFKYFDTTIDRKRYTSTKEVLDATLIHQSITGLYETRIDLSQLGGDGGEAAAKGGSPAPGGTLGDQGSRGSDPLPEPRVTLTVEGIPTEFLVNTGAEHSVLTKPMGKMGSKRTVVAGATGSKVYPWTTKRLLKIGQKQVTHSFLVIPECPAPLLGRDLLTKLKAQIQFSTEGPQVTWEDRPAMCLVLNLEEEYRLHEKPVPPSIDPSWLQLFPMVWAEKAGMGLANQVPPVVVELKSDASPVAVRQYPMSKEAREGIRPHIQRFLDLGILVPCQSPWNTPLLPVKKPGTNDYRPVQDLREVNKRVQDIHPTVPNPYNLLSSLPPSHTWYSVLDLKDAFFCLKLHPNSQPLFAFEWRDPEKGNTGQLTWTRLPQGFKNSPTLFNEALHRDLASFRALNPQVVMLQYVDDLLVAAPTYRDCKEGTRRLLQELSKLGYRVSAKKAQLCREEVTYLGYLLKGGKRWLTPARKATVMKIPTPTTPRQVREFLGKAGFCRLFIPGFASLAAPLYPLTRPKVPFTWTEAHQEAFGRIKEALLSAPALALPDLTKPFALYVDEKEGVARGVLTQTLGPWRRPVAYLSKKLDPVASGWPTCLKAIAAVALLLKDADKLTLGQNVLVIAPHNLESIVRQPPDRWMTNARMTHYQSLLLNERVSFAPPAILNPATLLPVESDDTPIHICSEILAEETGTRPDLRDQPLPGVPAWYTDGSSFIMDGRRQAGAAIVDNKRTVWASNLPEGTSAQKAELIALTQALRLAEGKSINIYTDSRYAFATAHVHGAIYKQRGWLTSAGKDIKNKEEILALLEAIHLPKRVAIIHCPGHQRGTDPVATGNRKADEAAKQAAQSTRILTETTKNAGKRTADGSEFEKRTADGSEFESPKKKAKVE

SEQ ID NO: 1834 - protein, 2216 aa, synthetic construct
MPAAKRVKLDGGDKKYSIGLDIGTNSVGWAVITDEYKVPSKKFKVLGNTDRHSIKKNLIGALLFDSGETAEATRLKRTARRRYTRRKNRICYLQEIFSNEMAKVDDSFFHRLEESFLVEEDKKHERHPIFGNIVDEVAYHEKYPTIYHLRKKLVDSTDKADLRLIYLALAHMIKFRGHFLIEGDLNPDNSDVDKLFIQLVQTYNQLFEENPINASGVDAKAILSARLSKSRRLENLIAQLPGEKKNGLFGNLIALSLGLTPNFKSNFDLAEDAKLQLSKDTYDDDLDNLLAQIGDQYADLFLAAKNLSDAILLSDILRVNTEITKAPLSASMIKRYDEHHQDLTLLKALVRQQLPEKYKEIFFDQSKNGYAGYIDGGASQEEFYKFIKPILEKMDGTEELLVKLNREDLLRKQRTFDNGSIPHQIHLGELHAILRRQEDFYPFLKDNREKIEKILTFRIPYYVGPLARGNSRFAWMTRKSEETITPWNFEEVVDKGASAQSFIERMTNFDKNLPNEKVLPKHSLLYEYFTVYNELTKVKYVTEGMRKPAFLSGEQKKAIVDLLFKTNRKVTVKQLKEDYFKKIECFDSVEISGVEDRFNASLGTYHDLLKIIKDKDFLDNEENEDILEDIVLTLTLFEDREMIEERLKTYAHLFDDKVMKQLKRRRYTGWGRLSRKLINGIRDKQSGKTILDFLKSDGFANRNFMQLIHDDSLTFKEDIQKAQVSGQGDSLHEHIANLAGSPAIKKGILQTVKVVDELVKVMGRHKPENIVIEMARENQTTQKGQKNSRERMKRIEEGIKELGSQILKEHPVENTQLQNEKLYLYYLQNGRDMYVDQELDINRLSDYDVDHIVPQSFLKDDSIDNKVLTRSDKARGKSDNVPSEEVVKKMKNYWRQLLNAKLITQRKFDNLTKAERGGLSELDKAGFIKRQLVETRQITKHVAQILDSRMNTKYDENDKLIREVKVITLKSKLVSDFRKDFQFYKVREINNYHHAHDAYLNAVVGTALIKKYPKLESEFVYGDYKVYDVRKMIAKSEQEIGKATAKYFFYSNIMNFFKTEITLANGEIRKRPLIETNGETGEIVWDKGRDFATVRKVLSMPQVNIVKKTEVQTGGFSKESILPKRNSDKLIARKKDWDPKKYGGFDSPTVAYSVLVVAKVEKGKSKKLKSVKELLGITIMERSSFEKNPIDFLEAKGYKEVKKDLIIKLPKYSLFELENGRKRMLASAGELQKGNELALPSKYVNFLYLASHYEKLKGSPEDNEQKQLFVEQHKHYLDEIIEQISEFSKRVILADANLDKVLSAYNKHRDKPIREQAENIIHLFTLTNLGAPAAFKYFDTTIDRKRYTSTKEVLDATLIHQSITGLYETRIDLSQLGGDGGGGGGGSPAPGGTLGDQGSRGSDPLPEPRVTLTVEGIPTEFLVNTGAEHSVLTKPMGKMGSKRTVVAGATGSKVYPWTTKRLLKIGQKQVTHSFLVIPECPAPLLGRDLLTKLKAQIQFSTEGPQVTWEDRPAMCLVLNLEEEYRLHEKPVPPSIDPSWLQLFPMVWAEKAGMGLANQVPPVVVELKSDASPVAVRQYPMSKEAREGIRPHIQRFLDLGILVPCQSPWNTPLLPVKKPGTNDYRPVQDLREVNKRVQDIHPTVPNPYNLLSSLPPSHTWYSVLDLKDAFFCLKLHPNSQPLFAFEWRDPEKGNTGQLTWTRLPQGFKNSPTLFNEALHRDLASFRALNPQVVMLQYVDDLLVAAPTYRDCKEGTRRLLQELSKLGYRVSAKKAQLCREEVTYLGYLLKGGKRWLTPARKATVMKIPTPTTPRQVREFLGKAGFCRLFIPGFASLAAPLYPLTRPKVPFTWTEAHQEAFGRIKEALLSAPALALPDLTKPFALYVDEKEGVARGVLTQTLGPWRRPVAYLSKKLDPVASGWPTCLKAIAAVALLLKDADKLTLGQNVLVIAPHNLESIVRQPPDRWMTNARMTHYQSLLLNERVSFAPPAILNPATLLPVESDDTPIHICSEILAEETGTRPDLRDQPLPGVPAWYTDGSSFIMDGRRQAGAAIVDNKRTVWASNLPEGTSAQKAELIALTQALRLAEGKSINIYTDSRYAFATAHVHGAIYKQRGWLTSAGKDIKNKEEILALLEAIHLPKRVAIIHCPGHQRGTDPVATGNRKADEAAKQAAQSTRILTETTKNAGKRTADGSEFEKRTADGSEFESPKKKAKVE

SEQ ID NO: 1835 - protein, 2216 aa, synthetic construct
MPAAKRVKLDGGDKKYSIGLDIGTNSVGWAVITDEYKVPSKKFKVLGNTDRHSIKKNLIGALLFDSGETAEATRLKRTARRRYTRRKNRICYLQEIFSNEMAKVDDSFFHRLEESFLVEEDKKHERHPIFGNIVDEVAYHEKYPTIYHLRKKLVDSTDKADLRLIYLALAHMIKFRGHFLIEGDLNPDNSDVDKLFIQLVQTYNQLFEENPINASGVDAKAILSARLSKSRRLENLIAQLPGEKKNGLFGNLIALSLGLTPNFKSNFDLAEDAKLQLSKDTYDDDLDNLLAQIGDQYADLFLAAKNLSDAILLSDILRVNTEITKAPLSASMIKRYDEHHQDLTLLKALVRQQLPEKYKEIFFDQSKNGYAGYIDGGASQEEFYKFIKPILEKMDGTEELLVKLNREDLLRKQRTFDNGSIPHQIHLGELHAILRRQEDFYPFLKDNREKIEKILTFRIPYYVGPLARGNSRFAWMTRKSEETITPWNFEEVVDKGASAQSFIERMTNFDKNLPNEKVLPKHSLLYEYFTVYNELTKVKYVTEGMRKPAFLSGEQKKAIVDLLFKTNRKVTVKQLKEDYFKKIECFDSVEISGVEDRFNASLGTYHDLLKIIKDKDFLDNEENEDILEDIVLTLTLFEDREMIEERLKTYAHLFDDKVMKQLKRRRYTGWGRLSRKLINGIRDKQSGKTILDFLKSDGFANRNFMQLIHDDSLTFKEDIQKAQVSGQGDSLHEHIANLAGSPAIKKGILQTVKVVDELVKVMGRHKPENIVIEMARENQTTQKGQKNSRERMKRIEEGIKELGSQILKEHPVENTQLQNEKLYLYYLQNGRDMYVDQELDINRLSDYDVDHIVPQSFLKDDSIDNKVLTRSDKARGKSDNVPSEEVVKKMKNYWRQLLNAKLITQRKFDNLTKAERGGLSELDKAGFIKRQLVETRQITKHVAQILDSRMNTKYDENDKLIREVKVITLKSKLVSDFRKDFQFYKVREINNYHHAHDAYLNAVVGTALIKKYPKLESEFVYGDYKVYDVRKMIAKSEQEIGKATAKYFFYSNIMNFFKTEITLANGEIRKRPLIETNGETGEIVWDKGRDFATVRKVLSMPQVNIVKKTEVQTGGFSKESILPKRNSDKLIARKKDWDPKKYGGFDSPTVAYSVLVVAKVEKGKSKKLKSVKELLGITIMERSSFEKNPIDFLEAKGYKEVKKDLIIKLPKYSLFELENGRKRMLASAGELQKGNELALPSKYVNFLYLASHYEKLKGSPEDNEQKQLFVEQHKHYLDEIIEQISEFSKRVILADANLDKVLSAYNKHRDKPIREQAENIIHLFTLTNLGAPAAFKYFDTTIDRKRYTSTKEVLDATLIHQSITGLYETRIDLSQLGGDGGPAPGGGGGSGGTLGDQGSRGSDPLPEPRVTLTVEGIPTEFLVNTGAEHSVLTKPMGKMGSKRTVVAGATGSKVYPWTTKRLLKIGQKQVTHSFLVIPECPAPLLGRDLLTKLKAQIQFSTEGPQVTWEDRPAMCLVLNLEEEYRLHEKPVPPSIDPSWLQLFPMVWAEKAGMGLANQVPPVVVELKSDASPVAVRQYPMSKEAREGIRPHIQRFLDLGILVPCQSPWNTPLLPVKKPGTNDYRPVQDLREVNKRVQDIHPTVPNPYNLLSSLPPSHTWYSVLDLKDAFFCLKLHPNSQPLFAFEWRDPEKGNTGQLTWTRLPQGFKNSPTLFNEALHRDLASFRALNPQVVMLQYVDDLLVAAPTYRDCKEGTRRLLQELSKLGYRVSAKKAQLCREEVTYLGYLLKGGKRWLTPARKATVMKIPTPTTPRQVREFLGKAGFCRLFIPGFASLAAPLYPLTRPKVPFTWTEAHQEAFGRIKEALLSAPALALPDLTKPFALYVDEKEGVARGVLTQTLGPWRRPVAYLSKKLDPVASGWPTCLKAIAAVALLLKDADKLTLGQNVLVIAPHNLESIVRQPPDRWMTNARMTHYQSLLLNERVSFAPPAILNPATLLPVESDDTPIHICSEILAEETGTRPDLRDQPLPGVPAWYTDGSSFIMDGRRQAGAAIVDNKRTVWASNLPEGTSAQKAELIALTQALRLAEGKSINIYTDSRYAFATAHVHGAIYKQRGWLTSAGKDIKNKEEILALLEAIHLPKRVAIIHCPGHQRGTDPVATGNRKADEAAKQAAQSTRILTETTKNAGKRTADGSEFEKRTADGSEFESPKKKAKVE

SEQ ID NO: 1836 - protein, 2118 aa, synthetic construct
MPAAKRVKLDGGDKKYSIGLDIGTNSVGWAVITDEYKVPSKKFKVLGNTDRHSIKKNLIGALLFDSGETAEATRLKRTARRRYTRRKNRICYLQEIFSNEMAKVDDSFFHRLEESFLVEEDKKHERHPIFGNIVDEVAYHEKYPTIYHLRKKLVDSTDKADLRLIYLALAHMIKFRGHFLIEGDLNPDNSDVDKLFIQLVQTYNQLFEENPINASGVDAKAILSARLSKSRRLENLIAQLPGEKKNGLFGNLIALSLGLTPNFKSNFDLAEDAKLQLSKDTYDDDLDNLLAQIGDQYADLFLAAKNLSDAILLSDILRVNTEITKAPLSASMIKRYDEHHQDLTLLKALVRQQLPEKYKEIFFDQSKNGYAGYIDGGASQEEFYKFIKPILEKMDGTEELLVKLNREDLLRKQRTFDNGSIPHQIHLGELHAILRRQEDFYPFLKDNREKIEKILTFRIPYYVGPLARGNSRFAWMTRKSEETITPWNFEEVVDKGASAQSFIERMTNFDKNLPNEKVLPKHSLLYEYFTVYNELTKVKYVTEGMRKPAFLSGEQKKAIVDLLFKTNRKVTVKQLKEDYFKKIECFDSVEISGVEDRFNASLGTYHDLLKIIKDKDFLDNEENEDILEDIVLTLTLFEDREMIEERLKTYAHLFDDKVMKQLKRRRYTGWGRLSRKLINGIRDKQSGKTILDFLKSDGFANRNFMQLIHDDSLTFKEDIQKAQVSGQGDSLHEHIANLAGSPAIKKGILQTVKVVDELVKVMGRHKPENIVIEMARENQTTQKGQKNSRERMKRIEEGIKELGSQILKEHPVENTQLQNEKLYLYYLQNGRDMYVDQELDINRLSDYDVDHIVPQSFLKDDSIDNKVLTRSDKARGKSDNVPSEEVVKKMKNYWRQLLNAKLITQRKFDNLTKAERGGLSELDKAGFIKRQLVETRQITKHVAQILDSRMNTKYDENDKLIREVKVITLKSKLVSDFRKDFQFYKVREINNYHHAHDAYLNAVVGTALIKKYPKLESEFVYGDYKVYDVRKMIAKSEQEIGKATAKYFFYSNIMNFFKTEITLANGEIRKRPLIETNGETGEIVWDKGRDFATVRKVLSMPQVNIVKKTEVQTGGFSKESILPKRNSDKLIARKKDWDPKKYGGFDSPTVAYSVLVVAKVEKGKSKKLKSVKELLGITIMERSSFEKNPIDFLEAKGYKEVKKDLIIKLPKYSLFELENGRKRMLASAGELQKGNELALPSKYVNFLYLASHYEKLKGSPEDNEQKQLFVEQHKHYLDEIIEQISEFSKRVILADANLDKVLSAYNKHRDKPIREQAENIIHLFTLTNLGAPAAFKYFDTTIDRKRYTSTKEVLDATLIHQSITGLYETRIDLSQLGGDGGSGGSSGGSSGSETPGTSESATPESSGGSSGGSSGGTLNLEDEYRLYETSAEPEVSPGSTWLSDFPQAWAETGGMGLAVRQAPLIIPLKATSTPVSIKQYPMSQEAKLGIKPHIQRLLDQGILVPCQSPWNTPLLPVKKPGTNDYRPVQDLREVNKRVEDIHPTVPNPYNLLSGLPPSHRWYTVLDLKDAFFCLRLHPTSQPLFAFEWRDPGMGISGQLTWTRLPQGFKNSPTLFDEALHRDLADFRIQHPDLILLQYVDDILLAATSELDCQQGTRALLLTLGNLGYRASAKKAQLCQKQVKYLGYLLKEGQRWLTEARKETVMGQPTPKTPRQLREFLGTAGFCRLWIPGFAEMAAPLYPLTKTGTLFNWGPDQQKAYQEIKQALLTAPALGLPDLTKPFELFVDEKQGYAKGVLTQKLGPWRRPVAYLSKKLDPVAAGWPPCLRMVAAIAVLRKDAGKLTMGQPLVILAPHAVEALVKQPPDRWLSNARMTHYQAMLLDTDRVQFGPVVALNPATLLPLPEEGAPHDCLEILAETHGTRPDLTDQPIPDADHTWYTDGSSFLQEGQRKAGAAVTTETEVIWARALPAGTSAQRAELIALTQALKMAEGKRLNVYTDSRYAFATAHIHGEIYRRRGLLTSEGREIKNKSEILALLKALFLPKRLSIIHCLGHQKGDSAEARGNRLADQAAREAAIKTPPDTSTLLAGKRTADGSEFEKRTADGSEFESPKKKAKVE

SEQ ID NO: 1837 - protein, 2105 aa, synthetic construct
MPAAKRVKLDGGDKKYSIGLDIGTNSVGWAVITDEYKVPSKKFKVLGNTDRHSIKKNLIGALLFDSGETAEATRLKRTARRRYTRRKNRICYLQEIFSNEMAKVDDSFFHRLEESFLVEEDKKHERHPIFGNIVDEVAYHEKYPTIYHLRKKLVDSTDKADLRLIYLALAHMIKFRGHFLIEGDLNPDNSDVDKLFIQLVQTYNQLFEENPINASGVDAKAILSARLSKSRRLENLIAQLPGEKKNGLFGNLIALSLGLTPNFKSNFDLAEDAKLQLSKDTYDDDLDNLLAQIGDQYADLFLAAKNLSDAILLSDILRVNTEITKAPLSASMIKRYDEHHQDLTLLKALVRQQLPEKYKEIFFDQSKNGYAGYIDGGASQEEFYKFIKPILEKMDGTEELLVKLNREDLLRKQRTFDNGSIPHQIHLGELHAILRRQEDFYPFLKDNREKIEKILTFRIPYYVGPLARGNSRFAWMTRKSEETITPWNFEEVVDKGASAQSFIERMTNFDKNLPNEKVLPKHSLLYEYFTVYNELTKVKYVTEGMRKPAFLSGEQKKAIVDLLFKTNRKVTVKQLKEDYFKKIECFDSVEISGVEDRFNASLGTYHDLLKIIKDKDFLDNEENEDILEDIVLTLTLFEDREMIEERLKTYAHLFDDKVMKQLKRRRYTGWGRLSRKLINGIRDKQSGKTILDFLKSDGFANRNFMQLIHDDSLTFKEDIQKAQVSGQGDSLHEHIANLAGSPAIKKGILQTVKVVDELVKVMGRHKPENIVIEMARENQTTQKGQKNSRERMKRIEEGIKELGSQILKEHPVENTQLQNEKLYLYYLQNGRDMYVDQELDINRLSDYDVDHIVPQSFLKDDSIDNKVLTRSDKARGKSDNVPSEEVVKKMKNYWRQLLNAKLITQRKFDNLTKAERGGLSELDKAGFIKRQLVETRQITKHVAQILDSRMNTKYDENDKLIREVKVITLKSKLVSDFRKDFQFYKVREINNYHHAHDAYLNAVVGTALIKKYPKLESEFVYGDYKVYDVRKMIAKSEQEIGKATAKYFFYSNIMNFFKTEITLANGEIRKRPLIETNGETGEIVWDKGRDFATVRKVLSMPQVNIVKKTEVQTGGFSKESILPKRNSDKLIARKKDWDPKKYGGFDSPTVAYSVLVVAKVEKGKSKKLKSVKELLGITIMERSSFEKNPIDFLEAKGYKEVKKDLIIKLPKYSLFELENGRKRMLASAGELQKGNELALPSKYVNFLYLASHYEKLKGSPEDNEQKQLFVEQHKHYLDEIIEQISEFSKRVILADANLDKVLSAYNKHRDKPIREQAENIIHLFTLTNLGAPAAFKYFDTTIDRKRYTSTKEVLDATLIHQSITGLYETRIDLSQLGGDGGEAAAKEAAAKEAAAKEAAAKGGTLNLEDEYRLYETSAEPEVSPGSTWLSDFPQAWAETGGMGLAVRQAPLIIPLKATSTPVSIKQYPMSQEAKLGIKPHIQRLLDQGILVPCQSPWNTPLLPVKKPGTNDYRPVQDLREVNKRVEDIHPTVPNPYNLLSGLPPSHRWYTVLDLKDAFFCLRLHPTSQPLFAFEWRDPGMGISGQLTWTRLPQGFKNSPTLFDEALHRDLADFRIQHPDLILLQYVDDILLAATSELDCQQGTRALLLTLGNLGYRASAKKAQLCQKQVKYLGYLLKEGQRWLTEARKETVMGQPTPKTPRQLREFLGTAGFCRLWIPGFAEMAAPLYPLTKTGTLFNWGPDQQKAYQEIKQALLTAPALGLPDLTKPFELFVDEKQGYAKGVLTQKLGPWRRPVAYLSKKLDPVAAGWPPCLRMVAAIAVLRKDAGKLTMGQPLVILAPHAVEALVKQPPDRWLSNARMTHYQAMLLDTDRVQFGPVVALNPATLLPLPEEGAPHDCLEILAETHGTRPDLTDQPIPDADHTWYTDGSSFLQEGQRKAGAAVTTETEVIWARALPAGTSAQRAELIALTQALKMAEGKRLNVYTDSRYAFATAHIHGEIYRRRGLLTSEGREIKNKSEILALLKALFLPKRLSIIHCLGHQKGDSAEARGNRLADQAAREAAIKTPPDTSTLLAGKRTADGSEFEKRTADGSEFESPKKKAKVE

SEQ ID NO: 1838 - protein, 2094 aa, synthetic construct
MPAAKRVKLDGGDKKYSIGLDIGTNSVGWAVITDEYKVPSKKFKVLGNTDRHSIKKNLIGALLFDSGETAEATRLKRTARRRYTRRKNRICYLQEIFSNEMAKVDDSFFHRLEESFLVEEDKKHERHPIFGNIVDEVAYHEKYPTIYHLRKKLVDSTDKADLRLIYLALAHMIKFRGHFLIEGDLNPDNSDVDKLFIQLVQTYNQLFEENPINASGVDAKAILSARLSKSRRLENLIAQLPGEKKNGLFGNLIALSLGLTPNFKSNFDLAEDAKLQLSKDTYDDDLDNLLAQIGDQYADLFLAAKNLSDAILLSDILRVNTEITKAPLSASMIKRYDEHHQDLTLLKALVRQQLPEKYKEIFFDQSKNGYAGYIDGGASQEEFYKFIKPILEKMDGTEELLVKLNREDLLRKQRTFDNGSIPHQIHLGELHAILRRQEDFYPFLKDNREKIEKILTFRIPYYVGPLARGNSRFAWMTRKSEETITPWNFEEVVDKGASAQSFIERMTNFDKNLPNEKVLPKHSLLYEYFTVYNELTKVKYVTEGMRKPAFLSGEQKKAIVDLLFKTNRKVTVKQLKEDYFKKIECFDSVEISGVEDRFNASLGTYHDLLKIIKDKDFLDNEENEDILEDIVLTLTLFEDREMIEERLKTYAHLFDDKVMKQLKRRRYTGWGRLSRKLINGIRDKQSGKTILDFLKSDGFANRNFMQLIHDDSLTFKEDIQKAQVSGQGDSLHEHIANLAGSPAIKKGILQTVKVVDELVKVMGRHKPENIVIEMARENQTTQKGQKNSRERMKRIEEGIKELGSQILKEHPVENTQLQNEKLYLYYLQNGRDMYVDQELDINRLSDYDVDHIVPQSFLKDDSIDNKVLTRSDKARGKSDNVPSEEVVKKMKNYWRQLLNAKLITQRKFDNLTKAERGGLSELDKAGFIKRQLVETRQITKHVAQILDSRMNTKYDENDKLIREVKVITLKSKLVSDFRKDFQFYKVREINNYHHAHDAYLNAVVGTALIKKYPKLESEFVYGDYKVYDVRKMIAKSEQEIGKATAKYFFYSNIMNFFKTEITLANGEIRKRPLIETNGETGEIVWDKGRDFATVRKVLSMPQVNIVKKTEVQTGGFSKESILPKRNSDKLIARKKDWDPKKYGGFDSPTVAYSVLVVAKVEKGKSKKLKSVKELLGITIMERSSFEKNPIDFLEAKGYKEVKKDLIIKLPKYSLFELENGRKRMLASAGELQKGNELALPSKYVNFLYLASHYEKLKGSPEDNEQKQLFVEQHKHYLDEIIEQISEFSKRVILADANLDKVLSAYNKHRDKPIREQAENIIHLFTLTNLGAPAAFKYFDTTIDRKRYTSTKEVLDATLIHQSITGLYETRIDLSQLGGDGGGSSGGGPAPGGTLNLEDEYRLYETSAEPEVSPGSTWLSDFPQAWAETGGMGLAVRQAPLIIPLKATSTPVSIKQYPMSQEAKLGIKPHIQRLLDQGILVPCQSPWNTPLLPVKKPGTNDYRPVQDLREVNKRVEDIHPTVPNPYNLLSGLPPSHRWYTVLDLKDAFFCLRLHPTSQPLFAFEWRDPGMGISGQLTWTRLPQGFKNSPTLFDEALHRDLADFRIQHPDLILLQYVDDILLAATSELDCQQGTRALLLTLGNLGYRASAKKAQLCQKQVKYLGYLLKEGQRWLTEARKETVMGQPTPKTPRQLREFLGTAGFCRLWIPGFAEMAAPLYPLTKTGTLFNWGPDQQKAYQEIKQALLTAPALGLPDLTKPFELFVDEKQGYAKGVLTQKLGPWRRPVAYLSKKLDPVAAGWPPCLRMVAAIAVLRKDAGKLTMGQPLVILAPHAVEALVKQPPDRWLSNARMTHYQAMLLDTDRVQFGPVVALNPATLLPLPEEGAPHDCLEILAETHGTRPDLTDQPIPDADHTWYTDGSSFLQEGQRKAGAAVTTETEVIWARALPAGTSAQRAELIALTQALKMAEGKRLNVYTDSRYAFATAHIHGEIYRRRGLLTSEGREIKNKSEILALLKALFLPKRLSIIHCLGHQKGDSAEARGNRLADQAAREAAIKTPPDTSTLLAGKRTADGSEFEKRTADGSEFESPKKKAKVE

SEQ ID NO: 1839 - protein, 2096 aa, synthetic construct
MPAAKRVKLDGGDKKYSIGLDIGTNSVGWAVITDEYKVPSKKFKVLGNTDRHSIKKNLIGALLFDSGETAEATRLKRTARRRYTRRKNRICYLQEIFSNEMAKVDDSFFHRLEESFLVEEDKKHERHPIFGNIVDEVAYHEKYPTIYHLRKKLVDSTDKADLRLIYLALAHMIKFRGHFLIEGDLNPDNSDVDKLFIQLVQTYNQLFEENPINASGVDAKAILSARLSKSRRLENLIAQLPGEKKNGLFGNLIALSLGLTPNFKSNFDLAEDAKLQLSKDTYDDDLDNLLAQIGDQYADLFLAAKNLSDAILLSDILRVNTEITKAPLSASMIKRYDEHHQDLTLLKALVRQQLPEKYKEIFFDQSKNGYAGYIDGGASQEEFYKFIKPILEKMDGTEELLVKLNREDLLRKQRTFDNGSIPHQIHLGELHAILRRQEDFYPFLKDNREKIEKILTFRIPYYVGPLARGNSRFAWMTRKSEETITPWNFEEVVDKGASAQSFIERMTNFDKNLPNEKVLPKHSLLYEYFTVYNELTKVKYVTEGMRKPAFLSGEQKKAIVDLLFKTNRKVTVKQLKEDYFKKIECFDSVEISGVEDRFNASLGTYHDLLKIIKDKDFLDNEENEDILEDIVLTLTLFEDREMIEERLKTYAHLFDDKVMKQLKRRRYTGWGRLSRKLINGIRDKQSGKTILDFLKSDGFANRNFMQLIHDDSLTFKEDIQKAQVSGQGDSLHEHIANLAGSPAIKKGILQTVKVVDELVKVMGRHKPENIVIEMARENQTTQKGQKNSRERMKRIEEGIKELGSQILKEHPVENTQLQNEKLYLYYLQNGRDMYVDQELDINRLSDYDVDHIVPQSFLKDDSIDNKVLTRSDKARGKSDNVPSEEVVKKMKNYWRQLLNAKLITQRKFDNLTKAERGGLSELDKAGFIKRQLVETRQITKHVAQILDSRMNTKYDENDKLIREVKVITLKSKLVSDFRKDFQFYKVREINNYHHAHDAYLNAVVGTALIKKYPKLESEFVYGDYKVYDVRKMIAKSEQEIGKATAKYFFYSNIMNFFKTEITLANGEIRKRPLIETNGETGEIVWDKGRDFATVRKVLSMPQVNIVKKTEVQTGGFSKESILPKRNSDKLIARKKDWDPKKYGGFDSPTVAYSVLVVAKVEKGKSKKLKSVKELLGITIMERSSFEKNPIDFLEAKGYKEVKKDLIIKLPKYSLFELENGRKRMLASAGELQKGNELALPSKYVNFLYLASHYEKLKGSPEDNEQKQLFVEQHKHYLDEIIEQISEFSKRVILADANLDKVLSAYNKHRDKPIREQAENIIHLFTLTNLGAPAAFKYFDTTIDRKRYTSTKEVLDATLIHQSITGLYETRIDLSQLGGDGGEAAAKGGGPAPGGTLNLEDEYRLYETSAEPEVSPGSTWLSDFPQAWAETGGMGLAVRQAPLIIPLKATSTPVSIKQYPMSQEAKLGIKPHIQRLLDQGILVPCQSPWNTPLLPVKKPGTNDYRPVQDLREVNKRVEDIHPTVPNPYNLLSGLPPSHRWYTVLDLKDAFFCLRLHPTSQPLFAFEWRDPGMGISGQLTWTRLPQGFKNSPTLFDEALHRDLADFRIQHPDLILLQYVDDILLAATSELDCQQGTRALLLTLGNLGYRASAKKAQLCQKQVKYLGYLLKEGQRWLTEARKETVMGQPTPKTPRQLREFLGTAGFCRLWIPGFAEMAAPLYPLTKTGTLFNWGPDQQKAYQEIKQALLTAPALGLPDLTKPFELFVDEKQGYAKGVLTQKLGPWRRPVAYLSKKLDPVAAGWPPCLRMVAAIAVLRKDAGKLTMGQPLVILAPHAVEALVKQPPDRWLSNARMTHYQAMLLDTDRVQFGPVVALNPATLLPLPEEGAPHDCLEILAETHGTRPDLTDQPIPDADHTWYTDGSSFLQEGQRKAGAAVTTETEVIWARALPAGTSAQRAELIALTQALKMAEGKRLNVYTDSRYAFATAHIHGEIYRRRGLLTSEGREIKNKSEILALLKALFLPKRLSIIHCLGHQKGDSAEARGNRLADQAAREAAIKTPPDTSTLLAGKRTADGSEFEKRTADGSEFESPKKKAKVE

SEQ ID NO: 1840 - protein, 2096 aa, synthetic construct
MPAAKRVKLDGGDKKYSIGLDIGTNSVGWAVITDEYKVPSKKFKVLGNTDRHSIKKNLIGALLFDSGETAEATRLKRTARRRYTRRKNRICYLQEIFSNEMAKVDDSFFHRLEESFLVEEDKKHERHPIFGNIVDEVAYHEKYPTIYHLRKKLVDSTDKADLRLIYLALAHMIKFRGHFLIEGDLNPDNSDVDKLFIQLVQTYNQLFEENPINASGVDAKAILSARLSKSRRLENLIAQLPGEKKNGLFGNLIALSLGLTPNFKSNFDLAEDAKLQLSKDTYDDDLDNLLAQIGDQYADLFLAAKNLSDAILLSDILRVNTEITKAPLSASMIKRYDEHHQDLTLLKALVRQQLPEKYKEIFFDQSKNGYAGYIDGGASQEEFYKFIKPILEKMDGTEELLVKLNREDLLRKQRTFDNGSIPHQIHLGELHAILRRQEDFYPFLKDNREKIEKILTFRIPYYVGPLARGNSRFAWMTRKSEETITPWNFEEVVDKGASAQSFIERMTNFDKNLPNEKVLPKHSLLYEYFTVYNELTKVKYVTEGMRKPAFLSGEQKKAIVDLLFKTNRKVTVKQLKEDYFKKIECFDSVEISGVEDRFNASLGTYHDLLKIIKDKDFLDNEENEDILEDIVLTLTLFEDREMIEERLKTYAHLFDDKVMKQLKRRRYTGWGRLSRKLINGIRDKQSGKTILDFLKSDGFANRNFMQLIHDDSLTFKEDIQKAQVSGQGDSLHEHIANLAGSPAIKKGILQTVKVVDELVKVMGRHKPENIVIEMARENQTTQKGQKNSRERMKRIEEGIKELGSQILKEHPVENTQLQNEKLYLYYLQNGRDMYVDQELDINRLSDYDVDHIVPQSFLKDDSIDNKVLTRSDKARGKSDNVPSEEVVKKMKNYWRQLLNAKLITQRKFDNLTKAERGGLSELDKAGFIKRQLVETRQITKHVAQILDSRMNTKYDENDKLIREVKVITLKSKLVSDFRKDFQFYKVREINNYHHAHDAYLNAVVGTALIKKYPKLESEFVYGDYKVYDVRKMIAKSEQEIGKATAKYFFYSNIMNFFKTEITLANGEIRKRPLIETNGETGEIVWDKGRDFATVRKVLSMPQVNIVKKTEVQTGGFSKESILPKRNSDKLIARKKDWDPKKYGGFDSPTVAYSVLVVAKVEKGKSKKLKSVKELLGITIMERSSFEKNPIDFLEAKGYKEVKKDLIIKLPKYSLFELENGRKRMLASAGELQKGNELALPSKYVNFLYLASHYEKLKGSPEDNEQKQLFVEQHKHYLDEIIEQISEFSKRVILADANLDKVLSAYNKHRDKPIREQAENIIHLFTLTNLGAPAAFKYFDTTIDRKRYTSTKEVLDATLIHQSITGLYETRIDLSQLGGDGGGGGPAPEAAAKGGTLNLEDEYRLYETSAEPEVSPGSTWLSDFPQAWAETGGMGLAVRQAPLIIPLKATSTPVSIKQYPMSQEAKLGIKPHIQRLLDQGILVPCQSPWNTPLLPVKKPGTNDYRPVQDLREVNKRVEDIHPTVPNPYNLLSGLPPSHRWYTVLDLKDAFFCLRLHPTSQPLFAFEWRDPGMGISGQLTWTRLPQGFKNSPTLFDEALHRDLADFRIQHPDLILLQYVDDILLAATSELDCQQGTRALLLTLGNLGYRASAKKAQLCQKQVKYLGYLLKEGQRWLTEARKETVMGQPTPKTPRQLREFLGTAGFCRLWIPGFAEMAAPLYPLTKTGTLFNWGPDQQKAYQEIKQALLTAPALGLPDLTKPFELFVDEKQGYAKGVLTQKLGPWRRPVAYLSKKLDPVAAGWPPCLRMVAAIAVLRKDAGKLTMGQPLVILAPHAVEALVKQPPDRWLSNARMTHYQAMLLDTDRVQFGPVVALNPATLLPLPEEGAPHDCLEILAETHGTRPDLTDQPIPDADHTWYTDGSSFLQEGQRKAGAAVTTETEVIWARALPAGTSAQRAELIALTQALKMAEGKRLNVYTDSRYAFATAHIHGEIYRRRGLLTSEGREIKNKSEILALLKALFLPKRLSIIHCLGHQKGDSAEARGNRLADQAAREAAIKTPPDTSTLLAGKRTADGSEFEKRTADGSEFESPKKKAKVE

SEQ ID NO: 1841 - protein, 2096 aa, synthetic construct
MPAAKRVKLDGGDKKYSIGLDIGTNSVGWAVITDEYKVPSKKFKVLGNTDRHSIKKNLIGALLFDSGETAEATRLKRTARRRYTRRKNRICYLQEIFSNEMAKVDDSFFHRLEESFLVEEDKKHERHPIFGNIVDEVAYHEKYPTIYHLRKKLVDSTDKADLRLIYLALAHMIKFRGHFLIEGDLNPDNSDVDKLFIQLVQTYNQLFEENPINASGVDAKAILSARLSKSRRLENLIAQLPGEKKNGLFGNLIALSLGLTPNFKSNFDLAEDAKLQLSKDTYDDDLDNLLAQIGDQYADLFLAAKNLSDAILLSDILRVNTEITKAPLSASMIKRYDEHHQDLTLLKALVRQQLPEKYKEIFFDQSKNGYAGYIDGGASQEEFYKFIKPILEKMDGTEELLVKLNREDLLRKQRTFDNGSIPHQIHLGELHAILRRQEDFYPFLKDNREKIEKILTFRIPYYVGPLARGNSRFAWMTRKSEETITPWNFEEVVDKGASAQSFIERMTNFDKNLPNEKVLPKHSLLYEYFTVYNELTKVKYVTEGMRKPAFLSGEQKKAIVDLLFKTNRKVTVKQLKEDYFKKIECFDSVEISGVEDRFNASLGTYHDLLKIIKDKDFLDNEENEDILEDIVLTLTLFEDREMIEERLKTYAHLFDDKVMKQLKRRRYTGWGRLSRKLINGIRDKQSGKTILDFLKSDGFANRNFMQLIHDDSLTFKEDIQKAQVSGQGDSLHEHIANLAGSPAIKKGILQTVKVVDELVKVMGRHKPENIVIEMARENQTTQKGQKNSRERMKRIEEGIKELGSQILKEHPVENTQLQNEKLYLYYLQNGRDMYVDQELDINRLSDYDVDHIVPQSFLKDDSIDNKVLTRSDKARGKSDNVPSEEVVKKMKNYWRQLLNAKLITQRKFDNLTKAERGGLSELDKAGFIKRQLVETRQITKHVAQILDSRMNTKYDENDKLIREVKVITLKSKLVSDFRKDFQFYKVREINNYHHAHDAYLNAVVGTALIKKYPKLESEFVYGDYKVYDVRKMIAKSEQEIGKATAKYFFYSNIMNFFKTEITLANGEIRKRPLIETNGETGEIVWDKGRDFATVRKVLSMPQVNIVKKTEVQTGGFSKESILPKRNSDKLIARKKDWDPKKYGGFDSPTVAYSVLVVAKVEKGKSKKLKSVKELLGITIMERSSFEKNPIDFLEAKGYKEVKKDLIIKLPKYSLFELENGRKRMLASAGELQKGNELALPSKYVNFLYLASHYEKLKGSPEDNEQKQLFVEQHKHYLDEIIEQISEFSKRVILADANLDKVLSAYNKHRDKPIREQAENIIHLFTLTNLGAPAAFKYFDTTIDRKRYTSTKEVLDATLIHQSITGLYETRIDLSQLGGDGGEAAAKGGGGGSGGTLNLEDEYRLYETSAEPEVSPGSTWLSDFPQAWAETGGMGLAVRQAPLIIPLKATSTPVSIKQYPMSQEAKLGIKPHIQRLLDQGILVPCQSPWNTPLLPVKKPGTNDYRPVQDLREVNKRVEDIHPTVPNPYNLLSGLPPSHRWYTVLDLKDAFFCLRLHPTSQPLFAFEWRDPGMGISGQLTWTRLPQGFKNSPTLFDEALHRDLADFRIQHPDLILLQYVDDILLAATSELDCQQGTRALLLTLGNLGYRASAKKAQLCQKQVKYLGYLLKEGQRWLTEARKETVMGQPTPKTPRQLREFLGTAGFCRLWIPGFAEMAAPLYPLTKTGTLFNWGPDQQKAYQEIKQALLTAPALGLPDLTKPFELFVDEKQGYAKGVLTQKLGPWRRPVAYLSKKLDPVAAGWPPCLRMVAAIAVLRKDAGKLTMGQPLVILAPHAVEALVKQPPDRWLSNARMTHYQAMLLDTDRVQFGPVVALNPATLLPLPEEGAPHDCLEILAETHGTRPDLTDQPIPDADHTWYTDGSSFLQEGQRKAGAAVTTETEVIWARALPAGTSAQRAELIALTQALKMAEGKRLNVYTDSRYAFATAHIHGEIYRRRGLLTSEGREIKNKSEILALLKALFLPKRLSIIHCLGHQKGDSAEARGNRLADQAAREAAIKTPPDTSTLLAGKRTADGSEFEKRTADGSEFESPKKKAKVE

SEQ ID NO: 1842 - protein, 2096 aa, synthetic construct
MPAAKRVKLDGGDKKYSIGLDIGTNSVGWAVITDEYKVPSKKFKVLGNTDRHSIKKNLIGALLFDSGETAEATRLKRTARRRYTRRKNRICYLQEIFSNEMAKVDDSFFHRLEESFLVEEDKKHERHPIFGNIVDEVAYHEKYPTIYHLRKKLVDSTDKADLRLIYLALAHMIKFRGHFLIEGDLNPDNSDVDKLFIQLVQTYNQLFEENPINASGVDAKAILSARLSKSRRLENLIAQLPGEKKNGLFGNLIALSLGLTPNFKSNFDLAEDAKLQLSKDTYDDDLDNLLAQIGDQYADLFLAAKNLSDAILLSDILRVNTEITKAPLSASMIKRYDEHHQDLTLLKALVRQQLPEKYKEIFFDQSKNGYAGYIDGGASQEEFYKFIKPILEKMDGTEELLVKLNREDLLRKQRTFDNGSIPHQIHLGELHAILRRQEDFYPFLKDNREKIEKILTFRIPYYVGPLARGNSRFAWMTRKSEETITPWNFEEVVDKGASAQSFIERMTNFDKNLPNEKVLPKHSLLYEYFTVYNELTKVKYVTEGMRKPAFLSGEQKKAIVDLLFKTNRKVTVKQLKEDYFKKIECFDSVEISGVEDRFNASLGTYHDLLKIIKDKDFLDNEENEDILEDIVLTLTLFEDREMIEERLKTYAHLFDDKVMKQLKRRRYTGWGRLSRKLINGIRDKQSGKTILDFLKSDGFANRNFMQLIHDDSLTFKEDIQKAQVSGQGDSLHEHIANLAGSPAIKKGILQTVKVVDELVKVMGRHKPENIVIEMARENQTTQKGQKNSRERMKRIEEGIKELGSQILKEHPVENTQLQNEKLYLYYLQNGRDMYVDQELDINRLSDYDVDHIVPQSFLKDDSIDNKVLTRSDKARGKSDNVPSEEVVKKMKNYWRQLLNAKLITQRKFDNLTKAERGGLSELDKAGFIKRQLVETRQITKHVAQILDSRMNTKYDENDKLIREVKVITLKSKLVSDFRKDFQFYKVREINNYHHAHDAYLNAVVGTALIKKYPKLESEFVYGDYKVYDVRKMIAKSEQEIGKATAKYFFYSNIMNFFKTEITLANGEIRKRPLIETNGETGEIVWDKGRDFATVRKVLSMPQVNIVKKTEVQTGGFSKESILPKRNSDKLIARKKDWDPKKYGGFDSPTVAYSVLVVAKVEKGKSKKLKSVKELLGITIMERSSFEKNPIDFLEAKGYKEVKKDLIIKLPKYSLFELENGRKRMLASAGELQKGNELALPSKYVNFLYLASHYEKLKGSPEDNEQKQLFVEQHKHYLDEIIEQISEFSKRVILADANLDKVLSAYNKHRDKPIREQAENIIHLFTLTNLGAPAAFKYFDTTIDRKRYTSTKEVLDATLIHQSITGLYETRIDLSQLGGDGGPAPEAAAKGSSGGTLNLEDEYRLYETSAEPEVSPGSTWLSDFPQAWAETGGMGLAVRQAPLIIPLKATSTPVSIKQYPMSQEAKLGIKPHIQRLLDQGILVPCQSPWNTPLLPVKKPGTNDYRPVQDLREVNKRVEDIHPTVPNPYNLLSGLPPSHRWYTVLDLKDAFFCLRLHPTSQPLFAFEWRDPGMGISGQLTWTRLPQGFKNSPTLFNEALHRDLADFRIQHPDLILLQYVDDILLAATSELDCQQGTRALLLTLGNLGYRASAKKAQLCQKQVKYLGYLLKEGQRWLTEARKETVMGQPTPKTPRQLREFLGTAGFCRLWIPGFAEMAAPLYPLTKPGTLFNWGPDQQKAYQEIKQALLTAPALGLPDLTKPFELFVDEKQGYAKGVLTQKLGPWRRPVAYLSKKLDPVAAGWPPCLRMVAAIAVLRKDAGKLTMGQPLVILAPHAVEALVKQPPDRWLSNARMTHYQAMLLDTDRVQFGPVVALNPATLLPLPEEGAPHDCLEILAETHGTRPDLTDQPIPDADHTWYTDGSSFLQEGQRKAGAAVTTETEVIWARALPAGTSAQRAELIALTQALKMAEGKRLNVYTDSRYAFATAHIHGEIYRRRGWLTSEGREIKNKSEILALLKALFLPKRLSIIHCLGHQKGDSAEARGNRLADQAAREAAIKTPPDTSTLLAGKRTADGSEFEKRTADGSEFESPKKKAKVE

SEQ ID NO: 1843 - protein, 2093 aa, synthetic construct
MPAAKRVKLDGGDKKYSIGLDIGTNSVGWAVITDEYKVPSKKFKVLGNTDRHSIKKNLIGALLFDSGETAEATRLKRTARRRYTRRKNRICYLQEIFSNEMAKVDDSFFHRLEESFLVEEDKKHERHPIFGNIVDEVAYHEKYPTIYHLRKKLVDSTDKADLRLIYLALAHMIKFRGHFLIEGDLNPDNSDVDKLFIQLVQTYNQLFEENPINASGVDAKAILSARLSKSRRLENLIAQLPGEKKNGLFGNLIALSLGLTPNFKSNFDLAEDAKLQLSKDTYDDDLDNLLAQIGDQYADLFLAAKNLSDAILLSDILRVNTEITKAPLSASMIKRYDEHHQDLTLLKALVRQQLPEKYKEIFFDQSKNGYAGYIDGGASQEEFYKFIKPILEKMDGTEELLVKLNREDLLRKQRTFDNGSIPHQIHLGELHAILRRQEDFYPFLKDNREKIEKILTFRIPYYVGPLARGNSRFAWMTRKSEETITPWNFEEVVDKGASAQSFIERMTNFDKNLPNEKVLPKHSLLYEYFTVYNELTKVKYVTEGMRKPAFLSGEQKKAIVDLLFKTNRKVTVKQLKEDYFKKIECFDSVEISGVEDRFNASLGTYHDLLKIIKDKDFLDNEENEDILEDIVLTLTLFEDREMIEERLKTYAHLFDDKVMKQLKRRRYTGWGRLSRKLINGIRDKQSGKTILDFLKSDGFANRNFMQLIHDDSLTFKEDIQKAQVSGQGDSLHEHIANLAGSPAIKKGILQTVKVVDELVKVMGRHKPENIVIEMARENQTTQKGQKNSRERMKRIEEGIKELGSQILKEHPVENTQLQNEKLYLYYLQNGRDMYVDQELDINRLSDYDVDHIVPQSFLKDDSIDNKVLTRSDKARGKSDNVPSEEVVKKMKNYWRQLLNAKLITQRKFDNLTKAERGGLSELDKAGFIKRQLVETRQITKHVAQILDSRMNTKYDENDKLIREVKVITLKSKLVSDFRKDFQFYKVREINNYHHAHDAYLNAVVGTALIKKYPKLESEFVYGDYKVYDVRKMIAKSEQEIGKATAKYFFYSNIMNFFKTEITLANGEIRKRPLIETNGETGEIVWDKGRDFATVRKVLSMPQVNIVKKTEVQTGGFSKESILPKRNSDKLIARKKDWDPKKYGGFDSPTVAYSVLVVAKVEKGKSKKLKSVKELLGITIMERSSFEKNPIDFLEAKGYKEVKKDLIIKLPKYSLFELENGRKRMLASAGELQKGNELALPSKYVNFLYLASHYEKLKGSPEDNEQKQLFVEQHKHYLDEIIEQISEFSKRVILADANLDKVLSAYNKHRDKPIREQAENIIHLFTLTNLGAPAAFKYFDTTIDRKRYTSTKEVLDATLIHQSITGLYETRIDLSQLGGDGGPAPEAAAKGGTLNLEDEYRLYETSAEPEVSPGSTWLSDFPQAWAETGGMGLAVRQAPLIIPLKATSTPVSIKQYPMSQEAKLGIKPHIQRLLDQGILVPCQSPWNTPLLPVKKPGTNDYRPVQDLREVNKRVEDIHPTVPNPYNLLSGLPPSHRWYTVLDLKDAFFCLRLHPTSQPLFAFEWRDPGMGISGQLTWTRLPQGFKNSPTLFNEALHRDLADFRIQHPDLILLQYVDDILLAATSELDCQQGTRALLLTLGNLGYRASAKKAQLCQKQVKYLGYLLKEGQRWLTEARKETVMGQPTPKTPRQLREFLGTAGFCRLWIPGFAEMAAPLYPLTKPGTLFNWGPDQQKAYQEIKQALLTAPALGLPDLTKPFELFVDEKQGYAKGVLTQKLGPWRRPVAYLSKKLDPVAAGWPPCLRMVAAIAVLRKDAGKLTMGQPLVILAPHAVEALVKQPPDRWLSNARMTHYQAMLLDTDRVQFGPVVALNPATLLPLPEEGAPHDCLEILAETHGTRPDLTDQPIPDADHTWYTDGSSFLQEGQRKAGAAVTTETEVIWARALPAGTSAQRAELIALTQALKMAEGKRLNVYTDSRYAFATAHIHGEIYRRRGWLTSEGREIKNKSEILALLKALFLPKRLSIIHCLGHQKGDSAEARGNRLADQAAREAAIKTPPDTSTLLAGKRTADGSEFEKRTADGSEFESPKKKAKVE

SEQ ID NO: 1844 - protein, 2098 aa, synthetic construct
MPAAKRVKLDGGDKKYSIGLDIGTNSVGWAVITDEYKVPSKKFKVLGNTDRHSIKKNLIGALLFDSGETAEATRLKRTARRRYTRRKNRICYLQEIFSNEMAKVDDSFFHRLEESFLVEEDKKHERHPIFGNIVDEVAYHEKYPTIYHLRKKLVDSTDKADLRLIYLALAHMIKFRGHFLIEGDLNPDNSDVDKLFIQLVQTYNQLFEENPINASGVDAKAILSARLSKSRRLENLIAQLPGEKKNGLFGNLIALSLGLTPNFKSNFDLAEDAKLQLSKDTYDDDLDNLLAQIGDQYADLFLAAKNLSDAILLSDILRVNTEITKAPLSASMIKRYDEHHQDLTLLKALVRQQLPEKYKEIFFDQSKNGYAGYIDGGASQEEFYKFIKPILEKMDGTEELLVKLNREDLLRKQRTFDNGSIPHQIHLGELHAILRRQEDFYPFLKDNREKIEKILTFRIPYYVGPLARGNSRFAWMTRKSEETITPWNFEEVVDKGASAQSFIERMTNFDKNLPNEKVLPKHSLLYEYFTVYNELTKVKYVTEGMRKPAFLSGEQKKAIVDLLFKTNRKVTVKQLKEDYFKKIECFDSVEISGVEDRFNASLGTYHDLLKIIKDKDFLDNEENEDILEDIVLTLTLFEDREMIEERLKTYAHLFDDKVMKQLKRRRYTGWGRLSRKLINGIRDKQSGKTILDFLKSDGFANRNFMQLIHDDSLTFKEDIQKAQVSGQGDSLHEHIANLAGSPAIKKGILQTVKVVDELVKVMGRHKPENIVIEMARENQTTQKGQKNSRERMKRIEEGIKELGSQILKEHPVENTQLQNEKLYLYYLQNGRDMYVDQELDINRLSDYDVDHIVPQSFLKDDSIDNKVLTRSDKARGKSDNVPSEEVVKKMKNYWRQLLNAKLITQRKFDNLTKAERGGLSELDKAGFIKRQLVETRQITKHVAQILDSRMNTKYDENDKLIREVKVITLKSKLVSDFRKDFQFYKVREINNYHHAHDAYLNAVVGTALIKKYPKLESEFVYGDYKVYDVRKMIAKSEQEIGKATAKYFFYSNIMNFFKTEITLANGEIRKRPLIETNGETGEIVWDKGRDFATVRKVLSMPQVNIVKKTEVQTGGFSKESILPKRNSDKLIARKKDWDPKKYGGFDSPTVAYSVLVVAKVEKGKSKKLKSVKELLGITIMERSSFEKNPIDFLEAKGYKEVKKDLIIKLPKYSLFELENGRKRMLASAGELQKGNELALPSKYVNFLYLASHYEKLKGSPEDNEQKQLFVEQHKHYLDEIIEQISEFSKRVILADANLDKVLSAYNKHRDKPIREQAENIIHLFTLTNLGAPAAFKYFDTTIDRKRYTSTKEVLDATLIHQSITGLYETRIDLSQLGGDGGPAPAPAPAPAPAPGGTLNLEDEYRLYETSAEPEVSPGSTWLSDFPQAWAETGGMGLAVRQAPLIIPLKATSTPVSIKQYPMSQEAKLGIKPHIQRLLDQGILVPCQSPWNTPLLPVKKPGTNDYRPVQDLREVNKRVEDIHPTVPNPYNLLSGLPPSHRWYTVLDLKDAFFCLRLHPTSQPLFAFEWRDPGMGISGQLTWTRLPQGFKNSPTLFNEALHRDLADFRIQHPDLILLQYVDDILLAATSELDCQQGTRALLLTLGNLGYRASAKKAQLCQKQVKYLGYLLKEGQRWLTEARKETVMGQPTPKTPRQLREFLGTAGFCRLWIPGFAEMAAPLYPLTKPGTLFNWGPDQQKAYQEIKQALLTAPALGLPDLTKPFELFVDEKQGYAKGVLTQKLGPWRRPVAYLSKKLDPVAAGWPPCLRMVAAIAVLRKDAGKLTMGQPLVILAPHAVEALVKQPPDRWLSNARMTHYQAMLLDTDRVQFGPVVALNPATLLPLPEEGAPHDCLEILAETHGTRPDLTDQPIPDADHTWYTDGSSFLQEGQRKAGAAVTTETEVIWARALPAGTSAQRAELIALTQALKMAEGKRLNVYTDSRYAFATAHIHGEIYRRRGWLTSEGREIKNKSEILALLKALFLPKRLSIIHCLGHQKGDSAEARGNRLADQAAREAAIKTPPDTSTLLAGKRTADGSEFEKRTADGSEFESPKKKAKVE

SEQ ID NO: 1845 - protein, 2096 aa, synthetic construct
MPAAKRVKLDGGDKKYSIGLDIGTNSVGWAVITDEYKVPSKKFKVLGNTDRHSIKKNLIGALLFDSGETAEATRLKRTARRRYTRRKNRICYLQEIFSNEMAKVDDSFFHRLEESFLVEEDKKHERHPIFGNIVDEVAYHEKYPTIYHLRKKLVDSTDKADLRLIYLALAHMIKFRGHFLIEGDLNPDNSDVDKLFIQLVQTYNQLFEENPINASGVDAKAILSARLSKSRRLENLIAQLPGEKKNGLFGNLIALSLGLTPNFKSNFDLAEDAKLQLSKDTYDDDLDNLLAQIGDQYADLFLAAKNLSDAILLSDILRVNTEITKAPLSASMIKRYDEHHQDLTLLKALVRQQLPEKYKEIFFDQSKNGYAGYIDGGASQEEFYKFIKPILEKMDGTEELLVKLNREDLLRKQRTFDNGSIPHQIHLGELHAILRRQEDFYPFLKDNREKIEKILTFRIPYYVGPLARGNSRFAWMTRKSEETITPWNFEEVVDKGASAQSFIERMTNFDKNLPNEKVLPKHSLLYEYFTVYNELTKVKYVTEGMRKPAFLSGEQKKAIVDLLFKTNRKVTVKQLKEDYFKKIECFDSVEISGVEDRFNASLGTYHDLLKIIKDKDFLDNEENEDILEDIVLTLTLFEDREMIEERLKTYAHLFDDKVMKQLKRRRYTGWGRLSRKLINGIRDKQSGKTILDFLKSDGFANRNFMQLIHDDSLTFKEDIQKAQVSGQGDSLHEHIANLAGSPAIKKGILQTVKVVDELVKVMGRHKPENIVIEMARENQTTQKGQKNSRERMKRIEEGIKELGSQILKEHPVENTQLQNEKLYLYYLQNGRDMYVDQELDINRLSDYDVDHIVPQSFLKDDSIDNKVLTRSDKARGKSDNVPSEEVVKKMKNYWRQLLNAKLITQRKFDNLTKAERGGLSELDKAGFIKRQLVETRQITKHVAQILDSRMNTKYDENDKLIREVKVITLKSKLVSDFRKDFQFYKVREINNYHHAHDAYLNAVVGTALIKKYPKLESEFVYGDYKVYDVRKMIAKSEQEIGKATAKYFFYSNIMNFFKTEITLANGEIRKRPLIETNGETGEIVWDKGRDFATVRKVLSMPQVNIVKKTEVQTGGFSKESILPKRNSDKLIARKKDWDPKKYGGFDSPTVAYSVLVVAKVEKGKSKKLKSVKELLGITIMERSSFEKNPIDFLEAKGYKEVKKDLIIKLPKYSLFELENGRKRMLASAGELQKGNELALPSKYVNFLYLASHYEKLKGSPEDNEQKQLFVEQHKHYLDEIIEQISEFSKRVILADANLDKVLSAYNKHRDKPIREQAENIIHLFTLTNLGAPAAFKYFDTTIDRKRYTSTKEVLDATLIHQSITGLYETRIDLSQLGGDGGGSSGGGEAAAKGGTLNLEDEYRLYETSAEPEVSPGSTWLSDFPQAWAETGGMGLAVRQAPLIIPLKATSTPVSIKQYPMSQEAKLGIKPHIQRLLDQGILVPCQSPWNTPLLPVKKPGTNDYRPVQDLREVNKRVEDIHPTVPNPYNLLSGLPPSHRWYTVLDLKDAFFCLRLHPTSQPLFAFEWRDPGMGISGQLTWTRLPQGFKNSPTLFNEALHRDLADFRIQHPDLILLQYVDDILLAATSELDCQQGTRALLLTLGNLGYRASAKKAQLCQKQVKYLGYLLKEGQRWLTEARKETVMGQPTPKTPRQLREFLGTAGFCRLWIPGFAEMAAPLYPLTKPGTLFNWGPDQQKAYQEIKQALLTAPALGLPDLTKPFELFVDEKQGYAKGVLTQKLGPWRRPVAYLSKKLDPVAAGWPPCLRMVAAIAVLRKDAGKLTMGQPLVILAPHAVEALVKQPPDRWLSNARMTHYQAMLLDTDRVQFGPVVALNPATLLPLPEEGAPHDCLEILAETHGTRPDLTDQPIPDADHTWYTDGSSFLQEGQRKAGAAVTTETEVIWARALPAGTSAQRAELIALTQALKMAEGKRLNVYTDSRYAFATAHIHGEIYRRRGWLTSEGREIKNKSEILALLKALFLPKRLSIIHCLGHQKGDSAEARGNRLADQAAREAAIKTPPDTSTLLAGKRTADGSEFEKRTADGSEFESPKKKAKVE

SEQ ID NO: 1846 - protein, 2096 aa, synthetic construct
MPAAKRVKLDGGDKKYSIGLDIGTNSVGWAVITDEYKVPSKKFKVLGNTDRHSIKKNLIGALLFDSGETAEATRLKRTARRRYTRRKNRICYLQEIFSNEMAKVDDSFFHRLEESFLVEEDKKHERHPIFGNIVDEVAYHEKYPTIYHLRKKLVDSTDKADLRLIYLALAHMIKFRGHFLIEGDLNPDNSDVDKLFIQLVQTYNQLFEENPINASGVDAKAILSARLSKSRRLENLIAQLPGEKKNGLFGNLIALSLGLTPNFKSNFDLAEDAKLQLSKDTYDDDLDNLLAQIGDQYADLFLAAKNLSDAILLSDILRVNTEITKAPLSASMIKRYDEHHQDLTLLKALVRQQLPEKYKEIFFDQSKNGYAGYIDGGASQEEFYKFIKPILEKMDGTEELLVKLNREDLLRKQRTFDNGSIPHQIHLGELHAILRRQEDFYPFLKDNREKIEKILTFRIPYYVGPLARGNSRFAWMTRKSEETITPWNFEEVVDKGASAQSFIERMTNFDKNLPNEKVLPKHSLLYEYFTVYNELTKVKYVTEGMRKPAFLSGEQKKAIVDLLFKTNRKVTVKQLKEDYFKKIECFDSVEISGVEDRFNASLGTYHDLLKIIKDKDFLDNEENEDILEDIVLTLTLFEDREMIEERLKTYAHLFDDKVMKQLKRRRYTGWGRLSRKLINGIRDKQSGKTILDFLKSDGFANRNFMQLIHDDSLTFKEDIQKAQVSGQGDSLHEHIANLAGSPAIKKGILQTVKVVDELVKVMGRHKPENIVIEMARENQTTQKGQKNSRERMKRIEEGIKELGSQILKEHPVENTQLQNEKLYLYYLQNGRDMYVDQELDINRLSDYDVDHIVPQSFLKDDSIDNKVLTRSDKARGKSDNVPSEEVVKKMKNYWRQLLNAKLITQRKFDNLTKAERGGLSELDKAGFIKRQLVETRQITKHVAQILDSRMNTKYDENDKLIREVKVITLKSKLVSDFRKDFQFYKVREINNYHHAHDAYLNAVVGTALIKKYPKLESEFVYGDYKVYDVRKMIAKSEQEIGKATAKYFFYSNIMNFFKTEITLANGEIRKRPLIETNGETGEIVWDKGRDFATVRKVLSMPQVNIVKKTEVQTGGFSKESILPKRNSDKLIARKKDWDPKKYGGFDSPTVAYSVLVVAKVEKGKSKKLKSVKELLGITIMERSSFEKNPIDFLEAKGYKEVKKDLIIKLPKYSLFELENGRKRMLASAGELQKGNELALPSKYVNFLYLASHYEKLKGSPEDNEQKQLFVEQHKHYLDEIIEQISEFSKRVILADANLDKVLSAYNKHRDKPIREQAENIIHLFTLTNLGAPAAFKYFDTTIDRKRYTSTKEVLDATLIHQSITGLYETRIDLSQLGGDGGEAAAKGGGGSSGGTLNLEDEYRLYETSAEPEVSPGSTWLSDFPQAWAETGGMGLAVRQAPLIIPLKATSTPVSIKQYPMSQEAKLGIKPHIQRLLDQGILVPCQSPWNTPLLPVKKPGTNDYRPVQDLREVNKRVEDIHPTVPNPYNLLSGLPPSHRWYTVLDLKDAFFCLRLHPTSQPLFAFEWRDPGMGISGQLTWTRLPQGFKNSPTLFNEALHRDLADFRIQHPDLILLQYVDDILLAATSELDCQQGTRALLLTLGNLGYRASAKKAQLCQKQVKYLGYLLKEGQRWLTEARKETVMGQPTPKTPRQLREFLGTAGFCRLWIPGFAEMAAPLYPLTKPGTLFNWGPDQQKAYQEIKQALLTAPALGLPDLTKPFELFVDEKQGYAKGVLTQKLGPWRRPVAYLSKKLDPVAAGWPPCLRMVAAIAVLRKDAGKLTMGQPLVILAPHAVEALVKQPPDRWLSNARMTHYQAMLLDTDRVQFGPVVALNPATLLPLPEEGAPHDCLEILAETHGTRPDLTDQPIPDADHTWYTDGSSFLQEGQRKAGAAVTTETEVIWARALPAGTSAQRAELIALTQALKMAEGKRLNVYTDSRYAFATAHIHGEIYRRRGWLTSEGREIKNKSEILALLKALFLPKRLSIIHCLGHQKGDSAEARGNRLADQAAREAAIKTPPDTSTLLAGKRTADGSEFEKRTADGSEFESPKKKAKVE

SEQ ID NO: 1847 - protein, 2095 aa, synthetic construct
MPAAKRVKLDGGDKKYSIGLDIGTNSVGWAVITDEYKVPSKKFKVLGNTDRHSIKKNLIGALLFDSGETAEATRLKRTARRRYTRRKNRICYLQEIFSNEMAKVDDSFFHRLEESFLVEEDKKHERHPIFGNIVDEVAYHEKYPTIYHLRKKLVDSTDKADLRLIYLALAHMIKFRGHFLIEGDLNPDNSDVDKLFIQLVQTYNQLFEENPINASGVDAKAILSARLSKSRRLENLIAQLPGEKKNGLFGNLIALSLGLTPNFKSNFDLAEDAKLQLSKDTYDDDLDNLLAQIGDQYADLFLAAKNLSDAILLSDILRVNTEITKAPLSASMIKRYDEHHQDLTLLKALVRQQLPEKYKEIFFDQSKNGYAGYIDGGASQEEFYKFIKPILEKMDGTEELLVKLNREDLLRKQRTFDNGSIPHQIHLGELHAILRRQEDFYPFLKDNREKIEKILTFRIPYYVGPLARGNSRFAWMTRKSEETITPWNFEEVVDKGASAQSFIERMTNFDKNLPNEKVLPKHSLLYEYFTVYNELTKVKYVTEGMRKPAFLSGEQKKAIVDLLFKTNRKVTVKQLKEDYFKKIECFDSVEISGVEDRFNASLGTYHDLLKIIKDKDFLDNEENEDILEDIVLTLTLFEDREMIEERLKTYAHLFDDKVMKQLKRRRYTGWGRLSRKLINGIRDKQSGKTILDFLKSDGFANRNFMQLIHDDSLTFKEDIQKAQVSGQGDSLHEHIANLAGSPAIKKGILQTVKVVDELVKVMGRHKPENIVIEMARENQTTQKGQKNSRERMKRIEEGIKELGSQILKEHPVENTQLQNEKLYLYYLQNGRDMYVDQELDINRLSDYDVDHIVPQSFLKDDSIDNKVLTRSDKARGKSDNVPSEEVVKKMKNYWRQLLNAKLITQRKFDNLTKAERGGLSELDKAGFIKRQLVETRQITKHVAQILDSRMNTKYDENDKLIREVKVITLKSKLVSDFRKDFQFYKVREINNYHHAHDAYLNAVVGTALIKKYPKLESEFVYGDYKVYDVRKMIAKSEQEIGKATAKYFFYSNIMNFFKTEITLANGEIRKRPLIETNGETGEIVWDKGRDFATVRKVLSMPQVNIVKKTEVQTGGFSKESILPKRNSDKLIARKKDWDPKKYGGFDSPTVAYSVLVVAKVEKGKSKKLKSVKELLGITIMERSSFEKNPIDFLEAKGYKEVKKDLIIKLPKYSLFELENGRKRMLASAGELQKGNELALPSKYVNFLYLASHYEKLKGSPEDNEQKQLFVEQHKHYLDEIIEQISEFSKRVILADANLDKVLSAYNKHRDKPIREQAENIIHLFTLTNLGAPAAFKYFDTTIDRKRYTSTKEVLDATLIHQSITGLYETRIDLSQLGGDGGEAAAKEAAAKGGTLNLEDEYRLYETSAEPEVSPGSTWLSDFPQAWAETGGMGLAVRQAPLIIPLKATSTPVSIKQYPMSQEAKLGIKPHIQRLLDQGILVPCQSPWNTPLLPVKKPGTNDYRPVQDLREVNKRVEDIHPTVPNPYNLLSGLPPSHRWYTVLDLKDAFFCLRLHPTSQPLFAFEWRDPGMGISGQLTWTRLPQGFKNSPTLFNEALHRDLADFRIQHPDLILLQYVDDILLAATSELDCQQGTRALLLTLGNLGYRASAKKAQLCQKQVKYLGYLLKEGQRWLTEARKETVMGQPTPKTPRQLREFLGTAGFCRLWIPGFAEMAAPLYPLTKPGTLFNWGPDQQKAYQEIKQALLTAPALGLPDLTKPFELFVDEKQGYAKGVLTQKLGPWRRPVAYLSKKLDPVAAGWPPCLRMVAAIAVLRKDAGKLTMGQPLVILAPHAVEALVKQPPDRWLSNARMTHYQAMLLDTDRVQFGPVVALNPATLLPLPEEGAPHDCLEILAETHGTRPDLTDQPIPDADHTWYTDGSSFLQEGQRKAGAAVTTETEVIWARALPAGTSAQRAELIALTQALKMAEGKRLNVYTDSRYAFATAHIHGEIYRRRGWLTSEGREIKNKSEILALLKALFLPKRLSIIHCLGHQKGDSAEARGNRLADQAAREAAIKTPPDTSTLLAGKRTADGSEFEKRTADGSEFESPKKKAKVE

SEQ ID NO: 1848 - protein, 2091 aa, synthetic construct
MPAAKRVKLDGGDKKYSIGLDIGTNSVGWAVITDEYKVPSKKFKVLGNTDRHSIKKNLIGALLFDSGETAEATRLKRTARRRYTRRKNRICYLQEIFSNEMAKVDDSFFHRLEESFLVEEDKKHERHPIFGNIVDEVAYHEKYPTIYHLRKKLVDSTDKADLRLIYLALAHMIKFRGHFLIEGDLNPDNSDVDKLFIQLVQTYNQLFEENPINASGVDAKAILSARLSKSRRLENLIAQLPGEKKNGLFGNLIALSLGLTPNFKSNFDLAEDAKLQLSKDTYDDDLDNLLAQIGDQYADLFLAAKNLSDAILLSDILRVNTEITKAPLSASMIKRYDEHHQDLTLLKALVRQQLPEKYKEIFFDQSKNGYAGYIDGGASQEEFYKFIKPILEKMDGTEELLVKLNREDLLRKQRTFDNGSIPHQIHLGELHAILRRQEDFYPFLKDNREKIEKILTFRIPYYVGPLARGNSRFAWMTRKSEETITPWNFEEVVDKGASAQSFIERMTNFDKNLPNEKVLPKHSLLYEYFTVYNELTKVKYVTEGMRKPAFLSGEQKKAIVDLLFKTNRKVTVKQLKEDYFKKIECFDSVEISGVEDRFNASLGTYHDLLKIIKDKDFLDNEENEDILEDIVLTLTLFEDREMIEERLKTYAHLFDDKVMKQLKRRRYTGWGRLSRKLINGIRDKQSGKTILDFLKSDGFANRNFMQLIHDDSLTFKEDIQKAQVSGQGDSLHEHIANLAGSPAIKKGILQTVKVVDELVKVMGRHKPENIVIEMARENQTTQKGQKNSRERMKRIEEGIKELGSQILKEHPVENTQLQNEKLYLYYLQNGRDMYVDQELDINRLSDYDVDHIVPQSFLKDDSIDNKVLTRSDKARGKSDNVPSEEVVKKMKNYWRQLLNAKLITQRKFDNLTKAERGGLSELDKAGFIKRQLVETRQITKHVAQILDSRMNTKYDENDKLIREVKVITLKSKLVSDFRKDFQFYKVREINNYHHAHDAYLNAVVGTALIKKYPKLESEFVYGDYKVYDVRKMIAKSEQEIGKATAKYFFYSNIMNFFKTEITLANGEIRKRPLIETNGETGEIVWDKGRDFATVRKVLSMPQVNIVKKTEVQTGGFSKESILPKRNSDKLIARKKDWDPKKYGGFDSPTVAYSVLVVAKVEKGKSKKLKSVKELLGITIMERSSFEKNPIDFLEAKGYKEVKKDLIIKLPKYSLFELENGRKRMLASAGELQKGNELALPSKYVNFLYLASHYEKLKGSPEDNEQKQLFVEQHKHYLDEIIEQISEFSKRVILADANLDKVLSAYNKHRDKPIREQAENIIHLFTLTNLGAPAAFKYFDTTIDRKRYTSTKEVLDATLIHQSITGLYETRIDLSQLGGDGGPAPGGGGGTLNLEDEYRLYETSAEPEVSPGSTWLSDFPQAWAETGGMGLAVRQAPLIIPLKATSTPVSIKQYPMSQEAKLGIKPHIQRLLDQGILVPCQSPWNTPLLPVKKPGTNDYRPVQDLREVNKRVEDIHPTVPNPYNLLSGLPPSHRWYTVLDLKDAFFCLRLHPTSQPLFAFEWRDPGMGISGQLTWTRLPQGFKNSPTLFNEALHRDLADFRIQHPDLILLQYVDDILLAATSELDCQQGTRALLLTLGNLGYRASAKKAQLCQKQVKYLGYLLKEGQRWLTEARKETVMGQPTPKTPRQLREFLGTAGFCRLWIPGFAEMAAPLYPLTKPGTLFNWGPDQQKAYQEIKQALLTAPALGLPDLTKPFELFVDEKQGYAKGVLTQKLGPWRRPVAYLSKKLDPVAAGWPPCLRMVAAIAVLRKDAGKLTMGQPLVILAPHAVEALVKQPPDRWLSNARMTHYQAMLLDTDRVQFGPVVALNPATLLPLPEEGAPHDCLEILAETHGTRPDLTDQPIPDADHTWYTDGSSFLQEGQRKAGAAVTTETEVIWARALPAGTSAQRAELIALTQALKMAEGKRLNVYTDSRYAFATAHIHGEIYRRRGWLTSEGREIKNKSEILALLKALFLPKRLSIIHCLGHQKGDSAEARGNRLADQAAREAAIKTPPDTSTLLAGKRTADGSEFEKRTADGSEFESPKKKAKVE

SEQ ID NO: 1849 - protein, 2097 aa, synthetic construct
MPAAKRVKLDGGDKKYSIGLDIGTNSVGWAVITDEYKVPSKKFKVLGNTDRHSIKKNLIGALLFDSGETAEATRLKRTARRRYTRRKNRICYLQEIFSNEMAKVDDSFFHRLEESFLVEEDKKHERHPIFGNIVDEVAYHEKYPTIYHLRKKLVDSTDKADLRLIYLALAHMIKFRGHFLIEGDLNPDNSDVDKLFIQLVQTYNQLFEENPINASGVDAKAILSARLSKSRRLENLIAQLPGEKKNGLFGNLIALSLGLTPNFKSNFDLAEDAKLQLSKDTYDDDLDNLLAQIGDQYADLFLAAKNLSDAILLSDILRVNTEITKAPLSASMIKRYDEHHQDLTLLKALVRQQLPEKYKEIFFDQSKNGYAGYIDGGASQEEFYKFIKPILEKMDGTEELLVKLNREDLLRKQRTFDNGSIPHQIHLGELHAILRRQEDFYPFLKDNREKIEKILTFRIPYYVGPLARGNSRFAWMTRKSEETITPWNFEEVVDKGASAQSFIERMTNFDKNLPNEKVLPKHSLLYEYFTVYNELTKVKYVTEGMRKPAFLSGEQKKAIVDLLFKTNRKVTVKQLKEDYFKKIECFDSVEISGVEDRFNASLGTYHDLLKIIKDKDFLDNEENEDILEDIVLTLTLFEDREMIEERLKTYAHLFDDKVMKQLKRRRYTGWGRLSRKLINGIRDKQSGKTILDFLKSDGFANRNFMQLIHDDSLTFKEDIQKAQVSGQGDSLHEHIANLAGSPAIKKGILQTVKVVDELVKVMGRHKPENIVIEMARENQTTQKGQKNSRERMKRIEEGIKELGSQILKEHPVENTQLQNEKLYLYYLQNGRDMYVDQELDINRLSDYDVDHIVPQSFLKDDSIDNKVLTRSDKARGKSDNVPSEEVVKKMKNYWRQLLNAKLITQRKFDNLTKAERGGLSELDKAGFIKRQLVETRQITKHVAQILDSRMNTKYDENDKLIREVKVITLKSKLVSDFRKDFQFYKVREINNYHHAHDAYLNAVVGTALIKKYPKLESEFVYGDYKVYDVRKMIAKSEQEIGKATAKYFFYSNIMNFFKTEITLANGEIRKRPLIETNGETGEIVWDKGRDFATVRKVLSMPQVNIVKKTEVQTGGFSKESILPKRNSDKLIARKKDWDPKKYGGFDSPTVAYSVLVVAKVEKGKSKKLKSVKELLGITIMERSSFEKNPIDFLEAKGYKEVKKDLIIKLPKYSLFELENGRKRMLASAGELQKGNELALPSKYVNFLYLASHYEKLKGSPEDNEQKQLFVEQHKHYLDEIIEQISEFSKRVILADANLDKVLSAYNKHRDKPIREQAENIIHLFTLTNLGAPAAFKYFDTTIDRKRYTSTKEVLDATLIHQSITGLYETRIDLSQLGGDGGGGSGGSGGSGGSGGTLNLEDEYRLYETSAEPEVSPGSTWLSDFPQAWAETGGMGLAVRQAPLIIPLKATSTPVSIKQYPMSQEAKLGIKPHIQRLLDQGILVPCQSPWNTPLLPVKKPGTNDYRPVQDLREVNKRVEDIHPTVPNPYNLLSGLPPSHRWYTVLDLKDAFFCLRLHPTSQPLFAFEWRDPGMGISGQLTWTRLPQGFKNSPTLFNEALHRDLADFRIQHPDLILLQYVDDILLAATSELDCQQGTRALLLTLGNLGYRASAKKAQLCQKQVKYLGYLLKEGQRWLTEARKETVMGQPTPKTPRQLREFLGTAGFCRLWIPGFAEMAAPLYPLTKPGTLFNWGPDQQKAYQEIKQALLTAPALGLPDLTKPFELFVDEKQGYAKGVLTQKLGPWRRPVAYLSKKLDPVAAGWPPCLRMVAAIAVLRKDAGKLTMGQPLVILAPHAVEALVKQPPDRWLSNARMTHYQAMLLDTDRVQFGPVVALNPATLLPLPEEGAPHDCLEILAETHGTRPDLTDQPIPDADHTWYTDGSSFLQEGQRKAGAAVTTETEVIWARALPAGTSAQRAELIALTQALKMAEGKRLNVYTDSRYAFATAHIHGEIYRRRGWLTSEGREIKNKSEILALLKALFLPKRLSIIHCLGHQKGDSAEARGNRLADQAAREAAIKTPPDTSTLLAGKRTADGSEFEKRTADGSEFESPKKKAKVE

SEQ ID NO: 1850 - protein, 2096 aa, synthetic construct
MPAAKRVKLDGGDKKYSIGLDIGTNSVGWAVITDEYKVPSKKFKVLGNTDRHSIKKNLIGALLFDSGETAEATRLKRTARRRYTRRKNRICYLQEIFSNEMAKVDDSFFHRLEESFLVEEDKKHERHPIFGNIVDEVAYHEKYPTIYHLRKKLVDSTDKADLRLIYLALAHMIKFRGHFLIEGDLNPDNSDVDKLFIQLVQTYNQLFEENPINASGVDAKAILSARLSKSRRLENLIAQLPGEKKNGLFGNLIALSLGLTPNFKSNFDLAEDAKLQLSKDTYDDDLDNLLAQIGDQYADLFLAAKNLSDAILLSDILRVNTEITKAPLSASMIKRYDEHHQDLTLLKALVRQQLPEKYKEIFFDQSKNGYAGYIDGGASQEEFYKFIKPILEKMDGTEELLVKLNREDLLRKQRTFDNGSIPHQIHLGELHAILRRQEDFYPFLKDNREKIEKILTFRIPYYVGPLARGNSRFAWMTRKSEETITPWNFEEVVDKGASAQSFIERMTNFDKNLPNEKVLPKHSLLYEYFTVYNELTKVKYVTEGMRKPAFLSGEQKKAIVDLLFKTNRKVTVKQLKEDYFKKIECFDSVEISGVEDRFNASLGTYHDLLKIIKDKDFLDNEENEDILEDIVLTLTLFEDREMIEERLKTYAHLFDDKVMKQLKRRRYTGWGRLSRKLINGIRDKQSGKTILDFLKSDGFANRNFMQLIHDDSLTFKEDIQKAQVSGQGDSLHEHIANLAGSPAIKKGILQTVKVVDELVKVMGRHKPENIVIEMARENQTTQKGQKNSRERMKRIEEGIKELGSQILKEHPVENTQLQNEKLYLYYLQNGRDMYVDQELDINRLSDYDVDHIVPQSFLKDDSIDNKVLTRSDKARGKSDNVPSEEVVKKMKNYWRQLLNAKLITQRKFDNLTKAERGGLSELDKAGFIKRQLVETRQITKHVAQILDSRMNTKYDENDKLIREVKVITLKSKLVSDFRKDFQFYKVREINNYHHAHDAYLNAVVGTALIKKYPKLESEFVYGDYKVYDVRKMIAKSEQEIGKATAKYFFYSNIMNFFKTEITLANGEIRKRPLIETNGETGEIVWDKGRDFATVRKVLSMPQVNIVKKTEVQTGGFSKESILPKRNSDKLIARKKDWDPKKYGGFDSPTVAYSVLVVAKVEKGKSKKLKSVKELLGITIMERSSFEKNPIDFLEAKGYKEVKKDLIIKLPKYSLFELENGRKRMLASAGELQKGNELALPSKYVNFLYLASHYEKLKGSPEDNEQKQLFVEQHKHYLDEIIEQISEFSKRVILADANLDKVLSAYNKHRDKPIREQAENIIHLFTLTNLGAPAAFKYFDTTIDRKRYTSTKEVLDATLIHQSITGLYETRIDLSQLGGDGGGSSEAAAKGGGGGTLNLEDEYRLYETSAEPEVSPGSTWLSDFPQAWAETGGMGLAVRQAPLIIPLKATSTPVSIKQYPMSQEAKLGIKPHIQRLLDQGILVPCQSPWNTPLLPVKKPGTNDYRPVQDLREVNKRVEDIHPTVPNPYNLLSGLPPSHRWYTVLDLKDAFFCLRLHPTSQPLFAFEWRDPGMGISGQLTWTRLPQGFKNSPTLFNEALHRDLADFRIQHPDLILLQYVDDILLAATSELDCQQGTRALLLTLGNLGYRASAKKAQLCQKQVKYLGYLLKEGQRWLTEARKETVMGQPTPKTPRQLREFLGTAGFCRLWIPGFAEMAAPLYPLTKPGTLFNWGPDQQKAYQEIKQALLTAPALGLPDLTKPFELFVDEKQGYAKGVLTQKLGPWRRPVAYLSKKLDPVAAGWPPCLRMVAAIAVLRKDAGKLTMGQPLVILAPHAVEALVKQPPDRWLSNARMTHYQAMLLDTDRVQFGPVVALNPATLLPLPEEGAPHDCLEILAETHGTRPDLTDQPIPDADHTWYTDGSSFLQEGQRKAGAAVTTETEVIWARALPAGTSAQRAELIALTQALKMAEGKRLNVYTDSRYAFATAHIHGEIYRRRGWLTSEGREIKNKSEILALLKALFLPKRLSIIHCLGHQKGDSAEARGNRLADQAAREAAIKTPPDTSTLLAGKRTADGSEFEKRTADGSEFESPKKKAKVE

SEQ ID NO: 1851 - protein, 2096 aa, synthetic construct
MPAAKRVKLDGGDKKYSIGLDIGTNSVGWAVITDEYKVPSKKFKVLGNTDRHSIKKNLIGALLFDSGETAEATRLKRTARRRYTRRKNRICYLQEIFSNEMAKVDDSFFHRLEESFLVEEDKKHERHPIFGNIVDEVAYHEKYPTIYHLRKKLVDSTDKADLRLIYLALAHMIKFRGHFLIEGDLNPDNSDVDKLFIQLVQTYNQLFEENPINASGVDAKAILSARLSKSRRLENLIAQLPGEKKNGLFGNLIALSLGLTPNFKSNFDLAEDAKLQLSKDTYDDDLDNLLAQIGDQYADLFLAAKNLSDAILLSDILRVNTEITKAPLSASMIKRYDEHHQDLTLLKALVRQQLPEKYKEIFFDQSKNGYAGYIDGGASQEEFYKFIKPILEKMDGTEELLVKLNREDLLRKQRTFDNGSIPHQIHLGELHAILRRQEDFYPFLKDNREKIEKILTFRIPYYVGPLARGNSRFAWMTRKSEETITPWNFEEVVDKGASAQSFIERMTNFDKNLPNEKVLPKHSLLYEYFTVYNELTKVKYVTEGMRKPAFLSGEQKKAIVDLLFKTNRKVTVKQLKEDYFKKIECFDSVEISGVEDRFNASLGTYHDLLKIIKDKDFLDNEENEDILEDIVLTLTLFEDREMIEERLKTYAHLFDDKVMKQLKRRRYTGWGRLSRKLINGIRDKQSGKTILDFLKSDGFANRNFMQLIHDDSLTFKEDIQKAQVSGQGDSLHEHIANLAGSPAIKKGILQTVKVVDELVKVMGRHKPENIVIEMARENQTTQKGQKNSRERMKRIEEGIKELGSQILKEHPVENTQLQNEKLYLYYLQNGRDMYVDQELDINRLSDYDVDHIVPQSFLKDDSIDNKVLTRSDKARGKSDNVPSEEVVKKMKNYWRQLLNAKLITQRKFDNLTKAERGGLSELDKAGFIKRQLVETRQITKHVAQILDSRMNTKYDENDKLIREVKVITLKSKLVSDFRKDFQFYKVREINNYHHAHDAYLNAVVGTALIKKYPKLESEFVYGDYKVYDVRKMIAKSEQEIGKATAKYFFYSNIMNFFKTEITLANGEIRKRPLIETNGETGEIVWDKGRDFATVRKVLSMPQVNIVKKTEVQTGGFSKESILPKRNSDKLIARKKDWDPKKYGGFDSPTVAYSVLVVAKVEKGKSKKLKSVKELLGITIMERSSFEKNPIDFLEAKGYKEVKKDLIIKLPKYSLFELENGRKRMLASAGELQKGNELALPSKYVNFLYLASHYEKLKGSPEDNEQKQLFVEQHKHYLDEIIEQISEFSKRVILADANLDKVLSAYNKHRDKPIREQAENIIHLFTLTNLGAPAAFKYFDTTIDRKRYTSTKEVLDATLIHQSITGLYETRIDLSQLGGDGGEAAAKPAPGGSGGTLNLEDEYRLYETSAEPEVSPGSTWLSDFPQAWAETGGMGLAVRQAPLIIPLKATSTPVSIKQYPMSQEAKLGIKPHIQRLLDQGILVPCQSPWNTPLLPVKKPGTNDYRPVQDLREVNKRVEDIHPTVPNPYNLLSGLPPSHRWYTVLDLKDAFFCLRLHPTSQPLFAFEWRDPGMGISGQLTWTRLPQGFKNSPTLFNEALHRDLADFRIQHPDLILLQYVDDILLAATSELDCQQGTRALLLTLGNLGYRASAKKAQLCQKQVKYLGYLLKEGQRWLTEARKETVMGQPTPKTPRQLREFLGTAGFCRLWIPGFAEMAAPLYPLTKPGTLFNWGPDQQKAYQEIKQALLTAPALGLPDLTKPFELFVDEKQGYAKGVLTQKLGPWRRPVAYLSKKLDPVAAGWPPCLRMVAAIAVLRKDAGKLTMGQPLVILAPHAVEALVKQPPDRWLSNARMTHYQAMLLDTDRVQFGPVVALNPATLLPLPEEGAPHDCLEILAETHGTRPDLTDQPIPDADHTWYTDGSSFLQEGQRKAGAAVTTETEVIWARALPAGTSAQRAELIALTQALKMAEGKRLNVYTDSRYAFATAHIHGEIYRRRGWLTSEGREIKNKSEILALLKALFLPKRLSIIHCLGHQKGDSAEARGNRLADQAAREAAIKTPPDTSTLLAGKRTADGSEFEKRTADGSEFESPKKKAKVE

SEQ ID NO: 1852 - protein, 2094 aa, synthetic construct
MPAAKRVKLDGGDKKYSIGLDIGTNSVGWAVITDEYKVPSKKFKVLGNTDRHSIKKNLIGALLFDSGETAEATRLKRTARRRYTRRKNRICYLQEIFSNEMAKVDDSFFHRLEESFLVEEDKKHERHPIFGNIVDEVAYHEKYPTIYHLRKKLVDSTDKADLRLIYLALAHMIKFRGHFLIEGDLNPDNSDVDKLFIQLVQTYNQLFEENPINASGVDAKAILSARLSKSRRLENLIAQLPGEKKNGLFGNLIALSLGLTPNFKSNFDLAEDAKLQLSKDTYDDDLDNLLAQIGDQYADLFLAAKNLSDAILLSDILRVNTEITKAPLSASMIKRYDEHHQDLTLLKALVRQQLPEKYKEIFFDQSKNGYAGYIDGGASQEEFYKFIKPILEKMDGTEELLVKLNREDLLRKQRTFDNGSIPHQIHLGELHAILRRQEDFYPFLKDNREKIEKILTFRIPYYVGPLARGNSRFAWMTRKSEETITPWNFEEVVDKGASAQSFIERMTNFDKNLPNEKVLPKHSLLYEYFTVYNELTKVKYVTEGMRKPAFLSGEQKKAIVDLLFKTNRKVTVKQLKEDYFKKIECFDSVEISGVEDRFNASLGTYHDLLKIIKDKDFLDNEENEDILEDIVLTLTLFEDREMIEERLKTYAHLFDDKVMKQLKRRRYTGWGRLSRKLINGIRDKQSGKTILDFLKSDGFANRNFMQLIHDDSLTFKEDIQKAQVSGQGDSLHEHIANLAGSPAIKKGILQTVKVVDELVKVMGRHKPENIVIEMARENQTTQKGQKNSRERMKRIEEGIKELGSQILKEHPVENTQLQNEKLYLYYLQNGRDMYVDQELDINRLSDYDVDHIVPQSFLKDDSIDNKVLTRSDKARGKSDNVPSEEVVKKMKNYWRQLLNAKLITQRKFDNLTKAERGGLSELDKAGFIKRQLVETRQITKHVAQILDSRMNTKYDENDKLIREVKVITLKSKLVSDFRKDFQFYKVREINNYHHAHDAYLNAVVGTALIKKYPKLESEFVYGDYKVYDVRKMIAKSEQEIGKATAKYFFYSNIMNFFKTEITLANGEIRKRPLIETNGETGEIVWDKGRDFATVRKVLSMPQVNIVKKTEVQTGGFSKESILPKRNSDKLIARKKDWDPKKYGGFDSPTVAYSVLVVAKVEKGKSKKLKSVKELLGITIMERSSFEKNPIDFLEAKGYKEVKKDLIIKLPKYSLFELENGRKRMLASAGELQKGNELALPSKYVNFLYLASHYEKLKGSPEDNEQKQLFVEQHKHYLDEIIEQISEFSKRVILADANLDKVLSAYNKHRDKPIREQAENIIHLFTLTNLGAPAAFKYFDTTIDRKRYTSTKEVLDATLIHQSITGLYETRIDLSQLGGDGGPAPAPAPAPGGTLNLEDEYRLYETSAEPEVSPGSTWLSDFPQAWAETGGMGLAVRQAPLIIPLKATSTPVSIKQYPMSQEAKLGIKPHIQRLLDQGILVPCQSPWNTPLLPVKKPGTNDYRPVQDLREVNKRVEDIHPTVPNPYNLLSGLPPSHRWYTVLDLKDAFFCLRLHPTSQPLFAFEWRDPGMGISGQLTWTRLPQGFKNSPTLFNEALHRDLADFRIQHPDLILLQYVDDILLAATSELDCQQGTRALLLTLGNLGYRASAKKAQLCQKQVKYLGYLLKEGQRWLTEARKETVMGQPTPKTPRQLREFLGTAGFCRLWIPGFAEMAAPLYPLTKPGTLFNWGPDQQKAYQEIKQALLTAPALGLPDLTKPFELFVDEKQGYAKGVLTQKLGPWRRPVAYLSKKLDPVAAGWPPCLRMVAAIAVLRKDAGKLTMGQPLVILAPHAVEALVKQPPDRWLSNARMTHYQAMLLDTDRVQFGPVVALNPATLLPLPEEGAPHDCLEILAETHGTRPDLTDQPIPDADHTWYTDGSSFLQEGQRKAGAAVTTETEVIWARALPAGTSAQRAELIALTQALKMAEGKRLNVYTDSRYAFATAHIHGEIYRRRGWLTSEGREIKNKSEILALLKALFLPKRLSIIHCLGHQKGDSAEARGNRLADQAAREAAIKTPPDTSTLLAGKRTADGSEFEKRTADGSEFESPKKKAKVE

SEQ ID NO: 1853 - protein, 2091 aa, synthetic construct
MPAAKRVKLDGGDKKYSIGLDIGTNSVGWAVITDEYKVPSKKFKVLGNTDRHSIKKNLIGALLFDSGETAEATRLKRTARRRYTRRKNRICYLQEIFSNEMAKVDDSFFHRLEESFLVEEDKKHERHPIFGNIVDEVAYHEKYPTIYHLRKKLVDSTDKADLRLIYLALAHMIKFRGHFLIEGDLNPDNSDVDKLFIQLVQTYNQLFEENPINASGVDAKAILSARLSKSRRLENLIAQLPGEKKNGLFGNLIALSLGLTPNFKSNFDLAEDAKLQLSKDTYDDDLDNLLAQIGDQYADLFLAAKNLSDAILLSDILRVNTEITKAPLSASMIKRYDEHHQDLTLLKALVRQQLPEKYKEIFFDQSKNGYAGYIDGGASQEEFYKFIKPILEKMDGTEELLVKLNREDLLRKQRTFDNGSIPHQIHLGELHAILRRQEDFYPFLKDNREKIEKILTFRIPYYVGPLARGNSRFAWMTRKSEETITPWNFEEVVDKGASAQSFIERMTNFDKNLPNEKVLPKHSLLYEYFTVYNELTKVKYVTEGMRKPAFLSGEQKKAIVDLLFKTNRKVTVKQLKEDYFKKIECFDSVEISGVEDRFNASLGTYHDLLKIIKDKDFLDNEENEDILEDIVLTLTLFEDREMIEERLKTYAHLFDDKVMKQLKRRRYTGWGRLSRKLINGIRDKQSGKTILDFLKSDGFANRNFMQLIHDDSLTFKEDIQKAQVSGQGDSLHEHIANLAGSPAIKKGILQTVKVVDELVKVMGRHKPENIVIEMARENQTTQKGQKNSRERMKRIEEGIKELGSQILKEHPVENTQLQNEKLYLYYLQNGRDMYVDQELDINRLSDYDVDHIVPQSFLKDDSIDNKVLTRSDKARGKSDNVPSEEVVKKMKNYWRQLLNAKLITQRKFDNLTKAERGGLSELDKAGFIKRQLVETRQITKHVAQILDSRMNTKYDENDKLIREVKVITLKSKLVSDFRKDFQFYKVREINNYHHAHDAYLNAVVGTALIKKYPKLESEFVYGDYKVYDVRKMIAKSEQEIGKATAKYFFYSNIMNFFKTEITLANGEIRKRPLIETNGETGEIVWDKGRDFATVRKVLSMPQVNIVKKTEVQTGGFSKESILPKRNSDKLIARKKDWDPKKYGGFDSPTVAYSVLVVAKVEKGKSKKLKSVKELLGITIMERSSFEKNPIDFLEAKGYKEVKKDLIIKLPKYSLFELENGRKRMLASAGELQKGNELALPSKYVNFLYLASHYEKLKGSPEDNEQKQLFVEQHKHYLDEIIEQISEFSKRVILADANLDKVLSAYNKHRDKPIREQAENIIHLFTLTNLGAPAAFKYFDTTIDRKRYTSTKEVLDATLIHQSITGLYETRIDLSQLGGDGGGGGGSSGGTLNLEDEYRLYETSAEPEVSPGSTWLSDFPQAWAETGGMGLAVRQAPLIIPLKATSTPVSIKQYPMSQEAKLGIKPHIQRLLDQGILVPCQSPWNTPLLPVKKPGTNDYRPVQDLREVNKRVEDIHPTVPNPYNLLSGLPPSHRWYTVLDLKDAFFCLRLHPTSQPLFAFEWRDPGMGISGQLTWTRLPQGFKNSPTLFNEALHRDLADFRIQHPDLILLQYVDDILLAATSELDCQQGTRALLLTLGNLGYRASAKKAQLCQKQVKYLGYLLKEGQRWLTEARKETVMGQPTPKTPRQLREFLGTAGFCRLWIPGFAEMAAPLYPLTKPGTLFNWGPDQQKAYQEIKQALLTAPALGLPDLTKPFELFVDEKQGYAKGVLTQKLGPWRRPVAYLSKKLDPVAAGWPPCLRMVAAIAVLRKDAGKLTMGQPLVILAPHAVEALVKQPPDRWLSNARMTHYQAMLLDTDRVQFGPVVALNPATLLPLPEEGAPHDCLEILAETHGTRPDLTDQPIPDADHTWYTDGSSFLQEGQRKAGAAVTTETEVIWARALPAGTSAQRAELIALTQALKMAEGKRLNVYTDSRYAFATAHIHGEIYRRRGWLTSEGREIKNKSEILALLKALFLPKRLSIIHCLGHQKGDSAEARGNRLADQAAREAAIKTPPDTSTLLAGKRTADGSEFEKRTADGSEFESPKKKAKVE

SEQ ID NO: 1854 - protein, 2091 aa, synthetic construct
MPAAKRVKLDGGDKKYSIGLDIGTNSVGWAVITDEYKVPSKKFKVLGNTDRHSIKKNLIGALLFDSGETAEATRLKRTARRRYTRRKNRICYLQEIFSNEMAKVDDSFFHRLEESFLVEEDKKHERHPIFGNIVDEVAYHEKYPTIYHLRKKLVDSTDKADLRLIYLALAHMIKFRGHFLIEGDLNPDNSDVDKLFIQLVQTYNQLFEENPINASGVDAKAILSARLSKSRRLENLIAQLPGEKKNGLFGNLIALSLGLTPNFKSNFDLAEDAKLQLSKDTYDDDLDNLLAQIGDQYADLFLAAKNLSDAILLSDILRVNTEITKAPLSASMIKRYDEHHQDLTLLKALVRQQLPEKYKEIFFDQSKNGYAGYIDGGASQEEFYKFIKPILEKMDGTEELLVKLNREDLLRKQRTFDNGSIPHQIHLGELHAILRRQEDFYPFLKDNREKIEKILTFRIPYYVGPLARGNSRFAWMTRKSEETITPWNFEEVVDKGASAQSFIERMTNFDKNLPNEKVLPKHSLLYEYFTVYNELTKVKYVTEGMRKPAFLSGEQKKAIVDLLFKTNRKVTVKQLKEDYFKKIECFDSVEISGVEDRFNASLGTYHDLLKIIKDKDFLDNEENEDILEDIVLTLTLFEDREMIEERLKTYAHLFDDKVMKQLKRRRYTGWGRLSRKLINGIRDKQSGKTILDFLKSDGFANRNFMQLIHDDSLTFKEDIQKAQVSGQGDSLHEHIANLAGSPAIKKGILQTVKVVDELVKVMGRHKPENIVIEMARENQTTQKGQKNSRERMKRIEEGIKELGSQILKEHPVENTQLQNEKLYLYYLQNGRDMYVDQELDINRLSDYDVDHIVPQSFLKDDSIDNKVLTRSDKARGKSDNVPSEEVVKKMKNYWRQLLNAKLITQRKFDNLTKAERGGLSELDKAGFIKRQLVETRQITKHVAQILDSRMNTKYDENDKLIREVKVITLKSKLVSDFRKDFQFYKVREINNYHHAHDAYLNAVVGTALIKKYPKLESEFVYGDYKVYDVRKMIAKSEQEIGKATAKYFFYSNIMNFFKTEITLANGEIRKRPLIETNGETGEIVWDKGRDFATVRKVLSMPQVNIVKKTEVQTGGFSKESILPKRNSDKLIARKKDWDPKKYGGFDSPTVAYSVLVVAKVEKGKSKKLKSVKELLGITIMERSSFEKNPIDFLEAKGYKEVKKDLIIKLPKYSLFELENGRKRMLASAGELQKGNELALPSKYVNFLYLASHYEKLKGSPEDNEQKQLFVEQHKHYLDEIIEQISEFSKRVILADANLDKVLSAYNKHRDKPIREQAENIIHLFTLTNLGAPAAFKYFDTTIDRKRYTSTKEVLDATLIHQSITGLYETRIDLSQLGGDGGGGGPAPGGTLNLEDEYRLYETSAEPEVSPGSTWLSDFPQAWAETGGMGLAVRQAPLIIPLKATSTPVSIKQYPMSQEAKLGIKPHIQRLLDQGILVPCQSPWNTPLLPVKKPGTNDYRPVQDLREVNKRVEDIHPTVPNPYNLLSGLPPSHRWYTVLDLKDAFFCLRLHPTSQPLFAFEWRDPGMGISGQLTWTRLPQGFKNSPTLFNEALHRDLADFRIQHPDLILLQYVDDILLAATSELDCQQGTRALLLTLGNLGYRASAKKAQLCQKQVKYLGYLLKEGQRWLTEARKETVMGQPTPKTPRQLREFLGTAGFCRLWIPGFAEMAAPLYPLTKPGTLFNWGPDQQKAYQEIKQALLTAPALGLPDLTKPFELFVDEKQGYAKGVLTQKLGPWRRPVAYLSKKLDPVAAGWPPCLRMVAAIAVLRKDAGKLTMGQPLVILAPHAVEALVKQPPDRWLSNARMTHYQAMLLDTDRVQFGPVVALNPATLLPLPEEGAPHDCLEILAETHGTRPDLTDQPIPDADHTWYTDGSSFLQEGQRKAGAAVTTETEVIWARALPAGTSAQRAELIALTQALKMAEGKRLNVYTDSRYAFATAHIHGEIYRRRGWLTSEGREIKNKSEILALLKALFLPKRLSIIHCLGHQKGDSAEARGNRLADQAAREAAIKTPPDTSTLLAGKRTADGSEFEKRTADGSEFESPKKKAKVE

SEQ ID NO: 1855 - protein, 2090 aa, synthetic construct
MPAAKRVKLDGGDKKYSIGLDIGTNSVGWAVITDEYKVPSKKFKVLGNTDRHSIKKNLIGALLFDSGETAEATRLKRTARRRYTRRKNRICYLQEIFSNEMAKVDDSFFHRLEESFLVEEDKKHERHPIFGNIVDEVAYHEKYPTIYHLRKKLVDSTDKADLRLIYLALAHMIKFRGHFLIEGDLNPDNSDVDKLFIQLVQTYNQLFEENPINASGVDAKAILSARLSKSRRLENLIAQLPGEKKNGLFGNLIALSLGLTPNFKSNFDLAEDAKLQLSKDTYDDDLDNLLAQIGDQYADLFLAAKNLSDAILLSDILRVNTEITKAPLSASMIKRYDEHHQDLTLLKALVRQQLPEKYKEIFFDQSKNGYAGYIDGGASQEEFYKFIKPILEKMDGTEELLVKLNREDLLRKQRTFDNGSIPHQIHLGELHAILRRQEDFYPFLKDNREKIEKILTFRIPYYVGPLARGNSRFAWMTRKSEETITPWNFEEVVDKGASAQSFIERMTNFDKNLPNEKVLPKHSLLYEYFTVYNELTKVKYVTEGMRKPAFLSGEQKKAIVDLLFKTNRKVTVKQLKEDYFKKIECFDSVEISGVEDRFNASLGTYHDLLKIIKDKDFLDNEENEDILEDIVLTLTLFEDREMIEERLKTYAHLFDDKVMKQLKRRRYTGWGRLSRKLINGIRDKQSGKTILDFLKSDGFANRNFMQLIHDDSLTFKEDIQKAQVSGQGDSLHEHIANLAGSPAIKKGILQTVKVVDELVKVMGRHKPENIVIEMARENQTTQKGQKNSRERMKRIEEGIKELGSQILKEHPVENTQLQNEKLYLYYLQNGRDMYVDQELDINRLSDYDVDHIVPQSFLKDDSIDNKVLTRSDKARGKSDNVPSEEVVKKMKNYWRQLLNAKLITQRKFDNLTKAERGGLSELDKAGFIKRQLVETRQITKHVAQILDSRMNTKYDENDKLIREVKVITLKSKLVSDFRKDFQFYKVREINNYHHAHDAYLNAVVGTALIKKYPKLESEFVYGDYKVYDVRKMIAKSEQEIGKATAKYFFYSNIMNFFKTEITLANGEIRKRPLIETNGETGEIVWDKGRDFATVRKVLSMPQVNIVKKTEVQTGGFSKESILPKRNSDKLIARKKDWDPKKYGGFDSPTVAYSVLVVAKVEKGKSKKLKSVKELLGITIMERSSFEKNPIDFLEAKGYKEVKKDLIIKLPKYSLFELENGRKRMLASAGELQKGNELALPSKYVNFLYLASHYEKLKGSPEDNEQKQLFVEQHKHYLDEIIEQISEFSKRVILADANLDKVLSAYNKHRDKPIREQAENIIHLFTLTNLGAPAAFKYFDTTIDRKRYTSTKEVLDATLIHQSITGLYETRIDLSQLGGDGGPAPAPGGTLNLEDEYRLYETSAEPEVSPGSTWLSDFPQAWAETGGMGLAVRQAPLIIPLKATSTPVSIKQYPMSQEAKLGIKPHIQRLLDQGILVPCQSPWNTPLLPVKKPGTNDYRPVQDLREVNKRVEDIHPTVPNPYNLLSGLPPSHRWYTVLDLKDAFFCLRLHPTSQPLFAFEWRDPGMGISGQLTWTRLPQGFKNSPTLFNEALHRDLADFRIQHPDLILLQYVDDILLAATSELDCQQGTRALLLTLGNLGYRASAKKAQLCQKQVKYLGYLLKEGQRWLTEARKETVMGQPTPKTPRQLREFLGTAGFCRLWIPGFAEMAAPLYPLTKPGTLFNWGPDQQKAYQEIKQALLTAPALGLPDLTKPFELFVDEKQGYAKGVLTQKLGPWRRPVAYLSKKLDPVAAGWPPCLRMVAAIAVLRKDAGKLTMGQPLVILAPHAVEALVKQPPDRWLSNARMTHYQAMLLDTDRVQFGPVVALNPATLLPLPEEGAPHDCLEILAETHGTRPDLTDQPIPDADHTWYTDGSSFLQEGQRKAGAAVTTETEVIWARALPAGTSAQRAELIALTQALKMAEGKRLNVYTDSRYAFATAHIHGEIYRRRGWLTSEGREIKNKSEILALLKALFLPKRLSIIHCLGHQKGDSAEARGNRLADQAAREAAIKTPPDTSTLLAGKRTADGSEFEKRTADGSEFESPKKKAKVE

SEQ ID NO: 1856 - protein, 2096 aa, synthetic construct
MPAAKRVKLDGGDKKYSIGLDIGTNSVGWAVITDEYKVPSKKFKVLGNTDRHSIKKNLIGALLFDSGETAEATRLKRTARRRYTRRKNRICYLQEIFSNEMAKVDDSFFHRLEESFLVEEDKKHERHPIFGNIVDEVAYHEKYPTIYHLRKKLVDSTDKADLRLIYLALAHMIKFRGHFLIEGDLNPDNSDVDKLFIQLVQTYNQLFEENPINASGVDAKAILSARLSKSRRLENLIAQLPGEKKNGLFGNLIALSLGLTPNFKSNFDLAEDAKLQLSKDTYDDDLDNLLAQIGDQYADLFLAAKNLSDAILLSDILRVNTEITKAPLSASMIKRYDEHHQDLTLLKALVRQQLPEKYKEIFFDQSKNGYAGYIDGGASQEEFYKFIKPILEKMDGTEELLVKLNREDLLRKQRTFDNGSIPHQIHLGELHAILRRQEDFYPFLKDNREKIEKILTFRIPYYVGPLARGNSRFAWMTRKSEETITPWNFEEVVDKGASAQSFIERMTNFDKNLPNEKVLPKHSLLYEYFTVYNELTKVKYVTEGMRKPAFLSGEQKKAIVDLLFKTNRKVTVKQLKEDYFKKIECFDSVEISGVEDRFNASLGTYHDLLKIIKDKDFLDNEENEDILEDIVLTLTLFEDREMIEERLKTYAHLFDDKVMKQLKRRRYTGWGRLSRKLINGIRDKQSGKTILDFLKSDGFANRNFMQLIHDDSLTFKEDIQKAQVSGQGDSLHEHIANLAGSPAIKKGILQTVKVVDELVKVMGRHKPENIVIEMARENQTTQKGQKNSRERMKRIEEGIKELGSQILKEHPVENTQLQNEKLYLYYLQNGRDMYVDQELDINRLSDYDVDHIVPQSFLKDDSIDNKVLTRSDKARGKSDNVPSEEVVKKMKNYWRQLLNAKLITQRKFDNLTKAERGGLSELDKAGFIKRQLVETRQITKHVAQILDSRMNTKYDENDKLIREVKVITLKSKLVSDFRKDFQFYKVREINNYHHAHDAYLNAVVGTALIKKYPKLESEFVYGDYKVYDVRKMIAKSEQEIGKATAKYFFYSNIMNFFKTEITLANGEIRKRPLIETNGETGEIVWDKGRDFATVRKVLSMPQVNIVKKTEVQTGGFSKESILPKRNSDKLIARKKDWDPKKYGGFDSPTVAYSVLVVAKVEKGKSKKLKSVKELLGITIMERSSFEKNPIDFLEAKGYKEVKKDLIIKLPKYSLFELENGRKRMLASAGELQKGNELALPSKYVNFLYLASHYEKLKGSPEDNEQKQLFVEQHKHYLDEIIEQISEFSKRVILADANLDKVLSAYNKHRDKPIREQAENIIHLFTLTNLGAPAAFKYFDTTIDRKRYTSTKEVLDATLIHQSITGLYETRIDLSQLGGDGGPAPGGGEAAAKGGTLNLEDEYRLYETSAEPEVSPGSTWLSDFPQAWAETGGMGLAVRQAPLIIPLKATSTPVSIKQYPMSQEAKLGIKPHIQRLLDQGILVPCQSPWNTPLLPVKKPGTNDYRPVQDLREVNKRVEDIHPTVPNPYNLLSGLPPSHRWYTVLDLKDAFFCLRLHPTSQPLFAFEWRDPGMGISGQLTWTRLPQGFKNSPTLFNEALHRDLADFRIQHPDLILLQYVDDILLAATSELDCQQGTRALLLTLGNLGYRASAKKAQLCQKQVKYLGYLLKEGQRWLTEARKETVMGQPTPKTPRQLREFLGKAGFCRLFIPGFAEMAAPLYPLTKPGTLFNWGPDQQKAYQEIKQALLTAPALGLPDLTKPFELFVDEKQGYAKGVLTQKLGPWRRPVAYLSKKLDPVAAGWPPCLRMVAAIAVLRKDAGKLTMGQPLVILAPHAVEALVKQPPDRWLSNARMTHYQAMLLDTDRVQFGPVVALNPATLLPLPEEGAPHDCLEILAETHGTRPDLTDQPIPDADHTWYTDGSSFLQEGQRKAGAAVTTETEVIWARALPAGTSAQRAELIALTQALKMAEGKRLNVYTDSRYAFATAHIHGEIYRRRGWLTSEGREIKNKSEILALLKALFLPKRLSIIHCLGHQKGDSAEARGNRLADQAAREAAIKTPPDTSTLLAGKRTADGSEFEKRTADGSEFESPKKKAKVE

SEQ ID NO: 1857 - protein, 2094 aa, synthetic construct
MPAAKRVKLDGGDKKYSIGLDIGTNSVGWAVITDEYKVPSKKFKVLGNTDRHSIKKNLIGALLFDSGETAEATRLKRTARRRYTRRKNRICYLQEIFSNEMAKVDDSFFHRLEESFLVEEDKKHERHPIFGNIVDEVAYHEKYPTIYHLRKKLVDSTDKADLRLIYLALAHMIKFRGHFLIEGDLNPDNSDVDKLFIQLVQTYNQLFEENPINASGVDAKAILSARLSKSRRLENLIAQLPGEKKNGLFGNLIALSLGLTPNFKSNFDLAEDAKLQLSKDTYDDDLDNLLAQIGDQYADLFLAAKNLSDAILLSDILRVNTEITKAPLSASMIKRYDEHHQDLTLLKALVRQQLPEKYKEIFFDQSKNGYAGYIDGGASQEEFYKFIKPILEKMDGTEELLVKLNREDLLRKQRTFDNGSIPHQIHLGELHAILRRQEDFYPFLKDNREKIEKILTFRIPYYVGPLARGNSRFAWMTRKSEETITPWNFEEVVDKGASAQSFIERMTNFDKNLPNEKVLPKHSLLYEYFTVYNELTKVKYVTEGMRKPAFLSGEQKKAIVDLLFKTNRKVTVKQLKEDYFKKIECFDSVEISGVEDRFNASLGTYHDLLKIIKDKDFLDNEENEDILEDIVLTLTLFEDREMIEERLKTYAHLFDDKVMKQLKRRRYTGWGRLSRKLINGIRDKQSGKTILDFLKSDGFANRNFMQLIHDDSLTFKEDIQKAQVSGQGDSLHEHIANLAGSPAIKKGILQTVKVVDELVKVMGRHKPENIVIEMARENQTTQKGQKNSRERMKRIEEGIKELGSQILKEHPVENTQLQNEKLYLYYLQNGRDMYVDQELDINRLSDYDVDHIVPQSFLKDDSIDNKVLTRSDKARGKSDNVPSEEVVKKMKNYWRQLLNAKLITQRKFDNLTKAERGGLSELDKAGFIKRQLVETRQITKHVAQILDSRMNTKYDENDKLIREVKVITLKSKLVSDFRKDFQFYKVREINNYHHAHDAYLNAVVGTALIKKYPKLESEFVYGDYKVYDVRKMIAKSEQEIGKATAKYFFYSNIMNFFKTEITLANGEIRKRPLIETNGETGEIVWDKGRDFATVRKVLSMPQVNIVKKTEVQTGGFSKESILPKRNSDKLIARKKDWDPKKYGGFDSPTVAYSVLVVAKVEKGKSKKLKSVKELLGITIMERSSFEKNPIDFLEAKGYKEVKKDLIIKLPKYSLFELENGRKRMLASAGELQKGNELALPSKYVNFLYLASHYEKLKGSPEDNEQKQLFVEQHKHYLDEIIEQISEFSKRVILADANLDKVLSAYNKHRDKPIREQAENIIHLFTLTNLGAPAAFKYFDTTIDRKRYTSTKEVLDATLIHQSITGLYETRIDLSQLGGDGGGGGPAPGSSGGTLNLEDEYRLYETSAEPEVSPGSTWLSDFPQAWAETGGMGLAVRQAPLIIPLKATSTPVSIKQYPMSQEAKLGIKPHIQRLLDQGILVPCQSPWNTPLLPVKKPGTNDYRPVQDLREVNKRVEDIHPTVPNPYNLLSGLPPSHRWYTVLDLKDAFFCLRLHPTSQPLFAFEWRDPGMGISGQLTWTRLPQGFKNSPTLFNEALHRDLADFRIQHPDLILLQYVDDILLAATSELDCQQGTRALLLTLGNLGYRASAKKAQLCQKQVKYLGYLLKEGQRWLTEARKETVMGQPTPKTPRQLREFLGKAGFCRLFIPGFAEMAAPLYPLTKPGTLFNWGPDQQKAYQEIKQALLTAPALGLPDLTKPFELFVDEKQGYAKGVLTQKLGPWRRPVAYLSKKLDPVAAGWPPCLRMVAAIAVLRKDAGKLTMGQPLVILAPHAVEALVKQPPDRWLSNARMTHYQAMLLDTDRVQFGPVVALNPATLLPLPEEGAPHDCLEILAETHGTRPDLTDQPIPDADHTWYTDGSSFLQEGQRKAGAAVTTETEVIWARALPAGTSAQRAELIALTQALKMAEGKRLNVYTDSRYAFATAHIHGEIYRRRGWLTSEGREIKNKSEILALLKALFLPKRLSIIHCLGHQKGDSAEARGNRLADQAAREAAIKTPPDTSTLLAGKRTADGSEFEKRTADGSEFESPKKKAKVE

SEQ ID NO: 1858 - protein, 2093 aa, synthetic construct
MPAAKRVKLDGGDKKYSIGLDIGTNSVGWAVITDEYKVPSKKFKVLGNTDRHSIKKNLIGALLFDSGETAEATRLKRTARRRYTRRKNRICYLQEIFSNEMAKVDDSFFHRLEESFLVEEDKKHERHPIFGNIVDEVAYHEKYPTIYHLRKKLVDSTDKADLRLIYLALAHMIKFRGHFLIEGDLNPDNSDVDKLFIQLVQTYNQLFEENPINASGVDAKAILSARLSKSRRLENLIAQLPGEKKNGLFGNLIALSLGLTPNFKSNFDLAEDAKLQLSKDTYDDDLDNLLAQIGDQYADLFLAAKNLSDAILLSDILRVNTEITKAPLSASMIKRYDEHHQDLTLLKALVRQQLPEKYKEIFFDQSKNGYAGYIDGGASQEEFYKFIKPILEKMDGTEELLVKLNREDLLRKQRTFDNGSIPHQIHLGELHAILRRQEDFYPFLKDNREKIEKILTFRIPYYVGPLARGNSRFAWMTRKSEETITPWNFEEVVDKGASAQSFIERMTNFDKNLPNEKVLPKHSLLYEYFTVYNELTKVKYVTEGMRKPAFLSGEQKKAIVDLLFKTNRKVTVKQLKEDYFKKIECFDSVEISGVEDRFNASLGTYHDLLKIIKDKDFLDNEENEDILEDIVLTLTLFEDREMIEERLKTYAHLFDDKVMKQLKRRRYTGWGRLSRKLINGIRDKQSGKTILDFLKSDGFANRNFMQLIHDDSLTFKEDIQKAQVSGQGDSLHEHIANLAGSPAIKKGILQTVKVVDELVKVMGRHKPENIVIEMARENQTTQKGQKNSRERMKRIEEGIKELGSQILKEHPVENTQLQNEKLYLYYLQNGRDMYVDQELDINRLSDYDVDHIVPQSFLKDDSIDNKVLTRSDKARGKSDNVPSEEVVKKMKNYWRQLLNAKLITQRKFDNLTKAERGGLSELDKAGFIKRQLVETRQITKHVAQILDSRMNTKYDENDKLIREVKVITLKSKLVSDFRKDFQFYKVREINNYHHAHDAYLNAVVGTALIKKYPKLESEFVYGDYKVYDVRKMIAKSEQEIGKATAKYFFYSNIMNFFKTEITLANGEIRKRPLIETNGETGEIVWDKGRDFATVRKVLSMPQVNIVKKTEVQTGGFSKESILPKRNSDKLIARKKDWDPKKYGGFDSPTVAYSVLVVAKVEKGKSKKLKSVKELLGITIMERSSFEKNPIDFLEAKGYKEVKKDLIIKLPKYSLFELENGRKRMLASAGELQKGNELALPSKYVNFLYLASHYEKLKGSPEDNEQKQLFVEQHKHYLDEIIEQISEFSKRVILADANLDKVLSAYNKHRDKPIREQAENIIHLFTLTNLGAPAAFKYFDTTIDRKRYTSTKEVLDATLIHQSITGLYETRIDLSQLGGDGGPAPEAAAKGGTLNLEDEYRLYETSAEPEVSPGSTWLSDFPQAWAETGGMGLAVRQAPLIIPLKATSTPVSIKQYPMSQEAKLGIKPHIQRLLDQGILVPCQSPWNTPLLPVKKPGTNDYRPVQDLREVNKRVEDIHPTVPNPYNLLSGLPPSHRWYTVLDLKDAFFCLRLHPTSQPLFAFEWRDPGMGISGQLTWTRLPQGFKNSPTLFNEALHRDLADFRIQHPDLILLQYVDDILLAATSELDCQQGTRALLLTLGNLGYRASAKKAQLCQKQVKYLGYLLKEGQRWLTEARKETVMGQPTPKTPRQLREFLGKAGFCRLFIPGFAEMAAPLYPLTKPGTLFNWGPDQQKAYQEIKQALLTAPALGLPDLTKPFELFVDEKQGYAKGVLTQKLGPWRRPVAYLSKKLDPVAAGWPPCLRMVAAIAVLRKDAGKLTMGQPLVILAPHAVEALVKQPPDRWLSNARMTHYQAMLLDTDRVQFGPVVALNPATLLPLPEEGAPHDCLEILAETHGTRPDLTDQPIPDADHTWYTDGSSFLQEGQRKAGAAVTTETEVIWARALPAGTSAQRAELIALTQALKMAEGKRLNVYTDSRYAFATAHIHGEIYRRRGWLTSEGREIKNKSEILALLKALFLPKRLSIIHCLGHQKGDSAEARGNRLADQAAREAAIKTPPDTSTLLAGKRTADGSEFEKRTADGSEFESPKKKAKVE

SEQ ID NO: 1859 - protein, 2096 aa, synthetic construct
MPAAKRVKLDGGDKKYSIGLDIGTNSVGWAVITDEYKVPSKKFKVLGNTDRHSIKKNLIGALLFDSGETAEATRLKRTARRRYTRRKNRICYLQEIFSNEMAKVDDSFFHRLEESFLVEEDKKHERHPIFGNIVDEVAYHEKYPTIYHLRKKLVDSTDKADLRLIYLALAHMIKFRGHFLIEGDLNPDNSDVDKLFIQLVQTYNQLFEENPINASGVDAKAILSARLSKSRRLENLIAQLPGEKKNGLFGNLIALSLGLTPNFKSNFDLAEDAKLQLSKDTYDDDLDNLLAQIGDQYADLFLAAKNLSDAILLSDILRVNTEITKAPLSASMIKRYDEHHQDLTLLKALVRQQLPEKYKEIFFDQSKNGYAGYIDGGASQEEFYKFIKPILEKMDGTEELLVKLNREDLLRKQRTFDNGSIPHQIHLGELHAILRRQEDFYPFLKDNREKIEKILTFRIPYYVGPLARGNSRFAWMTRKSEETITPWNFEEVVDKGASAQSFIERMTNFDKNLPNEKVLPKHSLLYEYFTVYNELTKVKYVTEGMRKPAFLSGEQKKAIVDLLFKTNRKVTVKQLKEDYFKKIECFDSVEISGVEDRFNASLGTYHDLLKIIKDKDFLDNEENEDILEDIVLTLTLFEDREMIEERLKTYAHLFDDKVMKQLKRRRYTGWGRLSRKLINGIRDKQSGKTILDFLKSDGFANRNFMQLIHDDSLTFKEDIQKAQVSGQGDSLHEHIANLAGSPAIKKGILQTVKVVDELVKVMGRHKPENIVIEMARENQTTQKGQKNSRERMKRIEEGIKELGSQILKEHPVENTQLQNEKLYLYYLQNGRDMYVDQELDINRLSDYDVDHIVPQSFLKDDSIDNKVLTRSDKARGKSDNVPSEEVVKKMKNYWRQLLNAKLITQRKFDNLTKAERGGLSELDKAGFIKRQLVETRQITKHVAQILDSRMNTKYDENDKLIREVKVITLKSKLVSDFRKDFQFYKVREINNYHHAHDAYLNAVVGTALIKKYPKLESEFVYGDYKVYDVRKMIAKSEQEIGKATAKYFFYSNIMNFFKTEITLANGEIRKRPLIETNGETGEIVWDKGRDFATVRKVLSMPQVNIVKKTEVQTGGFSKESILPKRNSDKLIARKKDWDPKKYGGFDSPTVAYSVLVVAKVEKGKSKKLKSVKELLGITIMERSSFEKNPIDFLEAKGYKEVKKDLIIKLPKYSLFELENGRKRMLASAGELQKGNELALPSKYVNFLYLASHYEKLKGSPEDNEQKQLFVEQHKHYLDEIIEQISEFSKRVILADANLDKVLSAYNKHRDKPIREQAENIIHLFTLTNLGAPAAFKYFDTTIDRKRYTSTKEVLDATLIHQSITGLYETRIDLSQLGGDGGGGSEAAAKGSSGGTLNLEDEYRLYETSAEPEVSPGSTWLSDFPQAWAETGGMGLAVRQAPLIIPLKATSTPVSIKQYPMSQEAKLGIKPHIQRLLDQGILVPCQSPWNTPLLPVKKPGTNDYRPVQDLREVNKRVEDIHPTVPNPYNLLSGLPPSHRWYTVLDLKDAFFCLRLHPTSQPLFAFEWRDPGMGISGQLTWTRLPQGFKNSPTLFNEALHRDLADFRIQHPDLILLQYVDDILLAATSELDCQQGTRALLLTLGNLGYRASAKKAQLCQKQVKYLGYLLKEGQRWLTEARKETVMGQPTPKTPRQLREFLGKAGFCRLFIPGFAEMAAPLYPLTKPGTLFNWGPDQQKAYQEIKQALLTAPALGLPDLTKPFELFVDEKQGYAKGVLTQKLGPWRRPVAYLSKKLDPVAAGWPPCLRMVAAIAVLRKDAGKLTMGQPLVILAPHAVEALVKQPPDRWLSNARMTHYQAMLLDTDRVQFGPVVALNPATLLPLPEEGAPHDCLEILAETHGTRPDLTDQPIPDADHTWYTDGSSFLQEGQRKAGAAVTTETEVIWARALPAGTSAQRAELIALTQALKMAEGKRLNVYTDSRYAFATAHIHGEIYRRRGWLTSEGREIKNKSEILALLKALFLPKRLSIIHCLGHQKGDSAEARGNRLADQAAREAAIKTPPDTSTLLAGKRTADGSEFEKRTADGSEFESPKKKAKVE

SEQ ID NO: 1860 - protein, 2100 aa, synthetic construct
MPAAKRVKLDGGDKKYSIGLDIGTNSVGWAVITDEYKVPSKKFKVLGNTDRHSIKKNLIGALLFDSGETAEATRLKRTARRRYTRRKNRICYLQEIFSNEMAKVDDSFFHRLEESFLVEEDKKHERHPIFGNIVDEVAYHEKYPTIYHLRKKLVDSTDKADLRLIYLALAHMIKFRGHFLIEGDLNPDNSDVDKLFIQLVQTYNQLFEENPINASGVDAKAILSARLSKSRRLENLIAQLPGEKKNGLFGNLIALSLGLTPNFKSNFDLAEDAKLQLSKDTYDDDLDNLLAQIGDQYADLFLAAKNLSDAILLSDILRVNTEITKAPLSASMIKRYDEHHQDLTLLKALVRQQLPEKYKEIFFDQSKNGYAGYIDGGASQEEFYKFIKPILEKMDGTEELLVKLNREDLLRKQRTFDNGSIPHQIHLGELHAILRRQEDFYPFLKDNREKIEKILTFRIPYYVGPLARGNSRFAWMTRKSEETITPWNFEEVVDKGASAQSFIERMTNFDKNLPNEKVLPKHSLLYEYFTVYNELTKVKYVTEGMRKPAFLSGEQKKAIVDLLFKTNRKVTVKQLKEDYFKKIECFDSVEISGVEDRFNASLGTYHDLLKIIKDKDFLDNEENEDILEDIVLTLTLFEDREMIEERLKTYAHLFDDKVMKQLKRRRYTGWGRLSRKLINGIRDKQSGKTILDFLKSDGFANRNFMQLIHDDSLTFKEDIQKAQVSGQGDSLHEHIANLAGSPAIKKGILQTVKVVDELVKVMGRHKPENIVIEMARENQTTQKGQKNSRERMKRIEEGIKELGSQILKEHPVENTQLQNEKLYLYYLQNGRDMYVDQELDINRLSDYDVDHIVPQSFLKDDSIDNKVLTRSDKARGKSDNVPSEEVVKKMKNYWRQLLNAKLITQRKFDNLTKAERGGLSELDKAGFIKRQLVETRQITKHVAQILDSRMNTKYDENDKLIREVKVITLKSKLVSDFRKDFQFYKVREINNYHHAHDAYLNAVVGTALIKKYPKLESEFVYGDYKVYDVRKMIAKSEQEIGKATAKYFFYSNIMNFFKTEITLANGEIRKRPLIETNGETGEIVWDKGRDFATVRKVLSMPQVNIVKKTEVQTGGFSKESILPKRNSDKLIARKKDWDPKKYGGFDSPTVAYSVLVVAKVEKGKSKKLKSVKELLGITIMERSSFEKNPIDFLEAKGYKEVKKDLIIKLPKYSLFELENGRKRMLASAGELQKGNELALPSKYVNFLYLASHYEKLKGSPEDNEQKQLFVEQHKHYLDEIIEQISEFSKRVILADANLDKVLSAYNKHRDKPIREQAENIIHLFTLTNLGAPAAFKYFDTTIDRKRYTSTKEVLDATLIHQSITGLYETRIDLSQLGGDGGEAAAKGGGGSEAAAKGGTLNLEDEYRLYETSAEPEVSPGSTWLSDFPQAWAETGGMGLAVRQAPLIIPLKATSTPVSIKQYPMSQEAKLGIKPHIQRLLDQGILVPCQSPWNTPLLPVKKPGTNDYRPVQDLREVNKRVEDIHPTVPNPYNLLSGLPPSHRWYTVLDLKDAFFCLRLHPTSQPLFAFEWRDPGMGISGQLTWTRLPQGFKNSPTLFNEALHRDLADFRIQHPDLILLQYVDDILLAATSELDCQQGTRALLLTLGNLGYRASAKKAQLCQKQVKYLGYLLKEGQRWLTEARKETVMGQPTPKTPRQLREFLGKAGFCRLFIPGFAEMAAPLYPLTKPGTLFNWGPDQQKAYQEIKQALLTAPALGLPDLTKPFELFVDEKQGYAKGVLTQKLGPWRRPVAYLSKKLDPVAAGWPPCLRMVAAIAVLRKDAGKLTMGQPLVILAPHAVEALVKQPPDRWLSNARMTHYQAMLLDTDRVQFGPVVALNPATLLPLPEEGAPHDCLEILAETHGTRPDLTDQPIPDADHTWYTDGSSFLQEGQRKAGAAVTTETEVIWARALPAGTSAQRAELIALTQALKMAEGKRLNVYTDSRYAFATAHIHGEIYRRRGWLTSEGREIKNKSEILALLKALFLPKRLSIIHCLGHQKGDSAEARGNRLADQAAREAAIKTPPDTSTLLAGKRTADGSEFEKRTADGSEFESPKKKAKVE

SEQ ID NO: 1861 - protein, 2096 aa, synthetic construct
MPAAKRVKLDGGDKKYSIGLDIGTNSVGWAVITDEYKVPSKKFKVLGNTDRHSIKKNLIGALLFDSGETAEATRLKRTARRRYTRRKNRICYLQEIFSNEMAKVDDSFFHRLEESFLVEEDKKHERHPIFGNIVDEVAYHEKYPTIYHLRKKLVDSTDKADLRLIYLALAHMIKFRGHFLIEGDLNPDNSDVDKLFIQLVQTYNQLFEENPINASGVDAKAILSARLSKSRRLENLIAQLPGEKKNGLFGNLIALSLGLTPNFKSNFDLAEDAKLQLSKDTYDDDLDNLLAQIGDQYADLFLAAKNLSDAILLSDILRVNTEITKAPLSASMIKRYDEHHQDLTLLKALVRQQLPEKYKEIFFDQSKNGYAGYIDGGASQEEFYKFIKPILEKMDGTEELLVKLNREDLLRKQRTFDNGSIPHQIHLGELHAILRRQEDFYPFLKDNREKIEKILTFRIPYYVGPLARGNSRFAWMTRKSEETITPWNFEEVVDKGASAQSFIERMTNFDKNLPNEKVLPKHSLLYEYFTVYNELTKVKYVTEGMRKPAFLSGEQKKAIVDLLFKTNRKVTVKQLKEDYFKKIECFDSVEISGVEDRFNASLGTYHDLLKIIKDKDFLDNEENEDILEDIVLTLTLFEDREMIEERLKTYAHLFDDKVMKQLKRRRYTGWGRLSRKLINGIRDKQSGKTILDFLKSDGFANRNFMQLIHDDSLTFKEDIQKAQVSGQGDSLHEHIANLAGSPAIKKGILQTVKVVDELVKVMGRHKPENIVIEMARENQTTQKGQKNSRERMKRIEEGIKELGSQILKEHPVENTQLQNEKLYLYYLQNGRDMYVDQELDINRLSDYDVDHIVPQSFLKDDSIDNKVLTRSDKARGKSDNVPSEEVVKKMKNYWRQLLNAKLITQRKFDNLTKAERGGLSELDKAGFIKRQLVETRQITKHVAQILDSRMNTKYDENDKLIREVKVITLKSKLVSDFRKDFQFYKVREINNYHHAHDAYLNAVVGTALIKKYPKLESEFVYGDYKVYDVRKMIAKSEQEIGKATAKYFFYSNIMNFFKTEITLANGEIRKRPLIETNGETGEIVWDKGRDFATVRKVLSMPQVNIVKKTEVQTGGFSKESILPKRNSDKLIARKKDWDPKKYGGFDSPTVAYSVLVVAKVEKGKSKKLKSVKELLGITIMERSSFEKNPIDFLEAKGYKEVKKDLIIKLPKYSLFELENGRKRMLASAGELQKGNELALPSKYVNFLYLASHYEKLKGSPEDNEQKQLFVEQHKHYLDEIIEQISEFSKRVILADANLDKVLSAYNKHRDKPIREQAENIIHLFTLTNLGAPAAFKYFDTTIDRKRYTSTKEVLDATLIHQSITGLYETRIDLSQLGGDGGGSSEAAAKGGGGGTLNLEDEYRLYETSAEPEVSPGSTWLSDFPQAWAETGGMGLAVRQAPLIIPLKATSTPVSIKQYPMSQEAKLGIKPHIQRLLDQGILVPCQSPWNTPLLPVKKPGTNDYRPVQDLREVNKRVEDIHPTVPNPYNLLSGLPPSHRWYTVLDLKDAFFCLRLHPTSQPLFAFEWRDPGMGISGQLTWTRLPQGFKNSPTLFNEALHRDLADFRIQHPDLILLQYVDDILLAATSELDCQQGTRALLLTLGNLGYRASAKKAQLCQKQVKYLGYLLKEGQRWLTEARKETVMGQPTPKTPRQLREFLGKAGFCRLFIPGFAEMAAPLYPLTKPGTLFNWGPDQQKAYQEIKQALLTAPALGLPDLTKPFELFVDEKQGYAKGVLTQKLGPWRRPVAYLSKKLDPVAAGWPPCLRMVAAIAVLRKDAGKLTMGQPLVILAPHAVEALVKQPPDRWLSNARMTHYQAMLLDTDRVQFGPVVALNPATLLPLPEEGAPHDCLEILAETHGTRPDLTDQPIPDADHTWYTDGSSFLQEGQRKAGAAVTTETEVIWARALPAGTSAQRAELIALTQALKMAEGKRLNVYTDSRYAFATAHIHGEIYRRRGWLTSEGREIKNKSEILALLKALFLPKRLSIIHCLGHQKGDSAEARGNRLADQAAREAAIKTPPDTSTLLAGKRTADGSEFEKRTADGSEFESPKKKAKVE

SEQ ID NO: 1862 - protein, 2110 aa, synthetic construct
MPAAKRVKLDGGDKKYSIGLDIGTNSVGWAVITDEYKVPSKKFKVLGNTDRHSIKKNLIGALLFDSGETAEATRLKRTARRRYTRRKNRICYLQEIFSNEMAKVDDSFFHRLEESFLVEEDKKHERHPIFGNIVDEVAYHEKYPTIYHLRKKLVDSTDKADLRLIYLALAHMIKFRGHFLIEGDLNPDNSDVDKLFIQLVQTYNQLFEENPINASGVDAKAILSARLSKSRRLENLIAQLPGEKKNGLFGNLIALSLGLTPNFKSNFDLAEDAKLQLSKDTYDDDLDNLLAQIGDQYADLFLAAKNLSDAILLSDILRVNTEITKAPLSASMIKRYDEHHQDLTLLKALVRQQLPEKYKEIFFDQSKNGYAGYIDGGASQEEFYKFIKPILEKMDGTEELLVKLNREDLLRKQRTFDNGSIPHQIHLGELHAILRRQEDFYPFLKDNREKIEKILTFRIPYYVGPLARGNSRFAWMTRKSEETITPWNFEEVVDKGASAQSFIERMTNFDKNLPNEKVLPKHSLLYEYFTVYNELTKVKYVTEGMRKPAFLSGEQKKAIVDLLFKTNRKVTVKQLKEDYFKKIECFDSVEISGVEDRFNASLGTYHDLLKIIKDKDFLDNEENEDILEDIVLTLTLFEDREMIEERLKTYAHLFDDKVMKQLKRRRYTGWGRLSRKLINGIRDKQSGKTILDFLKSDGFANRNFMQLIHDDSLTFKEDIQKAQVSGQGDSLHEHIANLAGSPAIKKGILQTVKVVDELVKVMGRHKPENIVIEMARENQTTQKGQKNSRERMKRIEEGIKELGSQILKEHPVENTQLQNEKLYLYYLQNGRDMYVDQELDINRLSDYDVDHIVPQSFLKDDSIDNKVLTRSDKARGKSDNVPSEEVVKKMKNYWRQLLNAKLITQRKFDNLTKAERGGLSELDKAGFIKRQLVETRQITKHVAQILDSRMNTKYDENDKLIREVKVITLKSKLVSDFRKDFQFYKVREINNYHHAHDAYLNAVVGTALIKKYPKLESEFVYGDYKVYDVRKMIAKSEQEIGKATAKYFFYSNIMNFFKTEITLANGEIRKRPLIETNGETGEIVWDKGRDFATVRKVLSMPQVNIVKKTEVQTGGFSKESILPKRNSDKLIARKKDWDPKKYGGFDSPTVAYSVLVVAKVEKGKSKKLKSVKELLGITIMERSSFEKNPIDFLEAKGYKEVKKDLIIKLPKYSLFELENGRKRMLASAGELQKGNELALPSKYVNFLYLASHYEKLKGSPEDNEQKQLFVEQHKHYLDEIIEQISEFSKRVILADANLDKVLSAYNKHRDKPIREQAENIIHLFTLTNLGAPAAFKYFDTTIDRKRYTSTKEVLDATLIHQSITGLYETRIDLSQLGGDGGEAAAKEAAAKEAAAKEAAAKEAAAKGGTLNLEDEYRLYETSAEPEVSPGSTWLSDFPQAWAETGGMGLAVRQAPLIIPLKATSTPVSIKQYPMSQEAKLGIKPHIQRLLDQGILVPCQSPWNTPLLPVKKPGTNDYRPVQDLREVNKRVEDIHPTVPNPYNLLSGLPPSHRWYTVLDLKDAFFCLRLHPTSQPLFAFEWRDPGMGISGQLTWTRLPQGFKNSPTLFNEALHRDLADFRIQHPDLILLQYVDDILLAATSELDCQQGTRALLLTLGNLGYRASAKKAQLCQKQVKYLGYLLKEGQRWLTEARKETVMGQPTPKTPRQLREFLGKAGFCRLFIPGFAEMAAPLYPLTKPGTLFNWGPDQQKAYQEIKQALLTAPALGLPDLTKPFELFVDEKQGYAKGVLTQKLGPWRRPVAYLSKKLDPVAAGWPPCLRMVAAIAVLRKDAGKLTMGQPLVILAPHAVEALVKQPPDRWLSNARMTHYQAMLLDTDRVQFGPVVALNPATLLPLPEEGAPHDCLEILAETHGTRPDLTDQPIPDADHTWYTDGSSFLQEGQRKAGAAVTTETEVIWARALPAGTSAQRAELIALTQALKMAEGKRLNVYTDSRYAFATAHIHGEIYRRRGWLTSEGREIKNKSEILALLKALFLPKRLSIIHCLGHQKGDSAEARGNRLADQAAREAAIKTPPDTSTLLAGKRTADGSEFEKRTADGSEFESPKKKAKVE

SEQ ID NO: 1863 - protein, 2098 aa, synthetic construct
MPAAKRVKLDGGDKKYSIGLDIGTNSVGWAVITDEYKVPSKKFKVLGNTDRHSIKKNLIGALLFDSGETAEATRLKRTARRRYTRRKNRICYLQEIFSNEMAKVDDSFFHRLEESFLVEEDKKHERHPIFGNIVDEVAYHEKYPTIYHLRKKLVDSTDKADLRLIYLALAHMIKFRGHFLIEGDLNPDNSDVDKLFIQLVQTYNQLFEENPINASGVDAKAILSARLSKSRRLENLIAQLPGEKKNGLFGNLIALSLGLTPNFKSNFDLAEDAKLQLSKDTYDDDLDNLLAQIGDQYADLFLAAKNLSDAILLSDILRVNTEITKAPLSASMIKRYDEHHQDLTLLKALVRQQLPEKYKEIFFDQSKNGYAGYIDGGASQEEFYKFIKPILEKMDGTEELLVKLNREDLLRKQRTFDNGSIPHQIHLGELHAILRRQEDFYPFLKDNREKIEKILTFRIPYYVGPLARGNSRFAWMTRKSEETITPWNFEEVVDKGASAQSFIERMTNFDKNLPNEKVLPKHSLLYEYFTVYNELTKVKYVTEGMRKPAFLSGEQKKAIVDLLFKTNRKVTVKQLKEDYFKKIECFDSVEISGVEDRFNASLGTYHDLLKIIKDKDFLDNEENEDILEDIVLTLTLFEDREMIEERLKTYAHLFDDKVMKQLKRRRYTGWGRLSRKLINGIRDKQSGKTILDFLKSDGFANRNFMQLIHDDSLTFKEDIQKAQVSGQGDSLHEHIANLAGSPAIKKGILQTVKVVDELVKVMGRHKPENIVIEMARENQTTQKGQKNSRERMKRIEEGIKELGSQILKEHPVENTQLQNEKLYLYYLQNGRDMYVDQELDINRLSDYDVDHIVPQSFLKDDSIDNKVLTRSDKARGKSDNVPSEEVVKKMKNYWRQLLNAKLITQRKFDNLTKAERGGLSELDKAGFIKRQLVETRQITKHVAQILDSRMNTKYDENDKLIREVKVITLKSKLVSDFRKDFQFYKVREINNYHHAHDAYLNAVVGTALIKKYPKLESEFVYGDYKVYDVRKMIAKSEQEIGKATAKYFFYSNIMNFFKTEITLANGEIRKRPLIETNGETGEIVWDKGRDFATVRKVLSMPQVNIVKKTEVQTGGFSKESILPKRNSDKLIARKKDWDPKKYGGFDSPTVAYSVLVVAKVEKGKSKKLKSVKELLGITIMERSSFEKNPIDFLEAKGYKEVKKDLIIKLPKYSLFELENGRKRMLASAGELQKGNELALPSKYVNFLYLASHYEKLKGSPEDNEQKQLFVEQHKHYLDEIIEQISEFSKRVILADANLDKVLSAYNKHRDKPIREQAENIIHLFTLTNLGAPAAFKYFDTTIDRKRYTSTKEVLDATLIHQSITGLYETRIDLSQLGGDGGPAPAPAPAPAPAPGGTLNLEDEYRLYETSAEPEVSPGSTWLSDFPQAWAETGGMGLAVRQAPLIIPLKATSTPVSIKQYPMSQEAKLGIKPHIQRLLDQGILVPCQSPWNTPLLPVKKPGTNDYRPVQDLREVNKRVEDIHPTVPNPYNLLSGLPPSHRWYTVLDLKDAFFCLRLHPTSQPLFAFEWRDPGMGISGQLTWTRLPQGFKNSPTLFNEALHRDLADFRIQHPDLILLQYVDDILLAATSELDCQQGTRALLLTLGNLGYRASAKKAQLCQKQVKYLGYLLKEGQRWLTEARKETVMGQPTPKTPRQLREFLGKAGFCRLFIPGFAEMAAPLYPLTKPGTLFNWGPDQQKAYQEIKQALLTAPALGLPDLTKPFELFVDEKQGYAKGVLTQKLGPWRRPVAYLSKKLDPVAAGWPPCLRMVAAIAVLRKDAGKLTMGQPLVILAPHAVEALVKQPPDRWLSNARMTHYQAMLLDTDRVQFGPVVALNPATLLPLPEEGAPHDCLEILAETHGTRPDLTDQPIPDADHTWYTDGSSFLQEGQRKAGAAVTTETEVIWARALPAGTSAQRAELIALTQALKMAEGKRLNVYTDSRYAFATAHIHGEIYRRRGWLTSEGREIKNKSEILALLKALFLPKRLSIIHCLGHQKGDSAEARGNRLADQAAREAAIKTPPDTSTLLAGKRTADGSEFEKRTADGSEFESPKKKAKVE

SEQ ID NO: 1864 - protein, 2096 aa, synthetic construct
MPAAKRVKLDGGDKKYSIGLDIGTNSVGWAVITDEYKVPSKKFKVLGNTDRHSIKKNLIGALLFDSGETAEATRLKRTARRRYTRRKNRICYLQEIFSNEMAKVDDSFFHRLEESFLVEEDKKHERHPIFGNIVDEVAYHEKYPTIYHLRKKLVDSTDKADLRLIYLALAHMIKFRGHFLIEGDLNPDNSDVDKLFIQLVQTYNQLFEENPINASGVDAKAILSARLSKSRRLENLIAQLPGEKKNGLFGNLIALSLGLTPNFKSNFDLAEDAKLQLSKDTYDDDLDNLLAQIGDQYADLFLAAKNLSDAILLSDILRVNTEITKAPLSASMIKRYDEHHQDLTLLKALVRQQLPEKYKEIFFDQSKNGYAGYIDGGASQEEFYKFIKPILEKMDGTEELLVKLNREDLLRKQRTFDNGSIPHQIHLGELHAILRRQEDFYPFLKDNREKIEKILTFRIPYYVGPLARGNSRFAWMTRKSEETITPWNFEEVVDKGASAQSFIERMTNFDKNLPNEKVLPKHSLLYEYFTVYNELTKVKYVTEGMRKPAFLSGEQKKAIVDLLFKTNRKVTVKQLKEDYFKKIECFDSVEISGVEDRFNASLGTYHDLLKIIKDKDFLDNEENEDILEDIVLTLTLFEDREMIEERLKTYAHLFDDKVMKQLKRRRYTGWGRLSRKLINGIRDKQSGKTILDFLKSDGFANRNFMQLIHDDSLTFKEDIQKAQVSGQGDSLHEHIANLAGSPAIKKGILQTVKVVDELVKVMGRHKPENIVIEMARENQTTQKGQKNSRERMKRIEEGIKELGSQILKEHPVENTQLQNEKLYLYYLQNGRDMYVDQELDINRLSDYDVDHIVPQSFLKDDSIDNKVLTRSDKARGKSDNVPSEEVVKKMKNYWRQLLNAKLITQRKFDNLTKAERGGLSELDKAGFIKRQLVETRQITKHVAQILDSRMNTKYDENDKLIREVKVITLKSKLVSDFRKDFQFYKVREINNYHHAHDAYLNAVVGTALIKKYPKLESEFVYGDYKVYDVRKMIAKSEQEIGKATAKYFFYSNIMNFFKTEITLANGEIRKRPLIETNGETGEIVWDKGRDFATVRKVLSMPQVNIVKKTEVQTGGFSKESILPKRNSDKLIARKKDWDPKKYGGFDSPTVAYSVLVVAKVEKGKSKKLKSVKELLGITIMERSSFEKNPIDFLEAKGYKEVKKDLIIKLPKYSLFELENGRKRMLASAGELQKGNELALPSKYVNFLYLASHYEKLKGSPEDNEQKQLFVEQHKHYLDEIIEQISEFSKRVILADANLDKVLSAYNKHRDKPIREQAENIIHLFTLTNLGAPAAFKYFDTTIDRKRYTSTKEVLDATLIHQSITGLYETRIDLSQLGGDGGPAPEAAAKGGGGGTLNLEDEYRLYETSAEPEVSPGSTWLSDFPQAWAETGGMGLAVRQAPLIIPLKATSTPVSIKQYPMSQEAKLGIKPHIQRLLDQGILVPCQSPWNTPLLPVKKPGTNDYRPVQDLREVNKRVEDIHPTVPNPYNLLSGLPPSHRWYTVLDLKDAFFCLRLHPTSQPLFAFEWRDPGMGISGQLTWTRLPQGFKNSPTLFNEALHRDLADFRIQHPDLILLQYVDDILLAATSELDCQQGTRALLLTLGNLGYRASAKKAQLCQKQVKYLGYLLKEGQRWLTEARKETVMGQPTPKTPRQLREFLGKAGFCRLFIPGFAEMAAPLYPLTKPGTLFNWGPDQQKAYQEIKQALLTAPALGLPDLTKPFELFVDEKQGYAKGVLTQKLGPWRRPVAYLSKKLDPVAAGWPPCLRMVAAIAVLRKDAGKLTMGQPLVILAPHAVEALVKQPPDRWLSNARMTHYQAMLLDTDRVQFGPVVALNPATLLPLPEEGAPHDCLEILAETHGTRPDLTDQPIPDADHTWYTDGSSFLQEGQRKAGAAVTTETEVIWARALPAGTSAQRAELIALTQALKMAEGKRLNVYTDSRYAFATAHIHGEIYRRRGWLTSEGREIKNKSEILALLKALFLPKRLSIIHCLGHQKGDSAEARGNRLADQAAREAAIKTPPDTSTLLAGKRTADGSEFEKRTADGSEFESPKKKAKVE

SEQ ID NO: 1865 - protein, 2105 aa, synthetic construct
MPAAKRVKLDGGDKKYSIGLDIGTNSVGWAVITDEYKVPSKKFKVLGNTDRHSIKKNLIGALLFDSGETAEATRLKRTARRRYTRRKNRICYLQEIFSNEMAKVDDSFFHRLEESFLVEEDKKHERHPIFGNIVDEVAYHEKYPTIYHLRKKLVDSTDKADLRLIYLALAHMIKFRGHFLIEGDLNPDNSDVDKLFIQLVQTYNQLFEENPINASGVDAKAILSARLSKSRRLENLIAQLPGEKKNGLFGNLIALSLGLTPNFKSNFDLAEDAKLQLSKDTYDDDLDNLLAQIGDQYADLFLAAKNLSDAILLSDILRVNTEITKAPLSASMIKRYDEHHQDLTLLKALVRQQLPEKYKEIFFDQSKNGYAGYIDGGASQEEFYKFIKPILEKMDGTEELLVKLNREDLLRKQRTFDNGSIPHQIHLGELHAILRRQEDFYPFLKDNREKIEKILTFRIPYYVGPLARGNSRFAWMTRKSEETITPWNFEEVVDKGASAQSFIERMTNFDKNLPNEKVLPKHSLLYEYFTVYNELTKVKYVTEGMRKPAFLSGEQKKAIVDLLFKTNRKVTVKQLKEDYFKKIECFDSVEISGVEDRFNASLGTYHDLLKIIKDKDFLDNEENEDILEDIVLTLTLFEDREMIEERLKTYAHLFDDKVMKQLKRRRYTGWGRLSRKLINGIRDKQSGKTILDFLKSDGFANRNFMQLIHDDSLTFKEDIQKAQVSGQGDSLHEHIANLAGSPAIKKGILQTVKVVDELVKVMGRHKPENIVIEMARENQTTQKGQKNSRERMKRIEEGIKELGSQILKEHPVENTQLQNEKLYLYYLQNGRDMYVDQELDINRLSDYDVDHIVPQSFLKDDSIDNKVLTRSDKARGKSDNVPSEEVVKKMKNYWRQLLNAKLITQRKFDNLTKAERGGLSELDKAGFIKRQLVETRQITKHVAQILDSRMNTKYDENDKLIREVKVITLKSKLVSDFRKDFQFYKVREINNYHHAHDAYLNAVVGTALIKKYPKLESEFVYGDYKVYDVRKMIAKSEQEIGKATAKYFFYSNIMNFFKTEITLANGEIRKRPLIETNGETGEIVWDKGRDFATVRKVLSMPQVNIVKKTEVQTGGFSKESILPKRNSDKLIARKKDWDPKKYGGFDSPTVAYSVLVVAKVEKGKSKKLKSVKELLGITIMERSSFEKNPIDFLEAKGYKEVKKDLIIKLPKYSLFELENGRKRMLASAGELQKGNELALPSKYVNFLYLASHYEKLKGSPEDNEQKQLFVEQHKHYLDEIIEQISEFSKRVILADANLDKVLSAYNKHRDKPIREQAENIIHLFTLTNLGAPAAFKYFDTTIDRKRYTSTKEVLDATLIHQSITGLYETRIDLSQLGGDGGEAAAKEAAAKEAAAKEAAAKGGTLNLEDEYRLYETSAEPEVSPGSTWLSDFPQAWAETGGMGLAVRQAPLIIPLKATSTPVSIKQYPMSQEAKLGIKPHIQRLLDQGILVPCQSPWNTPLLPVKKPGTNDYRPVQDLREVNKRVEDIHPTVPNPYNLLSGLPPSHRWYTVLDLKDAFFCLRLHPTSQPLFAFEWRDPGMGISGQLTWTRLPQGFKNSPTLFNEALHRDLADFRIQHPDLILLQYVDDILLAATSELDCQQGTRALLLTLGNLGYRASAKKAQLCQKQVKYLGYLLKEGQRWLTEARKETVMGQPTPKTPRQLREFLGKAGFCRLFIPGFAEMAAPLYPLTKPGTLFNWGPDQQKAYQEIKQALLTAPALGLPDLTKPFELFVDEKQGYAKGVLTQKLGPWRRPVAYLSKKLDPVAAGWPPCLRMVAAIAVLRKDAGKLTMGQPLVILAPHAVEALVKQPPDRWLSNARMTHYQAMLLDTDRVQFGPVVALNPATLLPLPEEGAPHDCLEILAETHGTRPDLTDQPIPDADHTWYTDGSSFLQEGQRKAGAAVTTETEVIWARALPAGTSAQRAELIALTQALKMAEGKRLNVYTDSRYAFATAHIHGEIYRRRGWLTSEGREIKNKSEILALLKALFLPKRLSIIHCLGHQKGDSAEARGNRLADQAAREAAIKTPPDTSTLLAGKRTADGSEFEKRTADGSEFESPKKKAKVE

SEQ ID NO: 1866 - protein, 2096 aa, synthetic construct
MPAAKRVKLDGGDKKYSIGLDIGTNSVGWAVITDEYKVPSKKFKVLGNTDRHSIKKNLIGALLFDSGETAEATRLKRTARRRYTRRKNRICYLQEIFSNEMAKVDDSFFHRLEESFLVEEDKKHERHPIFGNIVDEVAYHEKYPTIYHLRKKLVDSTDKADLRLIYLALAHMIKFRGHFLIEGDLNPDNSDVDKLFIQLVQTYNQLFEENPINASGVDAKAILSARLSKSRRLENLIAQLPGEKKNGLFGNLIALSLGLTPNFKSNFDLAEDAKLQLSKDTYDDDLDNLLAQIGDQYADLFLAAKNLSDAILLSDILRVNTEITKAPLSASMIKRYDEHHQDLTLLKALVRQQLPEKYKEIFFDQSKNGYAGYIDGGASQEEFYKFIKPILEKMDGTEELLVKLNREDLLRKQRTFDNGSIPHQIHLGELHAILRRQEDFYPFLKDNREKIEKILTFRIPYYVGPLARGNSRFAWMTRKSEETITPWNFEEVVDKGASAQSFIERMTNFDKNLPNEKVLPKHSLLYEYFTVYNELTKVKYVTEGMRKPAFLSGEQKKAIVDLLFKTNRKVTVKQLKEDYFKKIECFDSVEISGVEDRFNASLGTYHDLLKIIKDKDFLDNEENEDILEDIVLTLTLFEDREMIEERLKTYAHLFDDKVMKQLKRRRYTGWGRLSRKLINGIRDKQSGKTILDFLKSDGFANRNFMQLIHDDSLTFKEDIQKAQVSGQGDSLHEHIANLAGSPAIKKGILQTVKVVDELVKVMGRHKPENIVIEMARENQTTQKGQKNSRERMKRIEEGIKELGSQILKEHPVENTQLQNEKLYLYYLQNGRDMYVDQELDINRLSDYDVDHIVPQSFLKDDSIDNKVLTRSDKARGKSDNVPSEEVVKKMKNYWRQLLNAKLITQRKFDNLTKAERGGLSELDKAGFIKRQLVETRQITKHVAQILDSRMNTKYDENDKLIREVKVITLKSKLVSDFRKDFQFYKVREINNYHHAHDAYLNAVVGTALIKKYPKLESEFVYGDYKVYDVRKMIAKSEQEIGKATAKYFFYSNIMNFFKTEITLANGEIRKRPLIETNGETGEIVWDKGRDFATVRKVLSMPQVNIVKKTEVQTGGFSKESILPKRNSDKLIARKKDWDPKKYGGFDSPTVAYSVLVVAKVEKGKSKKLKSVKELLGITIMERSSFEKNPIDFLEAKGYKEVKKDLIIKLPKYSLFELENGRKRMLASAGELQKGNELALPSKYVNFLYLASHYEKLKGSPEDNEQKQLFVEQHKHYLDEIIEQISEFSKRVILADANLDKVLSAYNKHRDKPIREQAENIIHLFTLTNLGAPAAFKYFDTTIDRKRYTSTKEVLDATLIHQSITGLYETRIDLSQLGGDGGPAPGGSEAAAKGGTLNLEDEYRLYETSAEPEVSPGSTWLSDFPQAWAETGGMGLAVRQAPLIIPLKATSTPVSIKQYPMSQEAKLGIKPHIQRLLDQGILVPCQSPWNTPLLPVKKPGTNDYRPVQDLREVNKRVEDIHPTVPNPYNLLSGLPPSHRWYTVLDLKDAFFCLRLHPTSQPLFAFEWRDPGMGISGQLTWTRLPQGFKNSPTLFNEALHRDLADFRIQHPDLILLQYVDDILLAATSELDCQQGTRALLLTLGNLGYRASAKKAQLCQKQVKYLGYLLKEGQRWLTEARKETVMGQPTPKTPRQLREFLGKAGFCRLFIPGFAEMAAPLYPLTKPGTLFNWGPDQQKAYQEIKQALLTAPALGLPDLTKPFELFVDEKQGYAKGVLTQKLGPWRRPVAYLSKKLDPVAAGWPPCLRMVAAIAVLRKDAGKLTMGQPLVILAPHAVEALVKQPPDRWLSNARMTHYQAMLLDTDRVQFGPVVALNPATLLPLPEEGAPHDCLEILAETHGTRPDLTDQPIPDADHTWYTDGSSFLQEGQRKAGAAVTTETEVIWARALPAGTSAQRAELIALTQALKMAEGKRLNVYTDSRYAFATAHIHGEIYRRRGWLTSEGREIKNKSEILALLKALFLPKRLSIIHCLGHQKGDSAEARGNRLADQAAREAAIKTPPDTSTLLAGKRTADGSEFEKRTADGSEFESPKKKAKVE

SEQ ID NO: 1867 - protein, 2096 aa, synthetic construct
MPAAKRVKLDGGDKKYSIGLDIGTNSVGWAVITDEYKVPSKKFKVLGNTDRHSIKKNLIGALLFDSGETAEATRLKRTARRRYTRRKNRICYLQEIFSNEMAKVDDSFFHRLEESFLVEEDKKHERHPIFGNIVDEVAYHEKYPTIYHLRKKLVDSTDKADLRLIYLALAHMIKFRGHFLIEGDLNPDNSDVDKLFIQLVQTYNQLFEENPINASGVDAKAILSARLSKSRRLENLIAQLPGEKKNGLFGNLIALSLGLTPNFKSNFDLAEDAKLQLSKDTYDDDLDNLLAQIGDQYADLFLAAKNLSDAILLSDILRVNTEITKAPLSASMIKRYDEHHQDLTLLKALVRQQLPEKYKEIFFDQSKNGYAGYIDGGASQEEFYKFIKPILEKMDGTEELLVKLNREDLLRKQRTFDNGSIPHQIHLGELHAILRRQEDFYPFLKDNREKIEKILTFRIPYYVGPLARGNSRFAWMTRKSEETITPWNFEEVVDKGASAQSFIERMTNFDKNLPNEKVLPKHSLLYEYFTVYNELTKVKYVTEGMRKPAFLSGEQKKAIVDLLFKTNRKVTVKQLKEDYFKKIECFDSVEISGVEDRFNASLGTYHDLLKIIKDKDFLDNEENEDILEDIVLTLTLFEDREMIEERLKTYAHLFDDKVMKQLKRRRYTGWGRLSRKLINGIRDKQSGKTILDFLKSDGFANRNFMQLIHDDSLTFKEDIQKAQVSGQGDSLHEHIANLAGSPAIKKGILQTVKVVDELVKVMGRHKPENIVIEMARENQTTQKGQKNSRERMKRIEEGIKELGSQILKEHPVENTQLQNEKLYLYYLQNGRDMYVDQELDINRLSDYDVDHIVPQSFLKDDSIDNKVLTRSDKARGKSDNVPSEEVVKKMKNYWRQLLNAKLITQRKFDNLTKAERGGLSELDKAGFIKRQLVETRQITKHVAQILDSRMNTKYDENDKLIREVKVITLKSKLVSDFRKDFQFYKVREINNYHHAHDAYLNAVVGTALIKKYPKLESEFVYGDYKVYDVRKMIAKSEQEIGKATAKYFFYSNIMNFFKTEITLANGEIRKRPLIETNGETGEIVWDKGRDFATVRKVLSMPQVNIVKKTEVQTGGFSKESILPKRNSDKLIARKKDWDPKKYGGFDSPTVAYSVLVVAKVEKGKSKKLKSVKELLGITIMERSSFEKNPIDFLEAKGYKEVKKDLIIKLPKYSLFELENGRKRMLASAGELQKGNELALPSKYVNFLYLASHYEKLKGSPEDNEQKQLFVEQHKHYLDEIIEQISEFSKRVILADANLDKVLSAYNKHRDKPIREQAENIIHLFTLTNLGAPAAFKYFDTTIDRKRYTSTKEVLDATLIHQSITGLYETRIDLSQLGGDGGEAAAKGGGPAPGGTLNLEDEYRLYETSAEPEVSPGSTWLSDFPQAWAETGGMGLAVRQAPLIIPLKATSTPVSIKQYPMSQEAKLGIKPHIQRLLDQGILVPCQSPWNTPLLPVKKPGTNDYRPVQDLREVNKRVEDIHPTVPNPYNLLSGLPPSHRWYTVLDLKDAFFCLRLHPTSQPLFAFEWRDPGMGISGQLTWTRLPQGFKNSPTLFNEALHRDLADFRIQHPDLILLQYVDDILLAATSELDCQQGTRALLLTLGNLGYRASAKKAQLCQKQVKYLGYLLKEGQRWLTEARKETVMGQPTPKTPRQLREFLGKAGFCRLFIPGFAEMAAPLYPLTKPGTLFNWGPDQQKAYQEIKQALLTAPALGLPDLTKPFELFVDEKQGYAKGVLTQKLGPWRRPVAYLSKKLDPVAAGWPPCLRMVAAIAVLRKDAGKLTMGQPLVILAPHAVEALVKQPPDRWLSNARMTHYQAMLLDTDRVQFGPVVALNPATLLPLPEEGAPHDCLEILAETHGTRPDLTDQPIPDADHTWYTDGSSFLQEGQRKAGAAVTTETEVIWARALPAGTSAQRAELIALTQALKMAEGKRLNVYTDSRYAFATAHIHGEIYRRRGWLTSEGREIKNKSEILALLKALFLPKRLSIIHCLGHQKGDSAEARGNRLADQAAREAAIKTPPDTSTLLAGKRTADGSEFEKRTADGSEFESPKKKAKVE

SEQ ID NO: 1868 - protein, 2090 aa, synthetic construct
MPAAKRVKLDGGDKKYSIGLDIGTNSVGWAVITDEYKVPSKKFKVLGNTDRHSIKKNLIGALLFDSGETAEATRLKRTARRRYTRRKNRICYLQEIFSNEMAKVDDSFFHRLEESFLVEEDKKHERHPIFGNIVDEVAYHEKYPTIYHLRKKLVDSTDKADLRLIYLALAHMIKFRGHFLIEGDLNPDNSDVDKLFIQLVQTYNQLFEENPINASGVDAKAILSARLSKSRRLENLIAQLPGEKKNGLFGNLIALSLGLTPNFKSNFDLAEDAKLQLSKDTYDDDLDNLLAQIGDQYADLFLAAKNLSDAILLSDILRVNTEITKAPLSASMIKRYDEHHQDLTLLKALVRQQLPEKYKEIFFDQSKNGYAGYIDGGASQEEFYKFIKPILEKMDGTEELLVKLNREDLLRKQRTFDNGSIPHQIHLGELHAILRRQEDFYPFLKDNREKIEKILTFRIPYYVGPLARGNSRFAWMTRKSEETITPWNFEEVVDKGASAQSFIERMTNFDKNLPNEKVLPKHSLLYEYFTVYNELTKVKYVTEGMRKPAFLSGEQKKAIVDLLFKTNRKVTVKQLKEDYFKKIECFDSVEISGVEDRFNASLGTYHDLLKIIKDKDFLDNEENEDILEDIVLTLTLFEDREMIEERLKTYAHLFDDKVMKQLKRRRYTGWGRLSRKLINGIRDKQSGKTILDFLKSDGFANRNFMQLIHDDSLTFKEDIQKAQVSGQGDSLHEHIANLAGSPAIKKGILQTVKVVDELVKVMGRHKPENIVIEMARENQTTQKGQKNSRERMKRIEEGIKELGSQILKEHPVENTQLQNEKLYLYYLQNGRDMYVDQELDINRLSDYDVDHIVPQSFLKDDSIDNKVLTRSDKARGKSDNVPSEEVVKKMKNYWRQLLNAKLITQRKFDNLTKAERGGLSELDKAGFIKRQLVETRQITKHVAQILDSRMNTKYDENDKLIREVKVITLKSKLVSDFRKDFQFYKVREINNYHHAHDAYLNAVVGTALIKKYPKLESEFVYGDYKVYDVRKMIAKSEQEIGKATAKYFFYSNIMNFFKTEITLANGEIRKRPLIETNGETGEIVWDKGRDFATVRKVLSMPQVNIVKKTEVQTGGFSKESILPKRNSDKLIARKKDWDPKKYGGFDSPTVAYSVLVVAKVEKGKSKKLKSVKELLGITIMERSSFEKNPIDFLEAKGYKEVKKDLIIKLPKYSLFELENGRKRMLASAGELQKGNELALPSKYVNFLYLASHYEKLKGSPEDNEQKQLFVEQHKHYLDEIIEQISEFSKRVILADANLDKVLSAYNKHRDKPIREQAENIIHLFTLTNLGAPAAFKYFDTTIDRKRYTSTKEVLDATLIHQSITGLYETRIDLSQLGGDGGEAAAKGGTLNLEDEYRLYETSAEPEVSPGSTWLSDFPQAWAETGGMGLAVRQAPLIIPLKATSTPVSIKQYPMSQEAKLGIKPHIQRLLDQGILVPCQSPWNTPLLPVKKPGTNDYRPVQDLREVNKRVEDIHPTVPNPYNLLSGLPPSHRWYTVLDLKDAFFCLRLHPTSQPLFAFEWRDPGMGISGQLTWTRLPQGFKNSPTLFNEALHRDLADFRIQHPDLILLQYVDDILLAATSELDCQQGTRALLLTLGNLGYRASAKKAQLCQKQVKYLGYLLKEGQRWLTEARKETVMGQPTPKTPRQLREFLGKAGFCRLFIPGFAEMAAPLYPLTKPGTLFNWGPDQQKAYQEIKQALLTAPALGLPDLTKPFELFVDEKQGYAKGVLTQKLGPWRRPVAYLSKKLDPVAAGWPPCLRMVAAIAVLRKDAGKLTMGQPLVILAPHAVEALVKQPPDRWLSNARMTHYQAMLLDTDRVQFGPVVALNPATLLPLPEEGAPHDCLEILAETHGTRPDLTDQPIPDADHTWYTDGSSFLQEGQRKAGAAVTTETEVIWARALPAGTSAQRAELIALTQALKMAEGKRLNVYTDSRYAFATAHIHGEIYRRRGWLTSEGREIKNKSEILALLKALFLPKRLSIIHCLGHQKGDSAEARGNRLADQAAREAAIKTPPDTSTLLAGKRTADGSEFEKRTADGSEFESPKKKAKVE

SEQ ID NO: 1869 - protein, 2096 aa, synthetic construct
MPAAKRVKLDGGDKKYSIGLDIGTNSVGWAVITDEYKVPSKKFKVLGNTDRHSIKKNLIGALLFDSGETAEATRLKRTARRRYTRRKNRICYLQEIFSNEMAKVDDSFFHRLEESFLVEEDKKHERHPIFGNIVDEVAYHEKYPTIYHLRKKLVDSTDKADLRLIYLALAHMIKFRGHFLIEGDLNPDNSDVDKLFIQLVQTYNQLFEENPINASGVDAKAILSARLSKSRRLENLIAQLPGEKKNGLFGNLIALSLGLTPNFKSNFDLAEDAKLQLSKDTYDDDLDNLLAQIGDQYADLFLAAKNLSDAILLSDILRVNTEITKAPLSASMIKRYDEHHQDLTLLKALVRQQLPEKYKEIFFDQSKNGYAGYIDGGASQEEFYKFIKPILEKMDGTEELLVKLNREDLLRKQRTFDNGSIPHQIHLGELHAILRRQEDFYPFLKDNREKIEKILTFRIPYYVGPLARGNSRFAWMTRKSEETITPWNFEEVVDKGASAQSFIERMTNFDKNLPNEKVLPKHSLLYEYFTVYNELTKVKYVTEGMRKPAFLSGEQKKAIVDLLFKTNRKVTVKQLKEDYFKKIECFDSVEISGVEDRFNASLGTYHDLLKIIKDKDFLDNEENEDILEDIVLTLTLFEDREMIEERLKTYAHLFDDKVMKQLKRRRYTGWGRLSRKLINGIRDKQSGKTILDFLKSDGFANRNFMQLIHDDSLTFKEDIQKAQVSGQGDSLHEHIANLAGSPAIKKGILQTVKVVDELVKVMGRHKPENIVIEMARENQTTQKGQKNSRERMKRIEEGIKELGSQILKEHPVENTQLQNEKLYLYYLQNGRDMYVDQELDINRLSDYDVDHIVPQSFLKDDSIDNKVLTRSDKARGKSDNVPSEEVVKKMKNYWRQLLNAKLITQRKFDNLTKAERGGLSELDKAGFIKRQLVETRQITKHVAQILDSRMNTKYDENDKLIREVKVITLKSKLVSDFRKDFQFYKVREINNYHHAHDAYLNAVVGTALIKKYPKLESEFVYGDYKVYDVRKMIAKSEQEIGKATAKYFFYSNIMNFFKTEITLANGEIRKRPLIETNGETGEIVWDKGRDFATVRKVLSMPQVNIVKKTEVQTGGFSKESILPKRNSDKLIARKKDWDPKKYGGFDSPTVAYSVLVVAKVEKGKSKKLKSVKELLGITIMERSSFEKNPIDFLEAKGYKEVKKDLIIKLPKYSLFELENGRKRMLASAGELQKGNELALPSKYVNFLYLASHYEKLKGSPEDNEQKQLFVEQHKHYLDEIIEQISEFSKRVILADANLDKVLSAYNKHRDKPIREQAENIIHLFTLTNLGAPAAFKYFDTTIDRKRYTSTKEVLDATLIHQSITGLYETRIDLSQLGGDGGEAAAKGGGGSSGGTLNLEDEYRLYETSAEPEVSPGSTWLSDFPQAWAETGGMGLAVRQAPLIIPLKATSTPVSIKQYPMSQEAKLGIKPHIQRLLDQGILVPCQSPWNTPLLPVKKPGTNDYRPVQDLREVNKRVEDIHPTVPNPYNLLSGLPPSHRWYTVLDLKDAFFCLRLHPTSQPLFAFEWRDPGMGISGQLTWTRLPQGFKNSPTLFNEALHRDLADFRIQHPDLILLQYVDDILLAATSELDCQQGTRALLLTLGNLGYRASAKKAQLCQKQVKYLGYLLKEGQRWLTEARKETVMGQPTPKTPRQLREFLGKAGFCRLFIPGFAEMAAPLYPLTKPGTLFNWGPDQQKAYQEIKQALLTAPALGLPDLTKPFELFVDEKQGYAKGVLTQKLGPWRRPVAYLSKKLDPVAAGWPPCLRMVAAIAVLRKDAGKLTMGQPLVILAPHAVEALVKQPPDRWLSNARMTHYQAMLLDTDRVQFGPVVALNPATLLPLPEEGAPHDCLEILAETHGTRPDLTDQPIPDADHTWYTDGSSFLQEGQRKAGAAVTTETEVIWARALPAGTSAQRAELIALTQALKMAEGKRLNVYTDSRYAFATAHIHGEIYRRRGWLTSEGREIKNKSEILALLKALFLPKRLSIIHCLGHQKGDSAEARGNRLADQAAREAAIKTPPDTSTLLAGKRTADGSEFEKRTADGSEFESPKKKAKVE

SEQ ID NO: 1870 - protein, 2097 aa, synthetic construct
MPAAKRVKLDGGDKKYSIGLDIGTNSVGWAVITDEYKVPSKKFKVLGNTDRHSIKKNLIGALLFDSGETAEATRLKRTARRRYTRRKNRICYLQEIFSNEMAKVDDSFFHRLEESFLVEEDKKHERHPIFGNIVDEVAYHEKYPTIYHLRKKLVDSTDKADLRLIYLALAHMIKFRGHFLIEGDLNPDNSDVDKLFIQLVQTYNQLFEENPINASGVDAKAILSARLSKSRRLENLIAQLPGEKKNGLFGNLIALSLGLTPNFKSNFDLAEDAKLQLSKDTYDDDLDNLLAQIGDQYADLFLAAKNLSDAILLSDILRVNTEITKAPLSASMIKRYDEHHQDLTLLKALVRQQLPEKYKEIFFDQSKNGYAGYIDGGASQEEFYKFIKPILEKMDGTEELLVKLNREDLLRKQRTFDNGSIPHQIHLGELHAILRRQEDFYPFLKDNREKIEKILTFRIPYYVGPLARGNSRFAWMTRKSEETITPWNFEEVVDKGASAQSFIERMTNFDKNLPNEKVLPKHSLLYEYFTVYNELTKVKYVTEGMRKPAFLSGEQKKAIVDLLFKTNRKVTVKQLKEDYFKKIECFDSVEISGVEDRFNASLGTYHDLLKIIKDKDFLDNEENEDILEDIVLTLTLFEDREMIEERLKTYAHLFDDKVMKQLKRRRYTGWGRLSRKLINGIRDKQSGKTILDFLKSDGFANRNFMQLIHDDSLTFKEDIQKAQVSGQGDSLHEHIANLAGSPAIKKGILQTVKVVDELVKVMGRHKPENIVIEMARENQTTQKGQKNSRERMKRIEEGIKELGSQILKEHPVENTQLQNEKLYLYYLQNGRDMYVDQELDINRLSDYDVDHIVPQSFLKDDSIDNKVLTRSDKARGKSDNVPSEEVVKKMKNYWRQLLNAKLITQRKFDNLTKAERGGLSELDKAGFIKRQLVETRQITKHVAQILDSRMNTKYDENDKLIREVKVITLKSKLVSDFRKDFQFYKVREINNYHHAHDAYLNAVVGTALIKKYPKLESEFVYGDYKVYDVRKMIAKSEQEIGKATAKYFFYSNIMNFFKTEITLANGEIRKRPLIETNGETGEIVWDKGRDFATVRKVLSMPQVNIVKKTEVQTGGFSKESILPKRNSDKLIARKKDWDPKKYGGFDSPTVAYSVLVVAKVEKGKSKKLKSVKELLGITIMERSSFEKNPIDFLEAKGYKEVKKDLIIKLPKYSLFELENGRKRMLASAGELQKGNELALPSKYVNFLYLASHYEKLKGSPEDNEQKQLFVEQHKHYLDEIIEQISEFSKRVILADANLDKVLSAYNKHRDKPIREQAENIIHLFTLTNLGAPAAFKYFDTTIDRKRYTSTKEVLDATLIHQSITGLYETRIDLSQLGGDGGGSAGSAAGSGEFGGTLNLEDEYRLYETSAEPEVSPGSTWLSDFPQAWAETGGMGLAVRQAPLIIPLKATSTPVSIKQYPMSQEAKLGIKPHIQRLLDQGILVPCQSPWNTPLLPVKKPGTNDYRPVQDLREVNKRVEDIHPTVPNPYNLLSGLPPSHRWYTVLDLKDAFFCLRLHPTSQPLFAFEWRDPGMGISGQLTWTRLPQGFKNSPTLFNEALHRDLADFRIQHPDLILLQYVDDILLAATSELDCQQGTRALLLTLGNLGYRASAKKAQLCQKQVKYLGYLLKEGQRWLTEARKETVMGQPTPKTPRQLREFLGKAGFCRLFIPGFAEMAAPLYPLTKPGTLFNWGPDQQKAYQEIKQALLTAPALGLPDLTKPFELFVDEKQGYAKGVLTQKLGPWRRPVAYLSKKLDPVAAGWPPCLRMVAAIAVLRKDAGKLTMGQPLVILAPHAVEALVKQPPDRWLSNARMTHYQAMLLDTDRVQFGPVVALNPATLLPLPEEGAPHDCLEILAETHGTRPDLTDQPIPDADHTWYTDGSSFLQEGQRKAGAAVTTETEVIWARALPAGTSAQRAELIALTQALKMAEGKRLNVYTDSRYAFATAHIHGEIYRRRGWLTSEGREIKNKSEILALLKALFLPKRLSIIHCLGHQKGDSAEARGNRLADQAAREAAIKTPPDTSTLLAGKRTADGSEFEKRTADGSEFESPKKKAKVE

SEQ ID NO: 1871 - protein, 2096 aa, synthetic construct
MPAAKRVKLDGGDKKYSIGLDIGTNSVGWAVITDEYKVPSKKFKVLGNTDRHSIKKNLIGALLFDSGETAEATRLKRTARRRYTRRKNRICYLQEIFSNEMAKVDDSFFHRLEESFLVEEDKKHERHPIFGNIVDEVAYHEKYPTIYHLRKKLVDSTDKADLRLIYLALAHMIKFRGHFLIEGDLNPDNSDVDKLFIQLVQTYNQLFEENPINASGVDAKAILSARLSKSRRLENLIAQLPGEKKNGLFGNLIALSLGLTPNFKSNFDLAEDAKLQLSKDTYDDDLDNLLAQIGDQYADLFLAAKNLSDAILLSDILRVNTEITKAPLSASMIKRYDEHHQDLTLLKALVRQQLPEKYKEIFFDQSKNGYAGYIDGGASQEEFYKFIKPILEKMDGTEELLVKLNREDLLRKQRTFDNGSIPHQIHLGELHAILRRQEDFYPFLKDNREKIEKILTFRIPYYVGPLARGNSRFAWMTRKSEETITPWNFEEVVDKGASAQSFIERMTNFDKNLPNEKVLPKHSLLYEYFTVYNELTKVKYVTEGMRKPAFLSGEQKKAIVDLLFKTNRKVTVKQLKEDYFKKIECFDSVEISGVEDRFNASLGTYHDLLKIIKDKDFLDNEENEDILEDIVLTLTLFEDREMIEERLKTYAHLFDDKVMKQLKRRRYTGWGRLSRKLINGIRDKQSGKTILDFLKSDGFANRNFMQLIHDDSLTFKEDIQKAQVSGQGDSLHEHIANLAGSPAIKKGILQTVKVVDELVKVMGRHKPENIVIEMARENQTTQKGQKNSRERMKRIEEGIKELGSQILKEHPVENTQLQNEKLYLYYLQNGRDMYVDQELDINRLSDYDVDHIVPQSFLKDDSIDNKVLTRSDKARGKSDNVPSEEVVKKMKNYWRQLLNAKLITQRKFDNLTKAERGGLSELDKAGFIKRQLVETRQITKHVAQILDSRMNTKYDENDKLIREVKVITLKSKLVSDFRKDFQFYKVREINNYHHAHDAYLNAVVGTALIKKYPKLESEFVYGDYKVYDVRKMIAKSEQEIGKATAKYFFYSNIMNFFKTEITLANGEIRKRPLIETNGETGEIVWDKGRDFATVRKVLSMPQVNIVKKTEVQTGGFSKESILPKRNSDKLIARKKDWDPKKYGGFDSPTVAYSVLVVAKVEKGKSKKLKSVKELLGITIMERSSFEKNPIDFLEAKGYKEVKKDLIIKLPKYSLFELENGRKRMLASAGELQKGNELALPSKYVNFLYLASHYEKLKGSPEDNEQKQLFVEQHKHYLDEIIEQISEFSKRVILADANLDKVLSAYNKHRDKPIREQAENIIHLFTLTNLGAPAAFKYFDTTIDRKRYTSTKEVLDATLIHQSITGLYETRIDLSQLGGDGGEAAAKPAPGGSGGTLNLEDEYRLYETSAEPEVSPGSTWLSDFPQAWAETGGMGLAVRQAPLIIPLKATSTPVSIKQYPMSQEAKLGIKPHIQRLLDQGILVPCQSPWNTPLLPVKKPGTNDYRPVQDLREVNKRVEDIHPTVPNPYNLLSGLPPSHRWYTVLDLKDAFFCLRLHPTSQPLFAFEWRDPGMGISGQLTWTRLPQGFKNSPTLFNEALHRDLADFRIQHPDLILLQYVDDILLAATSELDCQQGTRALLLTLGNLGYRASAKKAQLCQKQVKYLGYLLKEGQRWLTEARKETVMGQPTPKTPRQLREFLGKAGFCRLFIPGFAEMAAPLYPLTKPGTLFNWGPDQQKAYQEIKQALLTAPALGLPDLTKPFELFVDEKQGYAKGVLTQKLGPWRRPVAYLSKKLDPVAAGWPPCLRMVAAIAVLRKDAGKLTMGQPLVILAPHAVEALVKQPPDRWLSNARMTHYQAMLLDTDRVQFGPVVALNPATLLPLPEEGAPHDCLEILAETHGTRPDLTDQPIPDADHTWYTDGSSFLQEGQRKAGAAVTTETEVIWARALPAGTSAQRAELIALTQALKMAEGKRLNVYTDSRYAFATAHIHGEIYRRRGWLTSEGREIKNKSEILALLKALFLPKRLSIIHCLGHQKGDSAEARGNRLADQAAREAAIKTPPDTSTLLAGKRTADGSEFEKRTADGSEFESPKKKAKVE

SEQ ID NO: 1872 - protein, 2096 aa, synthetic construct
MPAAKRVKLDGGDKKYSIGLDIGTNSVGWAVITDEYKVPSKKFKVLGNTDRHSIKKNLIGALLFDSGETAEATRLKRTARRRYTRRKNRICYLQEIFSNEMAKVDDSFFHRLEESFLVEEDKKHERHPIFGNIVDEVAYHEKYPTIYHLRKKLVDSTDKADLRLIYLALAHMIKFRGHFLIEGDLNPDNSDVDKLFIQLVQTYNQLFEENPINASGVDAKAILSARLSKSRRLENLIAQLPGEKKNGLFGNLIALSLGLTPNFKSNFDLAEDAKLQLSKDTYDDDLDNLLAQIGDQYADLFLAAKNLSDAILLSDILRVNTEITKAPLSASMIKRYDEHHQDLTLLKALVRQQLPEKYKEIFFDQSKNGYAGYIDGGASQEEFYKFIKPILEKMDGTEELLVKLNREDLLRKQRTFDNGSIPHQIHLGELHAILRRQEDFYPFLKDNREKIEKILTFRIPYYVGPLARGNSRFAWMTRKSEETITPWNFEEVVDKGASAQSFIERMTNFDKNLPNEKVLPKHSLLYEYFTVYNELTKVKYVTEGMRKPAFLSGEQKKAIVDLLFKTNRKVTVKQLKEDYFKKIECFDSVEISGVEDRFNASLGTYHDLLKIIKDKDFLDNEENEDILEDIVLTLTLFEDREMIEERLKTYAHLFDDKVMKQLKRRRYTGWGRLSRKLINGIRDKQSGKTILDFLKSDGFANRNFMQLIHDDSLTFKEDIQKAQVSGQGDSLHEHIANLAGSPAIKKGILQTVKVVDELVKVMGRHKPENIVIEMARENQTTQKGQKNSRERMKRIEEGIKELGSQILKEHPVENTQLQNEKLYLYYLQNGRDMYVDQELDINRLSDYDVDHIVPQSFLKDDSIDNKVLTRSDKARGKSDNVPSEEVVKKMKNYWRQLLNAKLITQRKFDNLTKAERGGLSELDKAGFIKRQLVETRQITKHVAQILDSRMNTKYDENDKLIREVKVITLKSKLVSDFRKDFQFYKVREINNYHHAHDAYLNAVVGTALIKKYPKLESEFVYGDYKVYDVRKMIAKSEQEIGKATAKYFFYSNIMNFFKTEITLANGEIRKRPLIETNGETGEIVWDKGRDFATVRKVLSMPQVNIVKKTEVQTGGFSKESILPKRNSDKLIARKKDWDPKKYGGFDSPTVAYSVLVVAKVEKGKSKKLKSVKELLGITIMERSSFEKNPIDFLEAKGYKEVKKDLIIKLPKYSLFELENGRKRMLASAGELQKGNELALPSKYVNFLYLASHYEKLKGSPEDNEQKQLFVEQHKHYLDEIIEQISEFSKRVILADANLDKVLSAYNKHRDKPIREQAENIIHLFTLTNLGAPAAFKYFDTTIDRKRYTSTKEVLDATLIHQSITGLYETRIDLSQLGGDGGEAAAKGSSPAPGGTLNLEDEYRLYETSAEPEVSPGSTWLSDFPQAWAETGGMGLAVRQAPLIIPLKATSTPVSIKQYPMSQEAKLGIKPHIQRLLDQGILVPCQSPWNTPLLPVKKPGTNDYRPVQDLREVNKRVEDIHPTVPNPYNLLSGLPPSHRWYTVLDLKDAFFCLRLHPTSQPLFAFEWRDPGMGISGQLTWTRLPQGFKNSPTLFNEALHRDLADFRIQHPDLILLQYVDDILLAATSELDCQQGTRALLLTLGNLGYRASAKKAQLCQKQVKYLGYLLKEGQRWLTEARKETVMGQPTPKTPRQLREFLGKAGFCRLFIPGFAEMAAPLYPLTKPGTLFNWGPDQQKAYQEIKQALLTAPALGLPDLTKPFELFVDEKQGYAKGVLTQKLGPWRRPVAYLSKKLDPVAAGWPPCLRMVAAIAVLRKDAGKLTMGQPLVILAPHAVEALVKQPPDRWLSNARMTHYQAMLLDTDRVQFGPVVALNPATLLPLPEEGAPHDCLEILAETHGTRPDLTDQPIPDADHTWYTDGSSFLQEGQRKAGAAVTTETEVIWARALPAGTSAQRAELIALTQALKMAEGKRLNVYTDSRYAFATAHIHGEIYRRRGWLTSEGREIKNKSEILALLKALFLPKRLSIIHCLGHQKGDSAEARGNRLADQAAREAAIKTPPDTSTLLAGKRTADGSEFEKRTADGSEFESPKKKAKVE

SEQ ID NO: 1873 - protein, 2091 aa, synthetic construct
MPAAKRVKLDGGDKKYSIGLDIGTNSVGWAVITDEYKVPSKKFKVLGNTDRHSIKKNLIGALLFDSGETAEATRLKRTARRRYTRRKNRICYLQEIFSNEMAKVDDSFFHRLEESFLVEEDKKHERHPIFGNIVDEVAYHEKYPTIYHLRKKLVDSTDKADLRLIYLALAHMIKFRGHFLIEGDLNPDNSDVDKLFIQLVQTYNQLFEENPINASGVDAKAILSARLSKSRRLENLIAQLPGEKKNGLFGNLIALSLGLTPNFKSNFDLAEDAKLQLSKDTYDDDLDNLLAQIGDQYADLFLAAKNLSDAILLSDILRVNTEITKAPLSASMIKRYDEHHQDLTLLKALVRQQLPEKYKEIFFDQSKNGYAGYIDGGASQEEFYKFIKPILEKMDGTEELLVKLNREDLLRKQRTFDNGSIPHQIHLGELHAILRRQEDFYPFLKDNREKIEKILTFRIPYYVGPLARGNSRFAWMTRKSEETITPWNFEEVVDKGASAQSFIERMTNFDKNLPNEKVLPKHSLLYEYFTVYNELTKVKYVTEGMRKPAFLSGEQKKAIVDLLFKTNRKVTVKQLKEDYFKKIECFDSVEISGVEDRFNASLGTYHDLLKIIKDKDFLDNEENEDILEDIVLTLTLFEDREMIEERLKTYAHLFDDKVMKQLKRRRYTGWGRLSRKLINGIRDKQSGKTILDFLKSDGFANRNFMQLIHDDSLTFKEDIQKAQVSGQGDSLHEHIANLAGSPAIKKGILQTVKVVDELVKVMGRHKPENIVIEMARENQTTQKGQKNSRERMKRIEEGIKELGSQILKEHPVENTQLQNEKLYLYYLQNGRDMYVDQELDINRLSDYDVDHIVPQSFLKDDSIDNKVLTRSDKARGKSDNVPSEEVVKKMKNYWRQLLNAKLITQRKFDNLTKAERGGLSELDKAGFIKRQLVETRQITKHVAQILDSRMNTKYDENDKLIREVKVITLKSKLVSDFRKDFQFYKVREINNYHHAHDAYLNAVVGTALIKKYPKLESEFVYGDYKVYDVRKMIAKSEQEIGKATAKYFFYSNIMNFFKTEITLANGEIRKRPLIETNGETGEIVWDKGRDFATVRKVLSMPQVNIVKKTEVQTGGFSKESILPKRNSDKLIARKKDWDPKKYGGFDSPTVAYSVLVVAKVEKGKSKKLKSVKELLGITIMERSSFEKNPIDFLEAKGYKEVKKDLIIKLPKYSLFELENGRKRMLASAGELQKGNELALPSKYVNFLYLASHYEKLKGSPEDNEQKQLFVEQHKHYLDEIIEQISEFSKRVILADANLDKVLSAYNKHRDKPIREQAENIIHLFTLTNLGAPAAFKYFDTTIDRKRYTSTKEVLDATLIHQSITGLYETRIDLSQLGGDGGGGGGGGGGTLNLEDEYRLYETSAEPEVSPGSTWLSDFPQAWAETGGMGLAVRQAPLIIPLKATSTPVSIKQYPMSQEAKLGIKPHIQRLLDQGILVPCQSPWNTPLLPVKKPGTNDYRPVQDLREVNKRVEDIHPTVPNPYNLLSGLPPSHRWYTVLDLKDAFFCLRLHPTSQPLFAFEWRDPGMGISGQLTWTRLPQGFKNSPTLFNEALHRDLADFRIQHPDLILLQYVDDILLAATSELDCQQGTRALLLTLGNLGYRASAKKAQLCQKQVKYLGYLLKEGQRWLTEARKETVMGQPTPKTPRQLREFLGKAGFCRLFIPGFAEMAAPLYPLTKPGTLFNWGPDQQKAYQEIKQALLTAPALGLPDLTKPFELFVDEKQGYAKGVLTQKLGPWRRPVAYLSKKLDPVAAGWPPCLRMVAAIAVLRKDAGKLTMGQPLVILAPHAVEALVKQPPDRWLSNARMTHYQAMLLDTDRVQFGPVVALNPATLLPLPEEGAPHDCLEILAETHGTRPDLTDQPIPDADHTWYTDGSSFLQEGQRKAGAAVTTETEVIWARALPAGTSAQRAELIALTQALKMAEGKRLNVYTDSRYAFATAHIHGEIYRRRGWLTSEGREIKNKSEILALLKALFLPKRLSIIHCLGHQKGDSAEARGNRLADQAAREAAIKTPPDTSTLLAGKRTADGSEFEKRTADGSEFESPKKKAKVE

SEQ ID NO: 1874 - protein, 2094 aa, synthetic construct
MPAAKRVKLDGGDKKYSIGLDIGTNSVGWAVITDEYKVPSKKFKVLGNTDRHSIKKNLIGALLFDSGETAEATRLKRTARRRYTRRKNRICYLQEIFSNEMAKVDDSFFHRLEESFLVEEDKKHERHPIFGNIVDEVAYHEKYPTIYHLRKKLVDSTDKADLRLIYLALAHMIKFRGHFLIEGDLNPDNSDVDKLFIQLVQTYNQLFEENPINASGVDAKAILSARLSKSRRLENLIAQLPGEKKNGLFGNLIALSLGLTPNFKSNFDLAEDAKLQLSKDTYDDDLDNLLAQIGDQYADLFLAAKNLSDAILLSDILRVNTEITKAPLSASMIKRYDEHHQDLTLLKALVRQQLPEKYKEIFFDQSKNGYAGYIDGGASQEEFYKFIKPILEKMDGTEELLVKLNREDLLRKQRTFDNGSIPHQIHLGELHAILRRQEDFYPFLKDNREKIEKILTFRIPYYVGPLARGNSRFAWMTRKSEETITPWNFEEVVDKGASAQSFIERMTNFDKNLPNEKVLPKHSLLYEYFTVYNELTKVKYVTEGMRKPAFLSGEQKKAIVDLLFKTNRKVTVKQLKEDYFKKIECFDSVEISGVEDRFNASLGTYHDLLKIIKDKDFLDNEENEDILEDIVLTLTLFEDREMIEERLKTYAHLFDDKVMKQLKRRRYTGWGRLSRKLINGIRDKQSGKTILDFLKSDGFANRNFMQLIHDDSLTFKEDIQKAQVSGQGDSLHEHIANLAGSPAIKKGILQTVKVVDELVKVMGRHKPENIVIEMARENQTTQKGQKNSRERMKRIEEGIKELGSQILKEHPVENTQLQNEKLYLYYLQNGRDMYVDQELDINRLSDYDVDHIVPQSFLKDDSIDNKVLTRSDKARGKSDNVPSEEVVKKMKNYWRQLLNAKLITQRKFDNLTKAERGGLSELDKAGFIKRQLVETRQITKHVAQILDSRMNTKYDENDKLIREVKVITLKSKLVSDFRKDFQFYKVREINNYHHAHDAYLNAVVGTALIKKYPKLESEFVYGDYKVYDVRKMIAKSEQEIGKATAKYFFYSNIMNFFKTEITLANGEIRKRPLIETNGETGEIVWDKGRDFATVRKVLSMPQVNIVKKTEVQTGGFSKESILPKRNSDKLIARKKDWDPKKYGGFDSPTVAYSVLVVAKVEKGKSKKLKSVKELLGITIMERSSFEKNPIDFLEAKGYKEVKKDLIIKLPKYSLFELENGRKRMLASAGELQKGNELALPSKYVNFLYLASHYEKLKGSPEDNEQKQLFVEQHKHYLDEIIEQISEFSKRVILADANLDKVLSAYNKHRDKPIREQAENIIHLFTLTNLGAPAAFKYFDTTIDRKRYTSTKEVLDATLIHQSITGLYETRIDLSQLGGDGGGSSPAPGGGGGTLNLEDEYRLYETSAEPEVSPGSTWLSDFPQAWAETGGMGLAVRQAPLIIPLKATSTPVSIKQYPMSQEAKLGIKPHIQRLLDQGILVPCQSPWNTPLLPVKKPGTNDYRPVQDLREVNKRVEDIHPTVPNPYNLLSGLPPSHRWYTVLDLKDAFFCLRLHPTSQPLFAFEWRDPGMGISGQLTWTRLPQGFKNSPTLFNEALHRDLADFRIQHPDLILLQYVDDILLAATSELDCQQGTRALLLTLGNLGYRASAKKAQLCQKQVKYLGYLLKEGQRWLTEARKETVMGQPTPKTPRQLREFLGKAGFCRLFIPGFAEMAAPLYPLTKPGTLFNWGPDQQKAYQEIKQALLTAPALGLPDLTKPFELFVDEKQGYAKGVLTQKLGPWRRPVAYLSKKLDPVAAGWPPCLRMVAAIAVLRKDAGKLTMGQPLVILAPHAVEALVKQPPDRWLSNARMTHYQAMLLDTDRVQFGPVVALNPATLLPLPEEGAPHDCLEILAETHGTRPDLTDQPIPDADHTWYTDGSSFLQEGQRKAGAAVTTETEVIWARALPAGTSAQRAELIALTQALKMAEGKRLNVYTDSRYAFATAHIHGEIYRRRGWLTSEGREIKNKSEILALLKALFLPKRLSIIHCLGHQKGDSAEARGNRLADQAAREAAIKTPPDTSTLLAGKRTADGSEFEKRTADGSEFESPKKKAKVE

SEQ ID NO: 1875 - protein, 2096 aa, synthetic construct
MPAAKRVKLDGGDKKYSIGLDIGTNSVGWAVITDEYKVPSKKFKVLGNTDRHSIKKNLIGALLFDSGETAEATRLKRTARRRYTRRKNRICYLQEIFSNEMAKVDDSFFHRLEESFLVEEDKKHERHPIFGNIVDEVAYHEKYPTIYHLRKKLVDSTDKADLRLIYLALAHMIKFRGHFLIEGDLNPDNSDVDKLFIQLVQTYNQLFEENPINASGVDAKAILSARLSKSRRLENLIAQLPGEKKNGLFGNLIALSLGLTPNFKSNFDLAEDAKLQLSKDTYDDDLDNLLAQIGDQYADLFLAAKNLSDAILLSDILRVNTEITKAPLSASMIKRYDEHHQDLTLLKALVRQQLPEKYKEIFFDQSKNGYAGYIDGGASQEEFYKFIKPILEKMDGTEELLVKLNREDLLRKQRTFDNGSIPHQIHLGELHAILRRQEDFYPFLKDNREKIEKILTFRIPYYVGPLARGNSRFAWMTRKSEETITPWNFEEVVDKGASAQSFIERMTNFDKNLPNEKVLPKHSLLYEYFTVYNELTKVKYVTEGMRKPAFLSGEQKKAIVDLLFKTNRKVTVKQLKEDYFKKIECFDSVEISGVEDRFNASLGTYHDLLKIIKDKDFLDNEENEDILEDIVLTLTLFEDREMIEERLKTYAHLFDDKVMKQLKRRRYTGWGRLSRKLINGIRDKQSGKTILDFLKSDGFANRNFMQLIHDDSLTFKEDIQKAQVSGQGDSLHEHIANLAGSPAIKKGILQTVKVVDELVKVMGRHKPENIVIEMARENQTTQKGQKNSRERMKRIEEGIKELGSQILKEHPVENTQLQNEKLYLYYLQNGRDMYVDQELDINRLSDYDVDHIVPQSFLKDDSIDNKVLTRSDKARGKSDNVPSEEVVKKMKNYWRQLLNAKLITQRKFDNLTKAERGGLSELDKAGFIKRQLVETRQITKHVAQILDSRMNTKYDENDKLIREVKVITLKSKLVSDFRKDFQFYKVREINNYHHAHDAYLNAVVGTALIKKYPKLESEFVYGDYKVYDVRKMIAKSEQEIGKATAKYFFYSNIMNFFKTEITLANGEIRKRPLIETNGETGEIVWDKGRDFATVRKVLSMPQVNIVKKTEVQTGGFSKESILPKRNSDKLIARKKDWDPKKYGGFDSPTVAYSVLVVAKVEKGKSKKLKSVKELLGITIMERSSFEKNPIDFLEAKGYKEVKKDLIIKLPKYSLFELENGRKRMLASAGELQKGNELALPSKYVNFLYLASHYEKLKGSPEDNEQKQLFVEQHKHYLDEIIEQISEFSKRVILADANLDKVLSAYNKHRDKPIREQAENIIHLFTLTNLGAPAAFKYFDTTIDRKRYTSTKEVLDATLIHQSITGLYETRIDLSQLGGDGGGSSGGGEAAAKGGTLNLEDEYRLYETSAEPEVSPGSTWLSDFPQAWAETGGMGLAVRQAPLIIPLKATSTPVSIKQYPMSQEAKLGIKPHIQRLLDQGILVPCQSPWNTPLLPVKKPGTNDYRPVQDLREVNKRVEDIHPTVPNPYNLLSGLPPSHRWYTVLDLKDAFFCLRLHPTSQPLFAFEWRDPGMGISGQLTWTRLPQGFKNSPTLFNEALHRDLADFRIQHPDLILLQYVDDILLAATSELDCQQGTRALLLTLGNLGYRASAKKAQLCQKQVKYLGYLLKEGQRWLTEARKETVMGQPTPKTPRQLREFLGKAGFCRLFIPGFAEMAAPLYPLTKPGTLFNWGPDQQKAYQEIKQALLTAPALGLPDLTKPFELFVDEKQGYAKGVLTQKLGPWRRPVAYLSKKLDPVAAGWPPCLRMVAAIAVLRKDAGKLTMGQPLVILAPHAVEALVKQPPDRWLSNARMTHYQAMLLDTDRVQFGPVVALNPATLLPLPEEGAPHDCLEILAETHGTRPDLTDQPIPDADHTWYTDGSSFLQEGQRKAGAAVTTETEVIWARALPAGTSAQRAELIALTQALKMAEGKRLNVYTDSRYAFATAHIHGEIYRRRGWLTSEGREIKNKSEILALLKALFLPKRLSIIHCLGHQKGDSAEARGNRLADQAAREAAIKTPPDTSTLLAGKRTADGSEFEKRTADGSEFESPKKKAKVE

SEQ ID NO: 1876 - protein, 2105 aa, synthetic construct
MPAAKRVKLDGGDKKYSIGLDIGTNSVGWAVITDEYKVPSKKFKVLGNTDRHSIKKNLIGALLFDSGETAEATRLKRTARRRYTRRKNRICYLQEIFSNEMAKVDDSFFHRLEESFLVEEDKKHERHPIFGNIVDEVAYHEKYPTIYHLRKKLVDSTDKADLRLIYLALAHMIKFRGHFLIEGDLNPDNSDVDKLFIQLVQTYNQLFEENPINASGVDAKAILSARLSKSRRLENLIAQLPGEKKNGLFGNLIALSLGLTPNFKSNFDLAEDAKLQLSKDTYDDDLDNLLAQIGDQYADLFLAAKNLSDAILLSDILRVNTEITKAPLSASMIKRYDEHHQDLTLLKALVRQQLPEKYKEIFFDQSKNGYAGYIDGGASQEEFYKFIKPILEKMDGTEELLVKLNREDLLRKQRTFDNGSIPHQIHLGELHAILRRQEDFYPFLKDNREKIEKILTFRIPYYVGPLARGNSRFAWMTRKSEETITPWNFEEVVDKGASAQSFIERMTNFDKNLPNEKVLPKHSLLYEYFTVYNELTKVKYVTEGMRKPAFLSGEQKKAIVDLLFKTNRKVTVKQLKEDYFKKIECFDSVEISGVEDRFNASLGTYHDLLKIIKDKDFLDNEENEDILEDIVLTLTLFEDREMIEERLKTYAHLFDDKVMKQLKRRRYTGWGRLSRKLINGIRDKQSGKTILDFLKSDGFANRNFMQLIHDDSLTFKEDIQKAQVSGQGDSLHEHIANLAGSPAIKKGILQTVKVVDELVKVMGRHKPENIVIEMARENQTTQKGQKNSRERMKRIEEGIKELGSQILKEHPVENTQLQNEKLYLYYLQNGRDMYVDQELDINRLSDYDVDHIVPQSFLKDDSIDNKVLTRSDKARGKSDNVPSEEVVKKMKNYWRQLLNAKLITQRKFDNLTKAERGGLSELDKAGFIKRQLVETRQITKHVAQILDSRMNTKYDENDKLIREVKVITLKSKLVSDFRKDFQFYKVREINNYHHAHDAYLNAVVGTALIKKYPKLESEFVYGDYKVYDVRKMIAKSEQEIGKATAKYFFYSNIMNFFKTEITLANGEIRKRPLIETNGETGEIVWDKGRDFATVRKVLSMPQVNIVKKTEVQTGGFSKESILPKRNSDKLIARKKDWDPKKYGGFDSPTVAYSVLVVAKVEKGKSKKLKSVKELLGITIMERSSFEKNPIDFLEAKGYKEVKKDLIIKLPKYSLFELENGRKRMLASAGELQKGNELALPSKYVNFLYLASHYEKLKGSPEDNEQKQLFVEQHKHYLDEIIEQISEFSKRVILADANLDKVLSAYNKHRDKPIREQAENIIHLFTLTNLGAPAAFKYFDTTIDRKRYTSTKEVLDATLIHQSITGLYETRIDLSQLGGDGGGGGGSGGGGSGGGGSGGGGSGGTLNLEDEYRLYETSAEPEVSPGSTWLSDFPQAWAETGGMGLAVRQAPLIIPLKATSTPVSIKQYPMSQEAKLGIKPHIQRLLDQGILVPCQSPWNTPLLPVKKPGTNDYRPVQDLREVNKRVEDIHPTVPNPYNLLSGLPPSHRWYTVLDLKDAFFCLRLHPTSQPLFAFEWRDPGMGISGQLTWTRLPQGFKNSPTLFNEALHRDLADFRIQHPDLILLQYVDDILLAATSELDCQQGTRALLLTLGNLGYRASAKKAQLCQKQVKYLGYLLKEGQRWLTEARKETVMGQPTPKTPRQLREFLGKAGFCRLFIPGFAEMAAPLYPLTKPGTLFNWGPDQQKAYQEIKQALLTAPALGLPDLTKPFELFVDEKQGYAKGVLTQKLGPWRRPVAYLSKKLDPVAAGWPPCLRMVAAIAVLRKDAGKLTMGQPLVILAPHAVEALVKQPPDRWLSNARMTHYQAMLLDTDRVQFGPVVALNPATLLPLPEEGAPHDCLEILAETHGTRPDLTDQPIPDADHTWYTDGSSFLQEGQRKAGAAVTTETEVIWARALPAGTSAQRAELIALTQALKMAEGKRLNVYTDSRYAFATAHIHGEIYRRRGWLTSEGREIKNKSEILALLKALFLPKRLSIIHCLGHQKGDSAEARGNRLADQAAREAAIKTPPDTSTLLAGKRTADGSEFEKRTADGSEFESPKKKAKVE

SEQ ID NO: 1877 - protein, 2097 aa, synthetic construct
MPAAKRVKLDGGDKKYSIGLDIGTNSVGWAVITDEYKVPSKKFKVLGNTDRHSIKKNLIGALLFDSGETAEATRLKRTARRRYTRRKNRICYLQEIFSNEMAKVDDSFFHRLEESFLVEEDKKHERHPIFGNIVDEVAYHEKYPTIYHLRKKLVDSTDKADLRLIYLALAHMIKFRGHFLIEGDLNPDNSDVDKLFIQLVQTYNQLFEENPINASGVDAKAILSARLSKSRRLENLIAQLPGEKKNGLFGNLIALSLGLTPNFKSNFDLAEDAKLQLSKDTYDDDLDNLLAQIGDQYADLFLAAKNLSDAILLSDILRVNTEITKAPLSASMIKRYDEHHQDLTLLKALVRQQLPEKYKEIFFDQSKNGYAGYIDGGASQEEFYKFIKPILEKMDGTEELLVKLNREDLLRKQRTFDNGSIPHQIHLGELHAILRRQEDFYPFLKDNREKIEKILTFRIPYYVGPLARGNSRFAWMTRKSEETITPWNFEEVVDKGASAQSFIERMTNFDKNLPNEKVLPKHSLLYEYFTVYNELTKVKYVTEGMRKPAFLSGEQKKAIVDLLFKTNRKVTVKQLKEDYFKKIECFDSVEISGVEDRFNASLGTYHDLLKIIKDKDFLDNEENEDILEDIVLTLTLFEDREMIEERLKTYAHLFDDKVMKQLKRRRYTGWGRLSRKLINGIRDKQSGKTILDFLKSDGFANRNFMQLIHDDSLTFKEDIQKAQVSGQGDSLHEHIANLAGSPAIKKGILQTVKVVDELVKVMGRHKPENIVIEMARENQTTQKGQKNSRERMKRIEEGIKELGSQILKEHPVENTQLQNEKLYLYYLQNGRDMYVDQELDINRLSDYDVDHIVPQSFLKDDSIDNKVLTRSDKARGKSDNVPSEEVVKKMKNYWRQLLNAKLITQRKFDNLTKAERGGLSELDKAGFIKRQLVETRQITKHVAQILDSRMNTKYDENDKLIREVKVITLKSKLVSDFRKDFQFYKVREINNYHHAHDAYLNAVVGTALIKKYPKLESEFVYGDYKVYDVRKMIAKSEQEIGKATAKYFFYSNIMNFFKTEITLANGEIRKRPLIETNGETGEIVWDKGRDFATVRKVLSMPQVNIVKKTEVQTGGFSKESILPKRNSDKLIARKKDWDPKKYGGFDSPTVAYSVLVVAKVEKGKSKKLKSVKELLGITIMERSSFEKNPIDFLEAKGYKEVKKDLIIKLPKYSLFELENGRKRMLASAGELQKGNELALPSKYVNFLYLASHYEKLKGSPEDNEQKQLFVEQHKHYLDEIIEQISEFSKRVILADANLDKVLSAYNKHRDKPIREQAENIIHLFTLTNLGAPAAFKYFDTTIDRKRYTSTKEVLDATLIHQSITGLYETRIDLSQLGGDGGGSSGSSGSSGSSGGTLNLEDEYRLYETSAEPEVSPGSTWLSDFPQAWAETGGMGLAVRQAPLIIPLKATSTPVSIKQYPMSQEAKLGIKPHIQRLLDQGILVPCQSPWNTPLLPVKKPGTNDYRPVQDLREVNKRVEDIHPTVPNPYNLLSGLPPSHRWYTVLDLKDAFFCLRLHPTSQPLFAFEWRDPGMGISGQLTWTRLPQGFKNSPTLFNEALHRDLADFRIQHPDLILLQYVDDILLAATSELDCQQGTRALLLTLGNLGYRASAKKAQLCQKQVKYLGYLLKEGQRWLTEARKETVMGQPTPKTPRQLREFLGKAGFCRLFIPGFAEMAAPLYPLTKPGTLFNWGPDQQKAYQEIKQALLTAPALGLPDLTKPFELFVDEKQGYAKGVLTQKLGPWRRPVAYLSKKLDPVAAGWPPCLRMVAAIAVLRKDAGKLTMGQPLVILAPHAVEALVKQPPDRWLSNARMTHYQAMLLDTDRVQFGPVVALNPATLLPLPEEGAPHDCLEILAETHGTRPDLTDQPIPDADHTWYTDGSSFLQEGQRKAGAAVTTETEVIWARALPAGTSAQRAELIALTQALKMAEGKRLNVYTDSRYAFATAHIHGEIYRRRGWLTSEGREIKNKSEILALLKALFLPKRLSIIHCLGHQKGDSAEARGNRLADQAAREAAIKTPPDTSTLLAGKRTADGSEFEKRTADGSEFESPKKKAKVE

SEQ ID NO: 1878 - protein, 2096 aa, synthetic construct
MPAAKRVKLDGGDKKYSIGLDIGTNSVGWAVITDEYKVPSKKFKVLGNTDRHSIKKNLIGALLFDSGETAEATRLKRTARRRYTRRKNRICYLQEIFSNEMAKVDDSFFHRLEESFLVEEDKKHERHPIFGNIVDEVAYHEKYPTIYHLRKKLVDSTDKADLRLIYLALAHMIKFRGHFLIEGDLNPDNSDVDKLFIQLVQTYNQLFEENPINASGVDAKAILSARLSKSRRLENLIAQLPGEKKNGLFGNLIALSLGLTPNFKSNFDLAEDAKLQLSKDTYDDDLDNLLAQIGDQYADLFLAAKNLSDAILLSDILRVNTEITKAPLSASMIKRYDEHHQDLTLLKALVRQQLPEKYKEIFFDQSKNGYAGYIDGGASQEEFYKFIKPILEKMDGTEELLVKLNREDLLRKQRTFDNGSIPHQIHLGELHAILRRQEDFYPFLKDNREKIEKILTFRIPYYVGPLARGNSRFAWMTRKSEETITPWNFEEVVDKGASAQSFIERMTNFDKNLPNEKVLPKHSLLYEYFTVYNELTKVKYVTEGMRKPAFLSGEQKKAIVDLLFKTNRKVTVKQLKEDYFKKIECFDSVEISGVEDRFNASLGTYHDLLKIIKDKDFLDNEENEDILEDIVLTLTLFEDREMIEERLKTYAHLFDDKVMKQLKRRRYTGWGRLSRKLINGIRDKQSGKTILDFLKSDGFANRNFMQLIHDDSLTFKEDIQKAQVSGQGDSLHEHIANLAGSPAIKKGILQTVKVVDELVKVMGRHKPENIVIEMARENQTTQKGQKNSRERMKRIEEGIKELGSQILKEHPVENTQLQNEKLYLYYLQNGRDMYVDQELDINRLSDYDVDHIVPQSFLKDDSIDNKVLTRSDKARGKSDNVPSEEVVKKMKNYWRQLLNAKLITQRKFDNLTKAERGGLSELDKAGFIKRQLVETRQITKHVAQILDSRMNTKYDENDKLIREVKVITLKSKLVSDFRKDFQFYKVREINNYHHAHDAYLNAVVGTALIKKYPKLESEFVYGDYKVYDVRKMIAKSEQEIGKATAKYFFYSNIMNFFKTEITLANGEIRKRPLIETNGETGEIVWDKGRDFATVRKVLSMPQVNIVKKTEVQTGGFSKESILPKRNSDKLIARKKDWDPKKYGGFDSPTVAYSVLVVAKVEKGKSKKLKSVKELLGITIMERSSFEKNPIDFLEAKGYKEVKKDLIIKLPKYSLFELENGRKRMLASAGELQKGNELALPSKYVNFLYLASHYEKLKGSPEDNEQKQLFVEQHKHYLDEIIEQISEFSKRVILADANLDKVLSAYNKHRDKPIREQAENIIHLFTLTNLGAPAAFKYFDTTIDRKRYTSTKEVLDATLIHQSITGLYETRIDLSQLGGDGGGGGEAAAKGSSGGTLNLEDEYRLYETSAEPEVSPGSTWLSDFPQAWAETGGMGLAVRQAPLIIPLKATSTPVSIKQYPMSQEAKLGIKPHIQRLLDQGILVPCQSPWNTPLLPVKKPGTNDYRPVQDLREVNKRVEDIHPTVPNPYNLLSGLPPSHRWYTVLDLKDAFFCLRLHPTSQPLFAFEWRDPGMGISGQLTWTRLPQGFKNSPTLFNEALHRDLADFRIQHPDLILLQYVDDILLAATSELDCQQGTRALLLTLGNLGYRASAKKAQLCQKQVKYLGYLLKEGQRWLTEARKETVMGQPTPKTPRQLREFLGKAGFCRLFIPGFAEMAAPLYPLTKPGTLFNWGPDQQKAYQEIKQALLTAPALGLPDLTKPFELFVDEKQGYAKGVLTQKLGPWRRPVAYLSKKLDPVAAGWPPCLRMVAAIAVLRKDAGKLTMGQPLVILAPHAVEALVKQPPDRWLSNARMTHYQAMLLDTDRVQFGPVVALNPATLLPLPEEGAPHDCLEILAETHGTRPDLTDQPIPDADHTWYTDGSSFLQEGQRKAGAAVTTETEVIWARALPAGTSAQRAELIALTQALKMAEGKRLNVYTDSRYAFATAHIHGEIYRRRGWLTSEGREIKNKSEILALLKALFLPKRLSIIHCLGHQKGDSAEARGNRLADQAAREAAIKTPPDTSTLLAGKRTADGSEFEKRTADGSEFESPKKKAKVE

SEQ ID NO: 1879 - protein, 2100 aa, synthetic construct
MPAAKRVKLDGGDKKYSIGLDIGTNSVGWAVITDEYKVPSKKFKVLGNTDRHSIKKNLIGALLFDSGETAEATRLKRTARRRYTRRKNRICYLQEIFSNEMAKVDDSFFHRLEESFLVEEDKKHERHPIFGNIVDEVAYHEKYPTIYHLRKKLVDSTDKADLRLIYLALAHMIKFRGHFLIEGDLNPDNSDVDKLFIQLVQTYNQLFEENPINASGVDAKAILSARLSKSRRLENLIAQLPGEKKNGLFGNLIALSLGLTPNFKSNFDLAEDAKLQLSKDTYDDDLDNLLAQIGDQYADLFLAAKNLSDAILLSDILRVNTEITKAPLSASMIKRYDEHHQDLTLLKALVRQQLPEKYKEIFFDQSKNGYAGYIDGGASQEEFYKFIKPILEKMDGTEELLVKLNREDLLRKQRTFDNGSIPHQIHLGELHAILRRQEDFYPFLKDNREKIEKILTFRIPYYVGPLARGNSRFAWMTRKSEETITPWNFEEVVDKGASAQSFIERMTNFDKNLPNEKVLPKHSLLYEYFTVYNELTKVKYVTEGMRKPAFLSGEQKKAIVDLLFKTNRKVTVKQLKEDYFKKIECFDSVEISGVEDRFNASLGTYHDLLKIIKDKDFLDNEENEDILEDIVLTLTLFEDREMIEERLKTYAHLFDDKVMKQLKRRRYTGWGRLSRKLINGIRDKQSGKTILDFLKSDGFANRNFMQLIHDDSLTFKEDIQKAQVSGQGDSLHEHIANLAGSPAIKKGILQTVKVVDELVKVMGRHKPENIVIEMARENQTTQKGQKNSRERMKRIEEGIKELGSQILKEHPVENTQLQNEKLYLYYLQNGRDMYVDQELDINRLSDYDVDHIVPQSFLKDDSIDNKVLTRSDKARGKSDNVPSEEVVKKMKNYWRQLLNAKLITQRKFDNLTKAERGGLSELDKAGFIKRQLVETRQITKHVAQILDSRMNTKYDENDKLIREVKVITLKSKLVSDFRKDFQFYKVREINNYHHAHDAYLNAVVGTALIKKYPKLESEFVYGDYKVYDVRKMIAKSEQEIGKATAKYFFYSNIMNFFKTEITLANGEIRKRPLIETNGETGEIVWDKGRDFATVRKVLSMPQVNIVKKTEVQTGGFSKESILPKRNSDKLIARKKDWDPKKYGGFDSPTVAYSVLVVAKVEKGKSKKLKSVKELLGITIMERSSFEKNPIDFLEAKGYKEVKKDLIIKLPKYSLFELENGRKRMLASAGELQKGNELALPSKYVNFLYLASHYEKLKGSPEDNEQKQLFVEQHKHYLDEIIEQISEFSKRVILADANLDKVLSAYNKHRDKPIREQAENIIHLFTLTNLGAPAAFKYFDTTIDRKRYTSTKEVLDATLIHQSITGLYETRIDLSQLGGDGGEAAAKEAAAKEAAAKGGTLNLEDEYRLYETSAEPEVSPGSTWLSDFPQAWAETGGMGLAVRQAPLIIPLKATSTPVSIKQYPMSQEAKLGIKPHIQRLLDQGILVPCQSPWNTPLLPVKKPGTNDYRPVQDLREVNKRVEDIHPTVPNPYNLLSGLPPSHRWYTVLDLKDAFFCLRLHPTSQPLFAFEWRDPGMGISGQLTWTRLPQGFKNSPTLFNEALHRDLADFRIQHPDLILLQYVDDILLAATSELDCQQGTRALLLTLGNLGYRASAKKAQLCQKQVKYLGYLLKEGQRWLTEARKETVMGQPTPKTPRQLREFLGKAGFCRLFIPGFAEMAAPLYPLTKPGTLFNWGPDQQKAYQEIKQALLTAPALGLPDLTKPFELFVDEKQGYAKGVLTQKLGPWRRPVAYLSKKLDPVAAGWPPCLRMVAAIAVLRKDAGKLTMGQPLVILAPHAVEALVKQPPDRWLSNARMTHYQAMLLDTDRVQFGPVVALNPATLLPLPEEGAPHDCLEILAETHGTRPDLTDQPIPDADHTWYTDGSSFLQEGQRKAGAAVTTETEVIWARALPAGTSAQRAELIALTQALKMAEGKRLNVYTDSRYAFATAHIHGEIYRRRGWLTSEGREIKNKSEILALLKALFLPKRLSIIHCLGHQKGDSAEARGNRLADQAAREAAIKTPPDTSTLLAGKRTADGSEFEKRTADGSEFESPKKKAKVE

SEQ ID NO: 1880 - protein, 2103 aa, synthetic construct
MPAAKRVKLDGGDKKYSIGLDIGTNSVGWAVITDEYKVPSKKFKVLGNTDRHSIKKNLIGALLFDSGETAEATRLKRTARRRYTRRKNRICYLQEIFSNEMAKVDDSFFHRLEESFLVEEDKKHERHPIFGNIVDEVAYHEKYPTIYHLRKKLVDSTDKADLRLIYLALAHMIKFRGHFLIEGDLNPDNSDVDKLFIQLVQTYNQLFEENPINASGVDAKAILSARLSKSRRLENLIAQLPGEKKNGLFGNLIALSLGLTPNFKSNFDLAEDAKLQLSKDTYDDDLDNLLAQIGDQYADLFLAAKNLSDAILLSDILRVNTEITKAPLSASMIKRYDEHHQDLTLLKALVRQQLPEKYKEIFFDQSKNGYAGYIDGGASQEEFYKFIKPILEKMDGTEELLVKLNREDLLRKQRTFDNGSIPHQIHLGELHAILRRQEDFYPFLKDNREKIEKILTFRIPYYVGPLARGNSRFAWMTRKSEETITPWNFEEVVDKGASAQSFIERMTNFDKNLPNEKVLPKHSLLYEYFTVYNELTKVKYVTEGMRKPAFLSGEQKKAIVDLLFKTNRKVTVKQLKEDYFKKIECFDSVEISGVEDRFNASLGTYHDLLKIIKDKDFLDNEENEDILEDIVLTLTLFEDREMIEERLKTYAHLFDDKVMKQLKRRRYTGWGRLSRKLINGIRDKQSGKTILDFLKSDGFANRNFMQLIHDDSLTFKEDIQKAQVSGQGDSLHEHIANLAGSPAIKKGILQTVKVVDELVKVMGRHKPENIVIEMARENQTTQKGQKNSRERMKRIEEGIKELGSQILKEHPVENTQLQNEKLYLYYLQNGRDMYVDQELDINRLSDYDVDHIVPQSFLKDDSIDNKVLTRSDKARGKSDNVPSEEVVKKMKNYWRQLLNAKLITQRKFDNLTKAERGGLSELDKAGFIKRQLVETRQITKHVAQILDSRMNTKYDENDKLIREVKVITLKSKLVSDFRKDFQFYKVREINNYHHAHDAYLNAVVGTALIKKYPKLESEFVYGDYKVYDVRKMIAKSEQEIGKATAKYFFYSNIMNFFKTEITLANGEIRKRPLIETNGETGEIVWDKGRDFATVRKVLSMPQVNIVKKTEVQTGGFSKESILPKRNSDKLIARKKDWDPKKYGGFDSPTVAYSVLVVAKVEKGKSKKLKSVKELLGITIMERSSFEKNPIDFLEAKGYKEVKKDLIIKLPKYSLFELENGRKRMLASAGELQKGNELALPSKYVNFLYLASHYEKLKGSPEDNEQKQLFVEQHKHYLDEIIEQISEFSKRVILADANLDKVLSAYNKHRDKPIREQAENIIHLFTLTNLGAPAAFKYFDTTIDRKRYTSTKEVLDATLIHQSITGLYETRIDLSQLGGDGGGGSGGSGGSGGSGGSGGSGGTLNLEDEYRLYETSAEPEVSPGSTWLSDFPQAWAETGGMGLAVRQAPLIIPLKATSTPVSIKQYPMSQEAKLGIKPHIQRLLDQGILVPCQSPWNTPLLPVKKPGTNDYRPVQDLREVNKRVEDIHPTVPNPYNLLSGLPPSHRWYTVLDLKDAFFCLRLHPTSQPLFAFEWRDPGMGISGQLTWTRLPQGFKNSPTLFNEALHRDLADFRIQHPDLILLQYVDDILLAATSELDCQQGTRALLLTLGNLGYRASAKKAQLCQKQVKYLGYLLKEGQRWLTEARKETVMGQPTPKTPRQLREFLGKAGFCRLFIPGFAEMAAPLYPLTKPGTLFNWGPDQQKAYQEIKQALLTAPALGLPDLTKPFELFVDEKQGYAKGVLTQKLGPWRRPVAYLSKKLDPVAAGWPPCLRMVAAIAVLRKDAGKLTMGQPLVILAPHAVEALVKQPPDRWLSNARMTHYQAMLLDTDRVQFGPVVALNPATLLPLPEEGAPHDCLEILAETHGTRPDLTDQPIPDADHTWYTDGSSFLQEGQRKAGAAVTTETEVIWARALPAGTSAQRAELIALTQALKMAEGKRLNVYTDSRYAFATAHIHGEIYRRRGWLTSEGREIKNKSEILALLKALFLPKRLSIIHCLGHQKGDSAEARGNRLADQAAREAAIKTPPDTSTLLAGKRTADGSEFEKRTADGSEFESPKKKAKVE

SEQ ID NO: 1881 - protein, 2094 aa, synthetic construct
MPAAKRVKLDGGDKKYSIGLDIGTNSVGWAVITDEYKVPSKKFKVLGNTDRHSIKKNLIGALLFDSGETAEATRLKRTARRRYTRRKNRICYLQEIFSNEMAKVDDSFFHRLEESFLVEEDKKHERHPIFGNIVDEVAYHEKYPTIYHLRKKLVDSTDKADLRLIYLALAHMIKFRGHFLIEGDLNPDNSDVDKLFIQLVQTYNQLFEENPINASGVDAKAILSARLSKSRRLENLIAQLPGEKKNGLFGNLIALSLGLTPNFKSNFDLAEDAKLQLSKDTYDDDLDNLLAQIGDQYADLFLAAKNLSDAILLSDILRVNTEITKAPLSASMIKRYDEHHQDLTLLKALVRQQLPEKYKEIFFDQSKNGYAGYIDGGASQEEFYKFIKPILEKMDGTEELLVKLNREDLLRKQRTFDNGSIPHQIHLGELHAILRRQEDFYPFLKDNREKIEKILTFRIPYYVGPLARGNSRFAWMTRKSEETITPWNFEEVVDKGASAQSFIERMTNFDKNLPNEKVLPKHSLLYEYFTVYNELTKVKYVTEGMRKPAFLSGEQKKAIVDLLFKTNRKVTVKQLKEDYFKKIECFDSVEISGVEDRFNASLGTYHDLLKIIKDKDFLDNEENEDILEDIVLTLTLFEDREMIEERLKTYAHLFDDKVMKQLKRRRYTGWGRLSRKLINGIRDKQSGKTILDFLKSDGFANRNFMQLIHDDSLTFKEDIQKAQVSGQGDSLHEHIANLAGSPAIKKGILQTVKVVDELVKVMGRHKPENIVIEMARENQTTQKGQKNSRERMKRIEEGIKELGSQILKEHPVENTQLQNEKLYLYYLQNGRDMYVDQELDINRLSDYDVDHIVPQSFLKDDSIDNKVLTRSDKARGKSDNVPSEEVVKKMKNYWRQLLNAKLITQRKFDNLTKAERGGLSELDKAGFIKRQLVETRQITKHVAQILDSRMNTKYDENDKLIREVKVITLKSKLVSDFRKDFQFYKVREINNYHHAHDAYLNAVVGTALIKKYPKLESEFVYGDYKVYDVRKMIAKSEQEIGKATAKYFFYSNIMNFFKTEITLANGEIRKRPLIETNGETGEIVWDKGRDFATVRKVLSMPQVNIVKKTEVQTGGFSKESILPKRNSDKLIARKKDWDPKKYGGFDSPTVAYSVLVVAKVEKGKSKKLKSVKELLGITIMERSSFEKNPIDFLEAKGYKEVKKDLIIKLPKYSLFELENGRKRMLASAGELQKGNELALPSKYVNFLYLASHYEKLKGSPEDNEQKQLFVEQHKHYLDEIIEQISEFSKRVILADANLDKVLSAYNKHRDKPIREQAENIIHLFTLTNLGAPAAFKYFDTTIDRKRYTSTKEVLDATLIHQSITGLYETRIDLSQLGGDGGPAPAPAPAPGGTLNLEDEYRLYETSAEPEVSPGSTWLSDFPQAWAETGGMGLAVRQAPLIIPLKATSTPVSIKQYPMSQEAKLGIKPHIQRLLDQGILVPCQSPWNTPLLPVKKPGTNDYRPVQDLREVNKRVEDIHPTVPNPYNLLSGLPPSHRWYTVLDLKDAFFCLRLHPTSQPLFAFEWRDPGMGISGQLTWTRLPQGFKNSPTLFNEALHRDLADFRIQHPDLILLQYVDDILLAATSELDCQQGTRALLLTLGNLGYRASAKKAQLCQKQVKYLGYLLKEGQRWLTEARKETVMGQPTPKTPRQLREFLGKAGFCRLFIPGFAEMAAPLYPLTKPGTLFNWGPDQQKAYQEIKQALLTAPALGLPDLTKPFELFVDEKQGYAKGVLTQKLGPWRRPVAYLSKKLDPVAAGWPPCLRMVAAIAVLRKDAGKLTMGQPLVILAPHAVEALVKQPPDRWLSNARMTHYQAMLLDTDRVQFGPVVALNPATLLPLPEEGAPHDCLEILAETHGTRPDLTDQPIPDADHTWYTDGSSFLQEGQRKAGAAVTTETEVIWARALPAGTSAQRAELIALTQALKMAEGKRLNVYTDSRYAFATAHIHGEIYRRRGWLTSEGREIKNKSEILALLKALFLPKRLSIIHCLGHQKGDSAEARGNRLADQAAREAAIKTPPDTSTLLAGKRTADGSEFEKRTADGSEFESPKKKAKVE

SEQ ID NO: 1882 - protein, 2093 aa, synthetic construct
MPAAKRVKLDGGDKKYSIGLDIGTNSVGWAVITDEYKVPSKKFKVLGNTDRHSIKKNLIGALLFDSGETAEATRLKRTARRRYTRRKNRICYLQEIFSNEMAKVDDSFFHRLEESFLVEEDKKHERHPIFGNIVDEVAYHEKYPTIYHLRKKLVDSTDKADLRLIYLALAHMIKFRGHFLIEGDLNPDNSDVDKLFIQLVQTYNQLFEENPINASGVDAKAILSARLSKSRRLENLIAQLPGEKKNGLFGNLIALSLGLTPNFKSNFDLAEDAKLQLSKDTYDDDLDNLLAQIGDQYADLFLAAKNLSDAILLSDILRVNTEITKAPLSASMIKRYDEHHQDLTLLKALVRQQLPEKYKEIFFDQSKNGYAGYIDGGASQEEFYKFIKPILEKMDGTEELLVKLNREDLLRKQRTFDNGSIPHQIHLGELHAILRRQEDFYPFLKDNREKIEKILTFRIPYYVGPLARGNSRFAWMTRKSEETITPWNFEEVVDKGASAQSFIERMTNFDKNLPNEKVLPKHSLLYEYFTVYNELTKVKYVTEGMRKPAFLSGEQKKAIVDLLFKTNRKVTVKQLKEDYFKKIECFDSVEISGVEDRFNASLGTYHDLLKIIKDKDFLDNEENEDILEDIVLTLTLFEDREMIEERLKTYAHLFDDKVMKQLKRRRYTGWGRLSRKLINGIRDKQSGKTILDFLKSDGFANRNFMQLIHDDSLTFKEDIQKAQVSGQGDSLHEHIANLAGSPAIKKGILQTVKVVDELVKVMGRHKPENIVIEMARENQTTQKGQKNSRERMKRIEEGIKELGSQILKEHPVENTQLQNEKLYLYYLQNGRDMYVDQELDINRLSDYDVDHIVPQSFLKDDSIDNKVLTRSDKARGKSDNVPSEEVVKKMKNYWRQLLNAKLITQRKFDNLTKAERGGLSELDKAGFIKRQLVETRQITKHVAQILDSRMNTKYDENDKLIREVKVITLKSKLVSDFRKDFQFYKVREINNYHHAHDAYLNAVVGTALIKKYPKLESEFVYGDYKVYDVRKMIAKSEQEIGKATAKYFFYSNIMNFFKTEITLANGEIRKRPLIETNGETGEIVWDKGRDFATVRKVLSMPQVNIVKKTEVQTGGFSKESILPKRNSDKLIARKKDWDPKKYGGFDSPTVAYSVLVVAKVEKGKSKKLKSVKELLGITIMERSSFEKNPIDFLEAKGYKEVKKDLIIKLPKYSLFELENGRKRMLASAGELQKGNELALPSKYVNFLYLASHYEKLKGSPEDNEQKQLFVEQHKHYLDEIIEQISEFSKRVILADANLDKVLSAYNKHRDKPIREQAENIIHLFTLTNLGAPAAFKYFDTTIDRKRYTSTKEVLDATLIHQSITGLYETRIDLSQLGGDGGEAAAKGGSGGTLNLEDEYRLYETSAEPEVSPGSTWLSDFPQAWAETGGMGLAVRQAPLIIPLKATSTPVSIKQYPMSQEAKLGIKPHIQRLLDQGILVPCQSPWNTPLLPVKKPGTNDYRPVQDLREVNKRVEDIHPTVPNPYNLLSGLPPSHRWYTVLDLKDAFFCLRLHPTSQPLFAFEWRDPGMGISGQLTWTRLPQGFKNSPTLFNEALHRDLADFRIQHPDLILLQYVDDILLAATSELDCQQGTRALLLTLGNLGYRASAKKAQLCQKQVKYLGYLLKEGQRWLTEARKETVMGQPTPKTPRQLREFLGKAGFCRLFIPGFAEMAAPLYPLTKPGTLFNWGPDQQKAYQEIKQALLTAPALGLPDLTKPFELFVDEKQGYAKGVLTQKLGPWRRPVAYLSKKLDPVAAGWPPCLRMVAAIAVLRKDAGKLTMGQPLVILAPHAVEALVKQPPDRWLSNARMTHYQAMLLDTDRVQFGPVVALNPATLLPLPEEGAPHDCLEILAETHGTRPDLTDQPIPDADHTWYTDGSSFLQEGQRKAGAAVTTETEVIWARALPAGTSAQRAELIALTQALKMAEGKRLNVYTDSRYAFATAHIHGEIYRRRGWLTSEGREIKNKSEILALLKALFLPKRLSIIHCLGHQKGDSAEARGNRLADQAAREAAIKTPPDTSTLLAGKRTADGSEFEKRTADGSEFESPKKKAKVE

SEQ ID NO: 1883 - protein, 2094 aa, synthetic construct
MPAAKRVKLDGGDKKYSIGLDIGTNSVGWAVITDEYKVPSKKFKVLGNTDRHSIKKNLIGALLFDSGETAEATRLKRTARRRYTRRKNRICYLQEIFSNEMAKVDDSFFHRLEESFLVEEDKKHERHPIFGNIVDEVAYHEKYPTIYHLRKKLVDSTDKADLRLIYLALAHMIKFRGHFLIEGDLNPDNSDVDKLFIQLVQTYNQLFEENPINASGVDAKAILSARLSKSRRLENLIAQLPGEKKNGLFGNLIALSLGLTPNFKSNFDLAEDAKLQLSKDTYDDDLDNLLAQIGDQYADLFLAAKNLSDAILLSDILRVNTEITKAPLSASMIKRYDEHHQDLTLLKALVRQQLPEKYKEIFFDQSKNGYAGYIDGGASQEEFYKFIKPILEKMDGTEELLVKLNREDLLRKQRTFDNGSIPHQIHLGELHAILRRQEDFYPFLKDNREKIEKILTFRIPYYVGPLARGNSRFAWMTRKSEETITPWNFEEVVDKGASAQSFIERMTNFDKNLPNEKVLPKHSLLYEYFTVYNELTKVKYVTEGMRKPAFLSGEQKKAIVDLLFKTNRKVTVKQLKEDYFKKIECFDSVEISGVEDRFNASLGTYHDLLKIIKDKDFLDNEENEDILEDIVLTLTLFEDREMIEERLKTYAHLFDDKVMKQLKRRRYTGWGRLSRKLINGIRDKQSGKTILDFLKSDGFANRNFMQLIHDDSLTFKEDIQKAQVSGQGDSLHEHIANLAGSPAIKKGILQTVKVVDELVKVMGRHKPENIVIEMARENQTTQKGQKNSRERMKRIEEGIKELGSQILKEHPVENTQLQNEKLYLYYLQNGRDMYVDQELDINRLSDYDVDHIVPQSFLKDDSIDNKVLTRSDKARGKSDNVPSEEVVKKMKNYWRQLLNAKLITQRKFDNLTKAERGGLSELDKAGFIKRQLVETRQITKHVAQILDSRMNTKYDENDKLIREVKVITLKSKLVSDFRKDFQFYKVREINNYHHAHDAYLNAVVGTALIKKYPKLESEFVYGDYKVYDVRKMIAKSEQEIGKATAKYFFYSNIMNFFKTEITLANGEIRKRPLIETNGETGEIVWDKGRDFATVRKVLSMPQVNIVKKTEVQTGGFSKESILPKRNSDKLIARKKDWDPKKYGGFDSPTVAYSVLVVAKVEKGKSKKLKSVKELLGITIMERSSFEKNPIDFLEAKGYKEVKKDLIIKLPKYSLFELENGRKRMLASAGELQKGNELALPSKYVNFLYLASHYEKLKGSPEDNEQKQLFVEQHKHYLDEIIEQISEFSKRVILADANLDKVLSAYNKHRDKPIREQAENIIHLFTLTNLGAPAAFKYFDTTIDRKRYTSTKEVLDATLIHQSITGLYETRIDLSQLGGDGGPAPGSSGGSGGTLNLEDEYRLYETSAEPEVSPGSTWLSDFPQAWAETGGMGLAVRQAPLIIPLKATSTPVSIKQYPMSQEAKLGIKPHIQRLLDQGILVPCQSPWNTPLLPVKKPGTNDYRPVQDLREVNKRVEDIHPTVPNPYNLLSGLPPSHRWYTVLDLKDAFFCLRLHPTSQPLFAFEWRDPGMGISGQLTWTRLPQGFKNSPTLFNEALHRDLADFRIQHPDLILLQYVDDILLAATSELDCQQGTRALLLTLGNLGYRASAKKAQLCQKQVKYLGYLLKEGQRWLTEARKETVMGQPTPKTPRQLREFLGKAGFCRLFIPGFAEMAAPLYPLTKPGTLFNWGPDQQKAYQEIKQALLTAPALGLPDLTKPFELFVDEKQGYAKGVLTQKLGPWRRPVAYLSKKLDPVAAGWPPCLRMVAAIAVLRKDAGKLTMGQPLVILAPHAVEALVKQPPDRWLSNARMTHYQAMLLDTDRVQFGPVVALNPATLLPLPEEGAPHDCLEILAETHGTRPDLTDQPIPDADHTWYTDGSSFLQEGQRKAGAAVTTETEVIWARALPAGTSAQRAELIALTQALKMAEGKRLNVYTDSRYAFATAHIHGEIYRRRGWLTSEGREIKNKSEILALLKALFLPKRLSIIHCLGHQKGDSAEARGNRLADQAAREAAIKTPPDTSTLLAGKRTADGSEFEKRTADGSEFESPKKKAKVE

SEQ ID NO: 1884 - protein, 2094 aa, synthetic construct
MPAAKRVKLDGGDKKYSIGLDIGTNSVGWAVITDEYKVPSKKFKVLGNTDRHSIKKNLIGALLFDSGETAEATRLKRTARRRYTRRKNRICYLQEIFSNEMAKVDDSFFHRLEESFLVEEDKKHERHPIFGNIVDEVAYHEKYPTIYHLRKKLVDSTDKADLRLIYLALAHMIKFRGHFLIEGDLNPDNSDVDKLFIQLVQTYNQLFEENPINASGVDAKAILSARLSKSRRLENLIAQLPGEKKNGLFGNLIALSLGLTPNFKSNFDLAEDAKLQLSKDTYDDDLDNLLAQIGDQYADLFLAAKNLSDAILLSDILRVNTEITKAPLSASMIKRYDEHHQDLTLLKALVRQQLPEKYKEIFFDQSKNGYAGYIDGGASQEEFYKFIKPILEKMDGTEELLVKLNREDLLRKQRTFDNGSIPHQIHLGELHAILRRQEDFYPFLKDNREKIEKILTFRIPYYVGPLARGNSRFAWMTRKSEETITPWNFEEVVDKGASAQSFIERMTNFDKNLPNEKVLPKHSLLYEYFTVYNELTKVKYVTEGMRKPAFLSGEQKKAIVDLLFKTNRKVTVKQLKEDYFKKIECFDSVEISGVEDRFNASLGTYHDLLKIIKDKDFLDNEENEDILEDIVLTLTLFEDREMIEERLKTYAHLFDDKVMKQLKRRRYTGWGRLSRKLINGIRDKQSGKTILDFLKSDGFANRNFMQLIHDDSLTFKEDIQKAQVSGQGDSLHEHIANLAGSPAIKKGILQTVKVVDELVKVMGRHKPENIVIEMARENQTTQKGQKNSRERMKRIEEGIKELGSQILKEHPVENTQLQNEKLYLYYLQNGRDMYVDQELDINRLSDYDVDHIVPQSFLKDDSIDNKVLTRSDKARGKSDNVPSEEVVKKMKNYWRQLLNAKLITQRKFDNLTKAERGGLSELDKAGFIKRQLVETRQITKHVAQILDSRMNTKYDENDKLIREVKVITLKSKLVSDFRKDFQFYKVREINNYHHAHDAYLNAVVGTALIKKYPKLESEFVYGDYKVYDVRKMIAKSEQEIGKATAKYFFYSNIMNFFKTEITLANGEIRKRPLIETNGETGEIVWDKGRDFATVRKVLSMPQVNIVKKTEVQTGGFSKESILPKRNSDKLIARKKDWDPKKYGGFDSPTVAYSVLVVAKVEKGKSKKLKSVKELLGITIMERSSFEKNPIDFLEAKGYKEVKKDLIIKLPKYSLFELENGRKRMLASAGELQKGNELALPSKYVNFLYLASHYEKLKGSPEDNEQKQLFVEQHKHYLDEIIEQISEFSKRVILADANLDKVLSAYNKHRDKPIREQAENIIHLFTLTNLGAPAAFKYFDTTIDRKRYTSTKEVLDATLIHQSITGLYETRIDLSQLGGDGGGGGGSSGGSGGTLNLEDEYRLYETSAEPEVSPGSTWLSDFPQAWAETGGMGLAVRQAPLIIPLKATSTPVSIKQYPMSQEAKLGIKPHIQRLLDQGILVPCQSPWNTPLLPVKKPGTNDYRPVQDLREVNKRVEDIHPTVPNPYNLLSGLPPSHRWYTVLDLKDAFFCLRLHPTSQPLFAFEWRDPGMGISGQLTWTRLPQGFKNSPTLFNEALHRDLADFRIQHPDLILLQYVDDILLAATSELDCQQGTRALLLTLGNLGYRASAKKAQLCQKQVKYLGYLLKEGQRWLTEARKETVMGQPTPKTPRQLREFLGKAGFCRLFIPGFAEMAAPLYPLTKPGTLFNWGPDQQKAYQEIKQALLTAPALGLPDLTKPFELFVDEKQGYAKGVLTQKLGPWRRPVAYLSKKLDPVAAGWPPCLRMVAAIAVLRKDAGKLTMGQPLVILAPHAVEALVKQPPDRWLSNARMTHYQAMLLDTDRVQFGPVVALNPATLLPLPEEGAPHDCLEILAETHGTRPDLTDQPIPDADHTWYTDGSSFLQEGQRKAGAAVTTETEVIWARALPAGTSAQRAELIALTQALKMAEGKRLNVYTDSRYAFATAHIHGEIYRRRGWLTSEGREIKNKSEILALLKALFLPKRLSIIHCLGHQKGDSAEARGNRLADQAAREAAIKTPPDTSTLLAGKRTADGSEFEKRTADGSEFESPKKKAKVE

SEQ ID NO: 1885 - protein, 2090 aa, synthetic construct
MPAAKRVKLDGGDKKYSIGLDIGTNSVGWAVITDEYKVPSKKFKVLGNTDRHSIKKNLIGALLFDSGETAEATRLKRTARRRYTRRKNRICYLQEIFSNEMAKVDDSFFHRLEESFLVEEDKKHERHPIFGNIVDEVAYHEKYPTIYHLRKKLVDSTDKADLRLIYLALAHMIKFRGHFLIEGDLNPDNSDVDKLFIQLVQTYNQLFEENPINASGVDAKAILSARLSKSRRLENLIAQLPGEKKNGLFGNLIALSLGLTPNFKSNFDLAEDAKLQLSKDTYDDDLDNLLAQIGDQYADLFLAAKNLSDAILLSDILRVNTEITKAPLSASMIKRYDEHHQDLTLLKALVRQQLPEKYKEIFFDQSKNGYAGYIDGGASQEEFYKFIKPILEKMDGTEELLVKLNREDLLRKQRTFDNGSIPHQIHLGELHAILRRQEDFYPFLKDNREKIEKILTFRIPYYVGPLARGNSRFAWMTRKSEETITPWNFEEVVDKGASAQSFIERMTNFDKNLPNEKVLPKHSLLYEYFTVYNELTKVKYVTEGMRKPAFLSGEQKKAIVDLLFKTNRKVTVKQLKEDYFKKIECFDSVEISGVEDRFNASLGTYHDLLKIIKDKDFLDNEENEDILEDIVLTLTLFEDREMIEERLKTYAHLFDDKVMKQLKRRRYTGWGRLSRKLINGIRDKQSGKTILDFLKSDGFANRNFMQLIHDDSLTFKEDIQKAQVSGQGDSLHEHIANLAGSPAIKKGILQTVKVVDELVKVMGRHKPENIVIEMARENQTTQKGQKNSRERMKRIEEGIKELGSQILKEHPVENTQLQNEKLYLYYLQNGRDMYVDQELDINRLSDYDVDHIVPQSFLKDDSIDNKVLTRSDKARGKSDNVPSEEVVKKMKNYWRQLLNAKLITQRKFDNLTKAERGGLSELDKAGFIKRQLVETRQITKHVAQILDSRMNTKYDENDKLIREVKVITLKSKLVSDFRKDFQFYKVREINNYHHAHDAYLNAVVGTALIKKYPKLESEFVYGDYKVYDVRKMIAKSEQEIGKATAKYFFYSNIMNFFKTEITLANGEIRKRPLIETNGETGEIVWDKGRDFATVRKVLSMPQVNIVKKTEVQTGGFSKESILPKRNSDKLIARKKDWDPKKYGGFDSPTVAYSVLVVAKVEKGKSKKLKSVKELLGITIMERSSFEKNPIDFLEAKGYKEVKKDLIIKLPKYSLFELENGRKRMLASAGELQKGNELALPSKYVNFLYLASHYEKLKGSPEDNEQKQLFVEQHKHYLDEIIEQISEFSKRVILADANLDKVLSAYNKHRDKPIREQAENIIHLFTLTNLGAPAAFKYFDTTIDRKRYTSTKEVLDATLIHQSITGLYETRIDLSQLGGDGGGGGGSGGTLNLEDEYRLYETSAEPEVSPGSTWLSDFPQAWAETGGMGLAVRQAPLIIPLKATSTPVSIKQYPMSQEAKLGIKPHIQRLLDQGILVPCQSPWNTPLLPVKKPGTNDYRPVQDLREVNKRVEDIHPTVPNPYNLLSGLPPSHRWYTVLDLKDAFFCLRLHPTSQPLFAFEWRDPGMGISGQLTWTRLPQGFKNSPTLFNEALHRDLADFRIQHPDLILLQYVDDILLAATSELDCQQGTRALLLTLGNLGYRASAKKAQLCQKQVKYLGYLLKEGQRWLTEARKETVMGQPTPKTPRQLREFLGKAGFCRLFIPGFAEMAAPLYPLTKPGTLFNWGPDQQKAYQEIKQALLTAPALGLPDLTKPFELFVDEKQGYAKGVLTQKLGPWRRPVAYLSKKLDPVAAGWPPCLRMVAAIAVLRKDAGKLTMGQPLVILAPHAVEALVKQPPDRWLSNARMTHYQAMLLDTDRVQFGPVVALNPATLLPLPEEGAPHDCLEILAETHGTRPDLTDQPIPDADHTWYTDGSSFLQEGQRKAGAAVTTETEVIWARALPAGTSAQRAELIALTQALKMAEGKRLNVYTDSRYAFATAHIHGEIYRRRGWLTSEGREIKNKSEILALLKALFLPKRLSIIHCLGHQKGDSAEARGNRLADQAAREAAIKTPPDTSTLLAGKRTADGSEFEKRTADGSEFESPKKKAKVE

SEQ ID NO: 1886 - protein, 2096 aa, synthetic construct
MPAAKRVKLDGGDKKYSIGLDIGTNSVGWAVITDEYKVPSKKFKVLGNTDRHSIKKNLIGALLFDSGETAEATRLKRTARRRYTRRKNRICYLQEIFSNEMAKVDDSFFHRLEESFLVEEDKKHERHPIFGNIVDEVAYHEKYPTIYHLRKKLVDSTDKADLRLIYLALAHMIKFRGHFLIEGDLNPDNSDVDKLFIQLVQTYNQLFEENPINASGVDAKAILSARLSKSRRLENLIAQLPGEKKNGLFGNLIALSLGLTPNFKSNFDLAEDAKLQLSKDTYDDDLDNLLAQIGDQYADLFLAAKNLSDAILLSDILRVNTEITKAPLSASMIKRYDEHHQDLTLLKALVRQQLPEKYKEIFFDQSKNGYAGYIDGGASQEEFYKFIKPILEKMDGTEELLVKLNREDLLRKQRTFDNGSIPHQIHLGELHAILRRQEDFYPFLKDNREKIEKILTFRIPYYVGPLARGNSRFAWMTRKSEETITPWNFEEVVDKGASAQSFIERMTNFDKNLPNEKVLPKHSLLYEYFTVYNELTKVKYVTEGMRKPAFLSGEQKKAIVDLLFKTNRKVTVKQLKEDYFKKIECFDSVEISGVEDRFNASLGTYHDLLKIIKDKDFLDNEENEDILEDIVLTLTLFEDREMIEERLKTYAHLFDDKVMKQLKRRRYTGWGRLSRKLINGIRDKQSGKTILDFLKSDGFANRNFMQLIHDDSLTFKEDIQKAQVSGQGDSLHEHIANLAGSPAIKKGILQTVKVVDELVKVMGRHKPENIVIEMARENQTTQKGQKNSRERMKRIEEGIKELGSQILKEHPVENTQLQNEKLYLYYLQNGRDMYVDQELDINRLSDYDVDHIVPQSFLKDDSIDNKVLTRSDKARGKSDNVPSEEVVKKMKNYWRQLLNAKLITQRKFDNLTKAERGGLSELDKAGFIKRQLVETRQITKHVAQILDSRMNTKYDENDKLIREVKVITLKSKLVSDFRKDFQFYKVREINNYHHAHDAYLNAVVGTALIKKYPKLESEFVYGDYKVYDVRKMIAKSEQEIGKATAKYFFYSNIMNFFKTEITLANGEIRKRPLIETNGETGEIVWDKGRDFATVRKVLSMPQVNIVKKTEVQTGGFSKESILPKRNSDKLIARKKDWDPKKYGGFDSPTVAYSVLVVAKVEKGKSKKLKSVKELLGITIMERSSFEKNPIDFLEAKGYKEVKKDLIIKLPKYSLFELENGRKRMLASAGELQKGNELALPSKYVNFLYLASHYEKLKGSPEDNEQKQLFVEQHKHYLDEIIEQISEFSKRVILADANLDKVLSAYNKHRDKPIREQAENIIHLFTLTNLGAPAAFKYFDTTIDRKRYTSTKEVLDATLIHQSITGLYETRIDLSQLGGDGGGGGEAAAKPAPGGTLNLEDEYRLYETSAEPEVSPGSTWLSDFPQAWAETGGMGLAVRQAPLIIPLKATSTPVSIKQYPMSQEAKLGIKPHIQRLLDQGILVPCQSPWNTPLLPVKKPGTNDYRPVQDLREVNKRVEDIHPTVPNPYNLLSGLPPSHRWYTVLDLKDAFFCLRLHPTSQPLFAFEWRDPGMGISGQLTWTRLPQGFKNSPTLFNEALHRDLADFRIQHPDLILLQYVDDILLAATSELDCQQGTRALLLTLGNLGYRASAKKAQLCQKQVKYLGYLLKEGQRWLTEARKETVMGQPTPKTPRQLREFLGKAGFCRLFIPGFAEMAAPLYPLTKPGTLFNWGPDQQKAYQEIKQALLTAPALGLPDLTKPFELFVDEKQGYAKGVLTQKLGPWRRPVAYLSKKLDPVAAGWPPCLRMVAAIAVLRKDAGKLTMGQPLVILAPHAVEALVKQPPDRWLSNARMTHYQAMLLDTDRVQFGPVVALNPATLLPLPEEGAPHDCLEILAETHGTRPDLTDQPIPDADHTWYTDGSSFLQEGQRKAGAAVTTETEVIWARALPAGTSAQRAELIALTQALKMAEGKRLNVYTDSRYAFATAHIHGEIYRRRGWLTSEGREIKNKSEILALLKALFLPKRLSIIHCLGHQKGDSAEARGNRLADQAAREAAIKTPPDTSTLLAGKRTADGSEFEKRTADGSEFESPKKKAKVE

SEQ ID NO: 1887 - protein, 2091 aa, synthetic construct
MPAAKRVKLDGGDKKYSIGLDIGTNSVGWAVITDEYKVPSKKFKVLGNTDRHSIKKNLIGALLFDSGETAEATRLKRTARRRYTRRKNRICYLQEIFSNEMAKVDDSFFHRLEESFLVEEDKKHERHPIFGNIVDEVAYHEKYPTIYHLRKKLVDSTDKADLRLIYLALAHMIKFRGHFLIEGDLNPDNSDVDKLFIQLVQTYNQLFEENPINASGVDAKAILSARLSKSRRLENLIAQLPGEKKNGLFGNLIALSLGLTPNFKSNFDLAEDAKLQLSKDTYDDDLDNLLAQIGDQYADLFLAAKNLSDAILLSDILRVNTEITKAPLSASMIKRYDEHHQDLTLLKALVRQQLPEKYKEIFFDQSKNGYAGYIDGGASQEEFYKFIKPILEKMDGTEELLVKLNREDLLRKQRTFDNGSIPHQIHLGELHAILRRQEDFYPFLKDNREKIEKILTFRIPYYVGPLARGNSRFAWMTRKSEETITPWNFEEVVDKGASAQSFIERMTNFDKNLPNEKVLPKHSLLYEYFTVYNELTKVKYVTEGMRKPAFLSGEQKKAIVDLLFKTNRKVTVKQLKEDYFKKIECFDSVEISGVEDRFNASLGTYHDLLKIIKDKDFLDNEENEDILEDIVLTLTLFEDREMIEERLKTYAHLFDDKVMKQLKRRRYTGWGRLSRKLINGIRDKQSGKTILDFLKSDGFANRNFMQLIHDDSLTFKEDIQKAQVSGQGDSLHEHIANLAGSPAIKKGILQTVKVVDELVKVMGRHKPENIVIEMARENQTTQKGQKNSRERMKRIEEGIKELGSQILKEHPVENTQLQNEKLYLYYLQNGRDMYVDQELDINRLSDYDVDHIVPQSFLKDDSIDNKVLTRSDKARGKSDNVPSEEVVKKMKNYWRQLLNAKLITQRKFDNLTKAERGGLSELDKAGFIKRQLVETRQITKHVAQILDSRMNTKYDENDKLIREVKVITLKSKLVSDFRKDFQFYKVREINNYHHAHDAYLNAVVGTALIKKYPKLESEFVYGDYKVYDVRKMIAKSEQEIGKATAKYFFYSNIMNFFKTEITLANGEIRKRPLIETNGETGEIVWDKGRDFATVRKVLSMPQVNIVKKTEVQTGGFSKESILPKRNSDKLIARKKDWDPKKYGGFDSPTVAYSVLVVAKVEKGKSKKLKSVKELLGITIMERSSFEKNPIDFLEAKGYKEVKKDLIIKLPKYSLFELENGRKRMLASAGELQKGNELALPSKYVNFLYLASHYEKLKGSPEDNEQKQLFVEQHKHYLDEIIEQISEFSKRVILADANLDKVLSAYNKHRDKPIREQAENIIHLFTLTNLGAPAAFKYFDTTIDRKRYTSTKEVLDATLIHQSITGLYETRIDLSQLGGDGGGSSPAPGGTLNLEDEYRLYETSAEPEVSPGSTWLSDFPQAWAETGGMGLAVRQAPLIIPLKATSTPVSIKQYPMSQEAKLGIKPHIQRLLDQGILVPCQSPWNTPLLPVKKPGTNDYRPVQDLREVNKRVEDIHPTVPNPYNLLSGLPPSHRWYTVLDLKDAFFCLRLHPTSQPLFAFEWRDPGMGISGQLTWTRLPQGFKNSPTLFNEALHRDLADFRIQHPDLILLQYVDDILLAATSELDCQQGTRALLLTLGNLGYRASAKKAQLCQKQVKYLGYLLKEGQRWLTEARKETVMGQPTPKTPRQLREFLGKAGFCRLFIPGFAEMAAPLYPLTKPGTLFNWGPDQQKAYQEIKQALLTAPALGLPDLTKPFELFVDEKQGYAKGVLTQKLGPWRRPVAYLSKKLDPVAAGWPPCLRMVAAIAVLRKDAGKLTMGQPLVILAPHAVEALVKQPPDRWLSNARMTHYQAMLLDTDRVQFGPVVALNPATLLPLPEEGAPHDCLEILAETHGTRPDLTDQPIPDADHTWYTDGSSFLQEGQRKAGAAVTTETEVIWARALPAGTSAQRAELIALTQALKMAEGKRLNVYTDSRYAFATAHIHGEIYRRRGWLTSEGREIKNKSEILALLKALFLPKRLSIIHCLGHQKGDSAEARGNRLADQAAREAAIKTPPDTSTLLAGKRTADGSEFEKRTADGSEFESPKKKAKVE

SEQ ID NO: 1888 - protein, 2093 aa, synthetic construct
MPAAKRVKLDGGDKKYSIGLDIGTNSVGWAVITDEYKVPSKKFKVLGNTDRHSIKKNLIGALLFDSGETAEATRLKRTARRRYTRRKNRICYLQEIFSNEMAKVDDSFFHRLEESFLVEEDKKHERHPIFGNIVDEVAYHEKYPTIYHLRKKLVDSTDKADLRLIYLALAHMIKFRGHFLIEGDLNPDNSDVDKLFIQLVQTYNQLFEENPINASGVDAKAILSARLSKSRRLENLIAQLPGEKKNGLFGNLIALSLGLTPNFKSNFDLAEDAKLQLSKDTYDDDLDNLLAQIGDQYADLFLAAKNLSDAILLSDILRVNTEITKAPLSASMIKRYDEHHQDLTLLKALVRQQLPEKYKEIFFDQSKNGYAGYIDGGASQEEFYKFIKPILEKMDGTEELLVKLNREDLLRKQRTFDNGSIPHQIHLGELHAILRRQEDFYPFLKDNREKIEKILTFRIPYYVGPLARGNSRFAWMTRKSEETITPWNFEEVVDKGASAQSFIERMTNFDKNLPNEKVLPKHSLLYEYFTVYNELTKVKYVTEGMRKPAFLSGEQKKAIVDLLFKTNRKVTVKQLKEDYFKKIECFDSVEISGVEDRFNASLGTYHDLLKIIKDKDFLDNEENEDILEDIVLTLTLFEDREMIEERLKTYAHLFDDKVMKQLKRRRYTGWGRLSRKLINGIRDKQSGKTILDFLKSDGFANRNFMQLIHDDSLTFKEDIQKAQVSGQGDSLHEHIANLAGSPAIKKGILQTVKVVDELVKVMGRHKPENIVIEMARENQTTQKGQKNSRERMKRIEEGIKELGSQILKEHPVENTQLQNEKLYLYYLQNGRDMYVDQELDINRLSDYDVDHIVPQSFLKDDSIDNKVLTRSDKARGKSDNVPSEEVVKKMKNYWRQLLNAKLITQRKFDNLTKAERGGLSELDKAGFIKRQLVETRQITKHVAQILDSRMNTKYDENDKLIREVKVITLKSKLVSDFRKDFQFYKVREINNYHHAHDAYLNAVVGTALIKKYPKLESEFVYGDYKVYDVRKMIAKSEQEIGKATAKYFFYSNIMNFFKTEITLANGEIRKRPLIETNGETGEIVWDKGRDFATVRKVLSMPQVNIVKKTEVQTGGFSKESILPKRNSDKLIARKKDWDPKKYGGFDSPTVAYSVLVVAKVEKGKSKKLKSVKELLGITIMERSSFEKNPIDFLEAKGYKEVKKDLIIKLPKYSLFELENGRKRMLASAGELQKGNELALPSKYVNFLYLASHYEKLKGSPEDNEQKQLFVEQHKHYLDEIIEQISEFSKRVILADANLDKVLSAYNKHRDKPIREQAENIIHLFTLTNLGAPAAFKYFDTTIDRKRYTSTKEVLDATLIHQSITGLYETRIDLSQLGGDGGEAAAKGGGGGTLNLEDEYRLYETSAEPEVSPGSTWLSDFPQAWAETGGMGLAVRQAPLIIPLKATSTPVSIKQYPMSQEAKLGIKPHIQRLLDQGILVPCQSPWNTPLLPVKKPGTNDYRPVQDLREVNKRVEDIHPTVPNPYNLLSGLPPSHRWYTVLDLKDAFFCLRLHPTSQPLFAFEWRDPGMGISGQLTWTRLPQGFKNSPTLFNEALHRDLADFRIQHPDLILLQYVDDILLAATSELDCQQGTRALLLTLGNLGYRASAKKAQLCQKQVKYLGYLLKEGQRWLTEARKETVMGQPTPKTPRQLREFLGKAGFCRLFIPGFAEMAAPLYPLTKPGTLFNWGPDQQKAYQEIKQALLTAPALGLPDLTKPFELFVDEKQGYAKGVLTQKLGPWRRPVAYLSKKLDPVAAGWPPCLRMVAAIAVLRKDAGKLTMGQPLVILAPHAVEALVKQPPDRWLSNARMTHYQAMLLDTDRVQFGPVVALNPATLLPLPEEGAPHDCLEILAETHGTRPDLTDQPIPDADHTWYTDGSSFLQEGQRKAGAAVTTETEVIWARALPAGTSAQRAELIALTQALKMAEGKRLNVYTDSRYAFATAHIHGEIYRRRGWLTSEGREIKNKSEILALLKALFLPKRLSIIHCLGHQKGDSAEARGNRLADQAAREAAIKTPPDTSTLLAGKRTADGSEFEKRTADGSEFESPKKKAKVE

SEQ ID NO: 1889 - protein, 2096 aa, synthetic construct
MPAAKRVKLDGGDKKYSIGLDIGTNSVGWAVITDEYKVPSKKFKVLGNTDRHSIKKNLIGALLFDSGETAEATRLKRTARRRYTRRKNRICYLQEIFSNEMAKVDDSFFHRLEESFLVEEDKKHERHPIFGNIVDEVAYHEKYPTIYHLRKKLVDSTDKADLRLIYLALAHMIKFRGHFLIEGDLNPDNSDVDKLFIQLVQTYNQLFEENPINASGVDAKAILSARLSKSRRLENLIAQLPGEKKNGLFGNLIALSLGLTPNFKSNFDLAEDAKLQLSKDTYDDDLDNLLAQIGDQYADLFLAAKNLSDAILLSDILRVNTEITKAPLSASMIKRYDEHHQDLTLLKALVRQQLPEKYKEIFFDQSKNGYAGYIDGGASQEEFYKFIKPILEKMDGTEELLVKLNREDLLRKQRTFDNGSIPHQIHLGELHAILRRQEDFYPFLKDNREKIEKILTFRIPYYVGPLARGNSRFAWMTRKSEETITPWNFEEVVDKGASAQSFIERMTNFDKNLPNEKVLPKHSLLYEYFTVYNELTKVKYVTEGMRKPAFLSGEQKKAIVDLLFKTNRKVTVKQLKEDYFKKIECFDSVEISGVEDRFNASLGTYHDLLKIIKDKDFLDNEENEDILEDIVLTLTLFEDREMIEERLKTYAHLFDDKVMKQLKRRRYTGWGRLSRKLINGIRDKQSGKTILDFLKSDGFANRNFMQLIHDDSLTFKEDIQKAQVSGQGDSLHEHIANLAGSPAIKKGILQTVKVVDELVKVMGRHKPENIVIEMARENQTTQKGQKNSRERMKRIEEGIKELGSQILKEHPVENTQLQNEKLYLYYLQNGRDMYVDQELDINRLSDYDVDHIVPQSFLKDDSIDNKVLTRSDKARGKSDNVPSEEVVKKMKNYWRQLLNAKLITQRKFDNLTKAERGGLSELDKAGFIKRQLVETRQITKHVAQILDSRMNTKYDENDKLIREVKVITLKSKLVSDFRKDFQFYKVREINNYHHAHDAYLNAVVGTALIKKYPKLESEFVYGDYKVYDVRKMIAKSEQEIGKATAKYFFYSNIMNFFKTEITLANGEIRKRPLIETNGETGEIVWDKGRDFATVRKVLSMPQVNIVKKTEVQTGGFSKESILPKRNSDKLIARKKDWDPKKYGGFDSPTVAYSVLVVAKVEKGKSKKLKSVKELLGITIMERSSFEKNPIDFLEAKGYKEVKKDLIIKLPKYSLFELENGRKRMLASAGELQKGNELALPSKYVNFLYLASHYEKLKGSPEDNEQKQLFVEQHKHYLDEIIEQISEFSKRVILADANLDKVLSAYNKHRDKPIREQAENIIHLFTLTNLGAPAAFKYFDTTIDRKRYTSTKEVLDATLIHQSITGLYETRIDLSQLGGDGGGGSGSSEAAAKGGTLNLEDEYRLYETSAEPEVSPGSTWLSDFPQAWAETGGMGLAVRQAPLIIPLKATSTPVSIKQYPMSQEAKLGIKPHIQRLLDQGILVPCQSPWNTPLLPVKKPGTNDYRPVQDLREVNKRVEDIHPTVPNPYNLLSGLPPSHRWYTVLDLKDAFFCLRLHPTSQPLFAFEWRDPGMGISGQLTWTRLPQGFKNSPTLFNEALHRDLADFRIQHPDLILLQYVDDILLAATSELDCQQGTRALLLTLGNLGYRASAKKAQLCQKQVKYLGYLLKEGQRWLTEARKETVMGQPTPKTPRQLREFLGKAGFCRLFIPGFAEMAAPLYPLTKPGTLFNWGPDQQKAYQEIKQALLTAPALGLPDLTKPFELFVDEKQGYAKGVLTQKLGPWRRPVAYLSKKLDPVAAGWPPCLRMVAAIAVLRKDAGKLTMGQPLVILAPHAVEALVKQPPDRWLSNARMTHYQAMLLDTDRVQFGPVVALNPATLLPLPEEGAPHDCLEILAETHGTRPDLTDQPIPDADHTWYTDGSSFLQEGQRKAGAAVTTETEVIWARALPAGTSAQRAELIALTQALKMAEGKRLNVYTDSRYAFATAHIHGEIYRRRGWLTSEGREIKNKSEILALLKALFLPKRLSIIHCLGHQKGDSAEARGNRLADQAAREAAIKTPPDTSTLLAGKRTADGSEFEKRTADGSEFESPKKKAKVE

SEQ ID NO: 1890 - protein, 2096 aa, synthetic construct
MPAAKRVKLDGGDKKYSIGLDIGTNSVGWAVITDEYKVPSKKFKVLGNTDRHSIKKNLIGALLFDSGETAEATRLKRTARRRYTRRKNRICYLQEIFSNEMAKVDDSFFHRLEESFLVEEDKKHERHPIFGNIVDEVAYHEKYPTIYHLRKKLVDSTDKADLRLIYLALAHMIKFRGHFLIEGDLNPDNSDVDKLFIQLVQTYNQLFEENPINASGVDAKAILSARLSKSRRLENLIAQLPGEKKNGLFGNLIALSLGLTPNFKSNFDLAEDAKLQLSKDTYDDDLDNLLAQIGDQYADLFLAAKNLSDAILLSDILRVNTEITKAPLSASMIKRYDEHHQDLTLLKALVRQQLPEKYKEIFFDQSKNGYAGYIDGGASQEEFYKFIKPILEKMDGTEELLVKLNREDLLRKQRTFDNGSIPHQIHLGELHAILRRQEDFYPFLKDNREKIEKILTFRIPYYVGPLARGNSRFAWMTRKSEETITPWNFEEVVDKGASAQSFIERMTNFDKNLPNEKVLPKHSLLYEYFTVYNELTKVKYVTEGMRKPAFLSGEQKKAIVDLLFKTNRKVTVKQLKEDYFKKIECFDSVEISGVEDRFNASLGTYHDLLKIIKDKDFLDNEENEDILEDIVLTLTLFEDREMIEERLKTYAHLFDDKVMKQLKRRRYTGWGRLSRKLINGIRDKQSGKTILDFLKSDGFANRNFMQLIHDDSLTFKEDIQKAQVSGQGDSLHEHIANLAGSPAIKKGILQTVKVVDELVKVMGRHKPENIVIEMARENQTTQKGQKNSRERMKRIEEGIKELGSQILKEHPVENTQLQNEKLYLYYLQNGRDMYVDQELDINRLSDYDVDHIVPQSFLKDDSIDNKVLTRSDKARGKSDNVPSEEVVKKMKNYWRQLLNAKLITQRKFDNLTKAERGGLSELDKAGFIKRQLVETRQITKHVAQILDSRMNTKYDENDKLIREVKVITLKSKLVSDFRKDFQFYKVREINNYHHAHDAYLNAVVGTALIKKYPKLESEFVYGDYKVYDVRKMIAKSEQEIGKATAKYFFYSNIMNFFKTEITLANGEIRKRPLIETNGETGEIVWDKGRDFATVRKVLSMPQVNIVKKTEVQTGGFSKESILPKRNSDKLIARKKDWDPKKYGGFDSPTVAYSVLVVAKVEKGKSKKLKSVKELLGITIMERSSFEKNPIDFLEAKGYKEVKKDLIIKLPKYSLFELENGRKRMLASAGELQKGNELALPSKYVNFLYLASHYEKLKGSPEDNEQKQLFVEQHKHYLDEIIEQISEFSKRVILADANLDKVLSAYNKHRDKPIREQAENIIHLFTLTNLGAPAAFKYFDTTIDRKRYTSTKEVLDATLIHQSITGLYETRIDLSQLGGDGGGSSPAPEAAAKGGTLNLEDEYRLYETSAEPEVSPGSTWLSDFPQAWAETGGMGLAVRQAPLIIPLKATSTPVSIKQYPMSQEAKLGIKPHIQRLLDQGILVPCQSPWNTPLLPVKKPGTNDYRPVQDLREVNKRVEDIHPTVPNPYNLLSGLPPSHRWYTVLDLKDAFFCLRLHPTSQPLFAFEWRDPGMGISGQLTWTRLPQGFKNSPTLFNEALHRDLADFRIQHPDLILLQYVDDILLAATSELDCQQGTRALLLTLGNLGYRASAKKAQLCQKQVKYLGYLLKEGQRWLTEARKETVMGQPTPKTPRQLREFLGKAGFCRLFIPGFAEMAAPLYPLTKPGTLFNWGPDQQKAYQEIKQALLTAPALGLPDLTKPFELFVDEKQGYAKGVLTQKLGPWRRPVAYLSKKLDPVAAGWPPCLRMVAAIAVLRKDAGKLTMGQPLVILAPHAVEALVKQPPDRWLSNARMTHYQAMLLDTDRVQFGPVVALNPATLLPLPEEGAPHDCLEILAETHGTRPDLTDQPIPDADHTWYTDGSSFLQEGQRKAGAAVTTETEVIWARALPAGTSAQRAELIALTQALKMAEGKRLNVYTDSRYAFATAHIHGEIYRRRGWLTSEGREIKNKSEILALLKALFLPKRLSIIHCLGHQKGDSAEARGNRLADQAAREAAIKTPPDTSTLLAGKRTADGSEFEKRTADGSEFESPKKKAKVE

SEQ ID NO: 1891 - protein, 2093 aa, synthetic construct
MPAAKRVKLDGGDKKYSIGLDIGTNSVGWAVITDEYKVPSKKFKVLGNTDRHSIKKNLIGALLFDSGETAEATRLKRTARRRYTRRKNRICYLQEIFSNEMAKVDDSFFHRLEESFLVEEDKKHERHPIFGNIVDEVAYHEKYPTIYHLRKKLVDSTDKADLRLIYLALAHMIKFRGHFLIEGDLNPDNSDVDKLFIQLVQTYNQLFEENPINASGVDAKAILSARLSKSRRLENLIAQLPGEKKNGLFGNLIALSLGLTPNFKSNFDLAEDAKLQLSKDTYDDDLDNLLAQIGDQYADLFLAAKNLSDAILLSDILRVNTEITKAPLSASMIKRYDEHHQDLTLLKALVRQQLPEKYKEIFFDQSKNGYAGYIDGGASQEEFYKFIKPILEKMDGTEELLVKLNREDLLRKQRTFDNGSIPHQIHLGELHAILRRQEDFYPFLKDNREKIEKILTFRIPYYVGPLARGNSRFAWMTRKSEETITPWNFEEVVDKGASAQSFIERMTNFDKNLPNEKVLPKHSLLYEYFTVYNELTKVKYVTEGMRKPAFLSGEQKKAIVDLLFKTNRKVTVKQLKEDYFKKIECFDSVEISGVEDRFNASLGTYHDLLKIIKDKDFLDNEENEDILEDIVLTLTLFEDREMIEERLKTYAHLFDDKVMKQLKRRRYTGWGRLSRKLINGIRDKQSGKTILDFLKSDGFANRNFMQLIHDDSLTFKEDIQKAQVSGQGDSLHEHIANLAGSPAIKKGILQTVKVVDELVKVMGRHKPENIVIEMARENQTTQKGQKNSRERMKRIEEGIKELGSQILKEHPVENTQLQNEKLYLYYLQNGRDMYVDQELDINRLSDYDVDHIVPQSFLKDDSIDNKVLTRSDKARGKSDNVPSEEVVKKMKNYWRQLLNAKLITQRKFDNLTKAERGGLSELDKAGFIKRQLVETRQITKHVAQILDSRMNTKYDENDKLIREVKVITLKSKLVSDFRKDFQFYKVREINNYHHAHDAYLNAVVGTALIKKYPKLESEFVYGDYKVYDVRKMIAKSEQEIGKATAKYFFYSNIMNFFKTEITLANGEIRKRPLIETNGETGEIVWDKGRDFATVRKVLSMPQVNIVKKTEVQTGGFSKESILPKRNSDKLIARKKDWDPKKYGGFDSPTVAYSVLVVAKVEKGKSKKLKSVKELLGITIMERSSFEKNPIDFLEAKGYKEVKKDLIIKLPKYSLFELENGRKRMLASAGELQKGNELALPSKYVNFLYLASHYEKLKGSPEDNEQKQLFVEQHKHYLDEIIEQISEFSKRVILADANLDKVLSAYNKHRDKPIREQAENIIHLFTLTNLGAPAAFKYFDTTIDRKRYTSTKEVLDATLIHQSITGLYETRIDLSQLGGDGGGSSEAAAKGGTLNLEDEYRLYETSAEPEVSPGSTWLSDFPQAWAETGGMGLAVRQAPLIIPLKATSTPVSIKQYPMSQEAKLGIKPHIQRLLDQGILVPCQSPWNTPLLPVKKPGTNDYRPVQDLREVNKRVEDIHPTVPNPYNLLSGLPPSHRWYTVLDLKDAFFCLRLHPTSQPLFAFEWRDPGMGISGQLTWTRLPQGFKNSPTLFNEALHRDLADFRIQHPDLILLQYVDDILLAATSELDCQQGTRALLLTLGNLGYRASAKKAQLCQKQVKYLGYLLKEGQRWLTEARKETVMGQPTPKTPRQLREFLGKAGFCRLFIPGFAEMAAPLYPLTKPGTLFNWGPDQQKAYQEIKQALLTAPALGLPDLTKPFELFVDEKQGYAKGVLTQKLGPWRRPVAYLSKKLDPVAAGWPPCLRMVAAIAVLRKDAGKLTMGQPLVILAPHAVEALVKQPPDRWLSNARMTHYQAMLLDTDRVQFGPVVALNPATLLPLPEEGAPHDCLEILAETHGTRPDLTDQPIPDADHTWYTDGSSFLQEGQRKAGAAVTTETEVIWARALPAGTSAQRAELIALTQALKMAEGKRLNVYTDSRYAFATAHIHGEIYRRRGWLTSEGREIKNKSEILALLKALFLPKRLSIIHCLGHQKGDSAEARGNRLADQAAREAAIKTPPDTSTLLAGKRTADGSEFEKRTADGSEFESPKKKAKVE

SEQ ID NO: 1892 - protein, 2094 aa, synthetic construct
MPAAKRVKLDGGDKKYSIGLDIGTNSVGWAVITDEYKVPSKKFKVLGNTDRHSIKKNLIGALLFDSGETAEATRLKRTARRRYTRRKNRICYLQEIFSNEMAKVDDSFFHRLEESFLVEEDKKHERHPIFGNIVDEVAYHEKYPTIYHLRKKLVDSTDKADLRLIYLALAHMIKFRGHFLIEGDLNPDNSDVDKLFIQLVQTYNQLFEENPINASGVDAKAILSARLSKSRRLENLIAQLPGEKKNGLFGNLIALSLGLTPNFKSNFDLAEDAKLQLSKDTYDDDLDNLLAQIGDQYADLFLAAKNLSDAILLSDILRVNTEITKAPLSASMIKRYDEHHQDLTLLKALVRQQLPEKYKEIFFDQSKNGYAGYIDGGASQEEFYKFIKPILEKMDGTEELLVKLNREDLLRKQRTFDNGSIPHQIHLGELHAILRRQEDFYPFLKDNREKIEKILTFRIPYYVGPLARGNSRFAWMTRKSEETITPWNFEEVVDKGASAQSFIERMTNFDKNLPNEKVLPKHSLLYEYFTVYNELTKVKYVTEGMRKPAFLSGEQKKAIVDLLFKTNRKVTVKQLKEDYFKKIECFDSVEISGVEDRFNASLGTYHDLLKIIKDKDFLDNEENEDILEDIVLTLTLFEDREMIEERLKTYAHLFDDKVMKQLKRRRYTGWGRLSRKLINGIRDKQSGKTILDFLKSDGFANRNFMQLIHDDSLTFKEDIQKAQVSGQGDSLHEHIANLAGSPAIKKGILQTVKVVDELVKVMGRHKPENIVIEMARENQTTQKGQKNSRERMKRIEEGIKELGSQILKEHPVENTQLQNEKLYLYYLQNGRDMYVDQELDINRLSDYDVDHIVPQSFLKDDSIDNKVLTRSDKARGKSDNVPSEEVVKKMKNYWRQLLNAKLITQRKFDNLTKAERGGLSELDKAGFIKRQLVETRQITKHVAQILDSRMNTKYDENDKLIREVKVITLKSKLVSDFRKDFQFYKVREINNYHHAHDAYLNAVVGTALIKKYPKLESEFVYGDYKVYDVRKMIAKSEQEIGKATAKYFFYSNIMNFFKTEITLANGEIRKRPLIETNGETGEIVWDKGRDFATVRKVLSMPQVNIVKKTEVQTGGFSKESILPKRNSDKLIARKKDWDPKKYGGFDSPTVAYSVLVVAKVEKGKSKKLKSVKELLGITIMERSSFEKNPIDFLEAKGYKEVKKDLIIKLPKYSLFELENGRKRMLASAGELQKGNELALPSKYVNFLYLASHYEKLKGSPEDNEQKQLFVEQHKHYLDEIIEQISEFSKRVILADANLDKVLSAYNKHRDKPIREQAENIIHLFTLTNLGAPAAFKYFDTTIDRKRYTSTKEVLDATLIHQSITGLYETRIDLSQLGGDGGGGGPAPGGSGGTLNLEDEYRLYETSAEPEVSPGSTWLSDFPQAWAETGGMGLAVRQAPLIIPLKATSTPVSIKQYPMSQEAKLGIKPHIQRLLDQGILVPCQSPWNTPLLPVKKPGTNDYRPVQDLREVNKRVEDIHPTVPNPYNLLSGLPPSHRWYTVLDLKDAFFCLRLHPTSQPLFAFEWRDPGMGISGQLTWTRLPQGFKNSPTLFNEALHRDLADFRIQHPDLILLQYVDDILLAATSELDCQQGTRALLLTLGNLGYRASAKKAQLCQKQVKYLGYLLKEGQRWLTEARKETVMGQPTPKTPRQLREFLGKAGFCRLFIPGFAEMAAPLYPLTKPGTLFNWGPDQQKAYQEIKQALLTAPALGLPDLTKPFELFVDEKQGYAKGVLTQKLGPWRRPVAYLSKKLDPVAAGWPPCLRMVAAIAVLRKDAGKLTMGQPLVILAPHAVEALVKQPPDRWLSNARMTHYQAMLLDTDRVQFGPVVALNPATLLPLPEEGAPHDCLEILAETHGTRPDLTDQPIPDADHTWYTDGSSFLQEGQRKAGAAVTTETEVIWARALPAGTSAQRAELIALTQALKMAEGKRLNVYTDSRYAFATAHIHGEIYRRRGWLTSEGREIKNKSEILALLKALFLPKRLSIIHCLGHQKGDSAEARGNRLADQAAREAAIKTPPDTSTLLAGKRTADGSEFEKRTADGSEFESPKKKAKVE

SEQ ID NO: 1893 - protein, 2094 aa, synthetic construct
MPAAKRVKLDGGDKKYSIGLDIGTNSVGWAVITDEYKVPSKKFKVLGNTDRHSIKKNLIGALLFDSGETAEATRLKRTARRRYTRRKNRICYLQEIFSNEMAKVDDSFFHRLEESFLVEEDKKHERHPIFGNIVDEVAYHEKYPTIYHLRKKLVDSTDKADLRLIYLALAHMIKFRGHFLIEGDLNPDNSDVDKLFIQLVQTYNQLFEENPINASGVDAKAILSARLSKSRRLENLIAQLPGEKKNGLFGNLIALSLGLTPNFKSNFDLAEDAKLQLSKDTYDDDLDNLLAQIGDQYADLFLAAKNLSDAILLSDILRVNTEITKAPLSASMIKRYDEHHQDLTLLKALVRQQLPEKYKEIFFDQSKNGYAGYIDGGASQEEFYKFIKPILEKMDGTEELLVKLNREDLLRKQRTFDNGSIPHQIHLGELHAILRRQEDFYPFLKDNREKIEKILTFRIPYYVGPLARGNSRFAWMTRKSEETITPWNFEEVVDKGASAQSFIERMTNFDKNLPNEKVLPKHSLLYEYFTVYNELTKVKYVTEGMRKPAFLSGEQKKAIVDLLFKTNRKVTVKQLKEDYFKKIECFDSVEISGVEDRFNASLGTYHDLLKIIKDKDFLDNEENEDILEDIVLTLTLFEDREMIEERLKTYAHLFDDKVMKQLKRRRYTGWGRLSRKLINGIRDKQSGKTILDFLKSDGFANRNFMQLIHDDSLTFKEDIQKAQVSGQGDSLHEHIANLAGSPAIKKGILQTVKVVDELVKVMGRHKPENIVIEMARENQTTQKGQKNSRERMKRIEEGIKELGSQILKEHPVENTQLQNEKLYLYYLQNGRDMYVDQELDINRLSDYDVDHIVPQSFLKDDSIDNKVLTRSDKARGKSDNVPSEEVVKKMKNYWRQLLNAKLITQRKFDNLTKAERGGLSELDKAGFIKRQLVETRQITKHVAQILDSRMNTKYDENDKLIREVKVITLKSKLVSDFRKDFQFYKVREINNYHHAHDAYLNAVVGTALIKKYPKLESEFVYGDYKVYDVRKMIAKSEQEIGKATAKYFFYSNIMNFFKTEITLANGEIRKRPLIETNGETGEIVWDKGRDFATVRKVLSMPQVNIVKKTEVQTGGFSKESILPKRNSDKLIARKKDWDPKKYGGFDSPTVAYSVLVVAKVEKGKSKKLKSVKELLGITIMERSSFEKNPIDFLEAKGYKEVKKDLIIKLPKYSLFELENGRKRMLASAGELQKGNELALPSKYVNFLYLASHYEKLKGSPEDNEQKQLFVEQHKHYLDEIIEQISEFSKRVILADANLDKVLSAYNKHRDKPIREQAENIIHLFTLTNLGAPAAFKYFDTTIDRKRYTSTKEVLDATLIHQSITGLYETRIDLSQLGGDGGPAPGGGGSSGGTLNLEDEYRLYETSAEPEVSPGSTWLSDFPQAWAETGGMGLAVRQAPLIIPLKATSTPVSIKQYPMSQEAKLGIKPHIQRLLDQGILVPCQSPWNTPLLPVKKPGTNDYRPVQDLREVNKRVEDIHPTVPNPYNLLSGLPPSHRWYTVLDLKDAFFCLRLHPTSQPLFAFEWRDPGMGISGQLTWTRLPQGFKNSPTLFNEALHRDLADFRIQHPDLILLQYVDDILLAATSELDCQQGTRALLLTLGNLGYRASAKKAQLCQKQVKYLGYLLKEGQRWLTEARKETVMGQPTPKTPRQLREFLGKAGFCRLFIPGFAEMAAPLYPLTKPGTLFNWGPDQQKAYQEIKQALLTAPALGLPDLTKPFELFVDEKQGYAKGVLTQKLGPWRRPVAYLSKKLDPVAAGWPPCLRMVAAIAVLRKDAGKLTMGQPLVILAPHAVEALVKQPPDRWLSNARMTHYQAMLLDTDRVQFGPVVALNPATLLPLPEEGAPHDCLEILAETHGTRPDLTDQPIPDADHTWYTDGSSFLQEGQRKAGAAVTTETEVIWARALPAGTSAQRAELIALTQALKMAEGKRLNVYTDSRYAFATAHIHGEIYRRRGWLTSEGREIKNKSEILALLKALFLPKRLSIIHCLGHQKGDSAEARGNRLADQAAREAAIKTPPDTSTLLAGKRTADGSEFEKRTADGSEFESPKKKAKVE

SEQ ID NO: 1894 - protein, 2094 aa, synthetic construct
MPAAKRVKLDGGDKKYSIGLDIGTNSVGWAVITDEYKVPSKKFKVLGNTDRHSIKKNLIGALLFDSGETAEATRLKRTARRRYTRRKNRICYLQEIFSNEMAKVDDSFFHRLEESFLVEEDKKHERHPIFGNIVDEVAYHEKYPTIYHLRKKLVDSTDKADLRLIYLALAHMIKFRGHFLIEGDLNPDNSDVDKLFIQLVQTYNQLFEENPINASGVDAKAILSARLSKSRRLENLIAQLPGEKKNGLFGNLIALSLGLTPNFKSNFDLAEDAKLQLSKDTYDDDLDNLLAQIGDQYADLFLAAKNLSDAILLSDILRVNTEITKAPLSASMIKRYDEHHQDLTLLKALVRQQLPEKYKEIFFDQSKNGYAGYIDGGASQEEFYKFIKPILEKMDGTEELLVKLNREDLLRKQRTFDNGSIPHQIHLGELHAILRRQEDFYPFLKDNREKIEKILTFRIPYYVGPLARGNSRFAWMTRKSEETITPWNFEEVVDKGASAQSFIERMTNFDKNLPNEKVLPKHSLLYEYFTVYNELTKVKYVTEGMRKPAFLSGEQKKAIVDLLFKTNRKVTVKQLKEDYFKKIECFDSVEISGVEDRFNASLGTYHDLLKIIKDKDFLDNEENEDILEDIVLTLTLFEDREMIEERLKTYAHLFDDKVMKQLKRRRYTGWGRLSRKLINGIRDKQSGKTILDFLKSDGFANRNFMQLIHDDSLTFKEDIQKAQVSGQGDSLHEHIANLAGSPAIKKGILQTVKVVDELVKVMGRHKPENIVIEMARENQTTQKGQKNSRERMKRIEEGIKELGSQILKEHPVENTQLQNEKLYLYYLQNGRDMYVDQELDINRLSDYDVDHIVPQSFLKDDSIDNKVLTRSDKARGKSDNVPSEEVVKKMKNYWRQLLNAKLITQRKFDNLTKAERGGLSELDKAGFIKRQLVETRQITKHVAQILDSRMNTKYDENDKLIREVKVITLKSKLVSDFRKDFQFYKVREINNYHHAHDAYLNAVVGTALIKKYPKLESEFVYGDYKVYDVRKMIAKSEQEIGKATAKYFFYSNIMNFFKTEITLANGEIRKRPLIETNGETGEIVWDKGRDFATVRKVLSMPQVNIVKKTEVQTGGFSKESILPKRNSDKLIARKKDWDPKKYGGFDSPTVAYSVLVVAKVEKGKSKKLKSVKELLGITIMERSSFEKNPIDFLEAKGYKEVKKDLIIKLPKYSLFELENGRKRMLASAGELQKGNELALPSKYVNFLYLASHYEKLKGSPEDNEQKQLFVEQHKHYLDEIIEQISEFSKRVILADANLDKVLSAYNKHRDKPIREQAENIIHLFTLTNLGAPAAFKYFDTTIDRKRYTSTKEVLDATLIHQSITGLYETRIDLSQLGGDGGGGGGGSGSSGGTLNLEDEYRLYETSAEPEVSPGSTWLSDFPQAWAETGGMGLAVRQAPLIIPLKATSTPVSIKQYPMSQEAKLGIKPHIQRLLDQGILVPCQSPWNTPLLPVKKPGTNDYRPVQDLREVNKRVEDIHPTVPNPYNLLSGLPPSHRWYTVLDLKDAFFCLRLHPTSQPLFAFEWRDPGMGISGQLTWTRLPQGFKNSPTLFNEALHRDLADFRIQHPDLILLQYVDDILLAATSELDCQQGTRALLLTLGNLGYRASAKKAQLCQKQVKYLGYLLKEGQRWLTEARKETVMGQPTPKTPRQLREFLGKAGFCRLFIPGFAEMAAPLYPLTKPGTLFNWGPDQQKAYQEIKQALLTAPALGLPDLTKPFELFVDEKQGYAKGVLTQKLGPWRRPVAYLSKKLDPVAAGWPPCLRMVAAIAVLRKDAGKLTMGQPLVILAPHAVEALVKQPPDRWLSNARMTHYQAMLLDTDRVQFGPVVALNPATLLPLPEEGAPHDCLEILAETHGTRPDLTDQPIPDADHTWYTDGSSFLQEGQRKAGAAVTTETEVIWARALPAGTSAQRAELIALTQALKMAEGKRLNVYTDSRYAFATAHIHGEIYRRRGWLTSEGREIKNKSEILALLKALFLPKRLSIIHCLGHQKGDSAEARGNRLADQAAREAAIKTPPDTSTLLAGKRTADGSEFEKRTADGSEFESPKKKAKVE

SEQ ID NO: 1895 - protein, 2091 aa, synthetic construct
MPAAKRVKLDGGDKKYSIGLDIGTNSVGWAVITDEYKVPSKKFKVLGNTDRHSIKKNLIGALLFDSGETAEATRLKRTARRRYTRRKNRICYLQEIFSNEMAKVDDSFFHRLEESFLVEEDKKHERHPIFGNIVDEVAYHEKYPTIYHLRKKLVDSTDKADLRLIYLALAHMIKFRGHFLIEGDLNPDNSDVDKLFIQLVQTYNQLFEENPINASGVDAKAILSARLSKSRRLENLIAQLPGEKKNGLFGNLIALSLGLTPNFKSNFDLAEDAKLQLSKDTYDDDLDNLLAQIGDQYADLFLAAKNLSDAILLSDILRVNTEITKAPLSASMIKRYDEHHQDLTLLKALVRQQLPEKYKEIFFDQSKNGYAGYIDGGASQEEFYKFIKPILEKMDGTEELLVKLNREDLLRKQRTFDNGSIPHQIHLGELHAILRRQEDFYPFLKDNREKIEKILTFRIPYYVGPLARGNSRFAWMTRKSEETITPWNFEEVVDKGASAQSFIERMTNFDKNLPNEKVLPKHSLLYEYFTVYNELTKVKYVTEGMRKPAFLSGEQKKAIVDLLFKTNRKVTVKQLKEDYFKKIECFDSVEISGVEDRFNASLGTYHDLLKIIKDKDFLDNEENEDILEDIVLTLTLFEDREMIEERLKTYAHLFDDKVMKQLKRRRYTGWGRLSRKLINGIRDKQSGKTILDFLKSDGFANRNFMQLIHDDSLTFKEDIQKAQVSGQGDSLHEHIANLAGSPAIKKGILQTVKVVDELVKVMGRHKPENIVIEMARENQTTQKGQKNSRERMKRIEEGIKELGSQILKEHPVENTQLQNEKLYLYYLQNGRDMYVDQELDINRLSDYDVDHIVPQSFLKDDSIDNKVLTRSDKARGKSDNVPSEEVVKKMKNYWRQLLNAKLITQRKFDNLTKAERGGLSELDKAGFIKRQLVETRQITKHVAQILDSRMNTKYDENDKLIREVKVITLKSKLVSDFRKDFQFYKVREINNYHHAHDAYLNAVVGTALIKKYPKLESEFVYGDYKVYDVRKMIAKSEQEIGKATAKYFFYSNIMNFFKTEITLANGEIRKRPLIETNGETGEIVWDKGRDFATVRKVLSMPQVNIVKKTEVQTGGFSKESILPKRNSDKLIARKKDWDPKKYGGFDSPTVAYSVLVVAKVEKGKSKKLKSVKELLGITIMERSSFEKNPIDFLEAKGYKEVKKDLIIKLPKYSLFELENGRKRMLASAGELQKGNELALPSKYVNFLYLASHYEKLKGSPEDNEQKQLFVEQHKHYLDEIIEQISEFSKRVILADANLDKVLSAYNKHRDKPIREQAENIIHLFTLTNLGAPAAFKYFDTTIDRKRYTSTKEVLDATLIHQSITGLYETRIDLSQLGGDGGPAPGGGGGTLNLEDEYRLYETSAEPEVSPGSTWLSDFPQAWAETGGMGLAVRQAPLIIPLKATSTPVSIKQYPMSQEAKLGIKPHIQRLLDQGILVPCQSPWNTPLLPVKKPGTNDYRPVQDLREVNKRVEDIHPTVPNPYNLLSGLPPSHRWYTVLDLKDAFFCLRLHPTSQPLFAFEWRDPGMGISGQLTWTRLPQGFKNSPTLFNEALHRDLADFRIQHPDLILLQYVDDILLAATSELDCQQGTRALLLTLGNLGYRASAKKAQLCQKQVKYLGYLLKEGQRWLTEARKETVMGQPTPKTPRQLREFLGKAGFCRLFIPGFAEMAAPLYPLTKPGTLFNWGPDQQKAYQEIKQALLTAPALGLPDLTKPFELFVDEKQGYAKGVLTQKLGPWRRPVAYLSKKLDPVAAGWPPCLRMVAAIAVLRKDAGKLTMGQPLVILAPHAVEALVKQPPDRWLSNARMTHYQAMLLDTDRVQFGPVVALNPATLLPLPEEGAPHDCLEILAETHGTRPDLTDQPIPDADHTWYTDGSSFLQEGQRKAGAAVTTETEVIWARALPAGTSAQRAELIALTQALKMAEGKRLNVYTDSRYAFATAHIHGEIYRRRGWLTSEGREIKNKSEILALLKALFLPKRLSIIHCLGHQKGDSAEARGNRLADQAAREAAIKTPPDTSTLLAGKRTADGSEFEKRTADGSEFESPKKKAKVE

SEQ ID NO: 1896 - protein, 2115 aa, synthetic construct
MPAAKRVKLDGGDKKYSIGLDIGTNSVGWAVITDEYKVPSKKFKVLGNTDRHSIKKNLIGALLFDSGETAEATRLKRTARRRYTRRKNRICYLQEIFSNEMAKVDDSFFHRLEESFLVEEDKKHERHPIFGNIVDEVAYHEKYPTIYHLRKKLVDSTDKADLRLIYLALAHMIKFRGHFLIEGDLNPDNSDVDKLFIQLVQTYNQLFEENPINASGVDAKAILSARLSKSRRLENLIAQLPGEKKNGLFGNLIALSLGLTPNFKSNFDLAEDAKLQLSKDTYDDDLDNLLAQIGDQYADLFLAAKNLSDAILLSDILRVNTEITKAPLSASMIKRYDEHHQDLTLLKALVRQQLPEKYKEIFFDQSKNGYAGYIDGGASQEEFYKFIKPILEKMDGTEELLVKLNREDLLRKQRTFDNGSIPHQIHLGELHAILRRQEDFYPFLKDNREKIEKILTFRIPYYVGPLARGNSRFAWMTRKSEETITPWNFEEVVDKGASAQSFIERMTNFDKNLPNEKVLPKHSLLYEYFTVYNELTKVKYVTEGMRKPAFLSGEQKKAIVDLLFKTNRKVTVKQLKEDYFKKIECFDSVEISGVEDRFNASLGTYHDLLKIIKDKDFLDNEENEDILEDIVLTLTLFEDREMIEERLKTYAHLFDDKVMKQLKRRRYTGWGRLSRKLINGIRDKQSGKTILDFLKSDGFANRNFMQLIHDDSLTFKEDIQKAQVSGQGDSLHEHIANLAGSPAIKKGILQTVKVVDELVKVMGRHKPENIVIEMARENQTTQKGQKNSRERMKRIEEGIKELGSQILKEHPVENTQLQNEKLYLYYLQNGRDMYVDQELDINRLSDYDVDHIVPQSFLKDDSIDNKVLTRSDKARGKSDNVPSEEVVKKMKNYWRQLLNAKLITQRKFDNLTKAERGGLSELDKAGFIKRQLVETRQITKHVAQILDSRMNTKYDENDKLIREVKVITLKSKLVSDFRKDFQFYKVREINNYHHAHDAYLNAVVGTALIKKYPKLESEFVYGDYKVYDVRKMIAKSEQEIGKATAKYFFYSNIMNFFKTEITLANGEIRKRPLIETNGETGEIVWDKGRDFATVRKVLSMPQVNIVKKTEVQTGGFSKESILPKRNSDKLIARKKDWDPKKYGGFDSPTVAYSVLVVAKVEKGKSKKLKSVKELLGITIMERSSFEKNPIDFLEAKGYKEVKKDLIIKLPKYSLFELENGRKRMLASAGELQKGNELALPSKYVNFLYLASHYEKLKGSPEDNEQKQLFVEQHKHYLDEIIEQISEFSKRVILADANLDKVLSAYNKHRDKPIREQAENIIHLFTLTNLGAPAAFKYFDTTIDRKRYTSTKEVLDATLIHQSITGLYETRIDLSQLGGDGGEAAAKEAAAKEAAAKEAAAKEAAAKEAAAKGGTLNLEDEYRLYETSAEPEVSPGSTWLSDFPQAWAETGGMGLAVRQAPLIIPLKATSTPVSIKQYPMSQEAKLGIKPHIQRLLDQGILVPCQSPWNTPLLPVKKPGTNDYRPVQDLREVNKRVEDIHPTVPNPYNLLSGLPPSHRWYTVLDLKDAFFCLRLHPTSQPLFAFEWRDPGMGISGQLTWTRLPQGFKNSPTLFNEALHRDLADFRIQHPDLILLQYVDDILLAATSELDCQQGTRALLLTLGNLGYRASAKKAQLCQKQVKYLGYLLKEGQRWLTEARKETVMGQPTPKTPRQLREFLGKAGFCRLFIPGFAEMAAPLYPLTKPGTLFNWGPDQQKAYQEIKQALLTAPALGLPDLTKPFELFVDEKQGYAKGVLTQKLGPWRRPVAYLSKKLDPVAAGWPPCLRMVAAIAVLRKDAGKLTMGQPLVILAPHAVEALVKQPPDRWLSNARMTHYQAMLLDTDRVQFGPVVALNPATLLPLPEEGAPHDCLEILAETHGTRPDLTDQPIPDADHTWYTDGSSFLQEGQRKAGAAVTTETEVIWARALPAGTSAQRAELIALTQALKMAEGKRLNVYTDSRYAFATAHIHGEIYRRRGWLTSEGREIKNKSEILALLKALFLPKRLSIIHCLGHQKGDSAEARGNRLADQAAREAAIKTPPDTSTLLAGKRTADGSEFEKRTADGSEFESPKKKAKVE

SEQ ID NO: 1897 - protein, 2091 aa, synthetic construct
MPAAKRVKLDGGDKKYSIGLDIGTNSVGWAVITDEYKVPSKKFKVLGNTDRHSIKKNLIGALLFDSGETAEATRLKRTARRRYTRRKNRICYLQEIFSNEMAKVDDSFFHRLEESFLVEEDKKHERHPIFGNIVDEVAYHEKYPTIYHLRKKLVDSTDKADLRLIYLALAHMIKFRGHFLIEGDLNPDNSDVDKLFIQLVQTYNQLFEENPINASGVDAKAILSARLSKSRRLENLIAQLPGEKKNGLFGNLIALSLGLTPNFKSNFDLAEDAKLQLSKDTYDDDLDNLLAQIGDQYADLFLAAKNLSDAILLSDILRVNTEITKAPLSASMIKRYDEHHQDLTLLKALVRQQLPEKYKEIFFDQSKNGYAGYIDGGASQEEFYKFIKPILEKMDGTEELLVKLNREDLLRKQRTFDNGSIPHQIHLGELHAILRRQEDFYPFLKDNREKIEKILTFRIPYYVGPLARGNSRFAWMTRKSEETITPWNFEEVVDKGASAQSFIERMTNFDKNLPNEKVLPKHSLLYEYFTVYNELTKVKYVTEGMRKPAFLSGEQKKAIVDLLFKTNRKVTVKQLKEDYFKKIECFDSVEISGVEDRFNASLGTYHDLLKIIKDKDFLDNEENEDILEDIVLTLTLFEDREMIEERLKTYAHLFDDKVMKQLKRRRYTGWGRLSRKLINGIRDKQSGKTILDFLKSDGFANRNFMQLIHDDSLTFKEDIQKAQVSGQGDSLHEHIANLAGSPAIKKGILQTVKVVDELVKVMGRHKPENIVIEMARENQTTQKGQKNSRERMKRIEEGIKELGSQILKEHPVENTQLQNEKLYLYYLQNGRDMYVDQELDINRLSDYDVDHIVPQSFLKDDSIDNKVLTRSDKARGKSDNVPSEEVVKKMKNYWRQLLNAKLITQRKFDNLTKAERGGLSELDKAGFIKRQLVETRQITKHVAQILDSRMNTKYDENDKLIREVKVITLKSKLVSDFRKDFQFYKVREINNYHHAHDAYLNAVVGTALIKKYPKLESEFVYGDYKVYDVRKMIAKSEQEIGKATAKYFFYSNIMNFFKTEITLANGEIRKRPLIETNGETGEIVWDKGRDFATVRKVLSMPQVNIVKKTEVQTGGFSKESILPKRNSDKLIARKKDWDPKKYGGFDSPTVAYSVLVVAKVEKGKSKKLKSVKELLGITIMERSSFEKNPIDFLEAKGYKEVKKDLIIKLPKYSLFELENGRKRMLASAGELQKGNELALPSKYVNFLYLASHYEKLKGSPEDNEQKQLFVEQHKHYLDEIIEQISEFSKRVILADANLDKVLSAYNKHRDKPIREQAENIIHLFTLTNLGAPAAFKYFDTTIDRKRYTSTKEVLDATLIHQSITGLYETRIDLSQLGGDGGGGSGGSGGTLNLEDEYRLYETSAEPEVSPGSTWLSDFPQAWAETGGMGLAVRQAPLIIPLKATSTPVSIKQYPMSQEAKLGIKPHIQRLLDQGILVPCQSPWNTPLLPVKKPGTNDYRPVQDLREVNKRVEDIHPTVPNPYNLLSGLPPSHRWYTVLDLKDAFFCLRLHPTSQPLFAFEWRDPGMGISGQLTWTRLPQGFKNSPTLFNEALHRDLADFRIQHPDLILLQYVDDILLAATSELDCQQGTRALLLTLGNLGYRASAKKAQLCQKQVKYLGYLLKEGQRWLTEARKETVMGQPTPKTPRQLREFLGKAGFCRLFIPGFAEMAAPLYPLTKPGTLFNWGPDQQKAYQEIKQALLTAPALGLPDLTKPFELFVDEKQGYAKGVLTQKLGPWRRPVAYLSKKLDPVAAGWPPCLRMVAAIAVLRKDAGKLTMGQPLVILAPHAVEALVKQPPDRWLSNARMTHYQAMLLDTDRVQFGPVVALNPATLLPLPEEGAPHDCLEILAETHGTRPDLTDQPIPDADHTWYTDGSSFLQEGQRKAGAAVTTETEVIWARALPAGTSAQRAELIALTQALKMAEGKRLNVYTDSRYAFATAHIHGEIYRRRGWLTSEGREIKNKSEILALLKALFLPKRLSIIHCLGHQKGDSAEARGNRLADQAAREAAIKTPPDTSTLLAGKRTADGSEFEKRTADGSEFESPKKKAKVE

SEQ ID NO: 1898 - protein, 2093 aa, synthetic construct
MPAAKRVKLDGGDKKYSIGLDIGTNSVGWAVITDEYKVPSKKFKVLGNTDRHSIKKNLIGALLFDSGETAEATRLKRTARRRYTRRKNRICYLQEIFSNEMAKVDDSFFHRLEESFLVEEDKKHERHPIFGNIVDEVAYHEKYPTIYHLRKKLVDSTDKADLRLIYLALAHMIKFRGHFLIEGDLNPDNSDVDKLFIQLVQTYNQLFEENPINASGVDAKAILSARLSKSRRLENLIAQLPGEKKNGLFGNLIALSLGLTPNFKSNFDLAEDAKLQLSKDTYDDDLDNLLAQIGDQYADLFLAAKNLSDAILLSDILRVNTEITKAPLSASMIKRYDEHHQDLTLLKALVRQQLPEKYKEIFFDQSKNGYAGYIDGGASQEEFYKFIKPILEKMDGTEELLVKLNREDLLRKQRTFDNGSIPHQIHLGELHAILRRQEDFYPFLKDNREKIEKILTFRIPYYVGPLARGNSRFAWMTRKSEETITPWNFEEVVDKGASAQSFIERMTNFDKNLPNEKVLPKHSLLYEYFTVYNELTKVKYVTEGMRKPAFLSGEQKKAIVDLLFKTNRKVTVKQLKEDYFKKIECFDSVEISGVEDRFNASLGTYHDLLKIIKDKDFLDNEENEDILEDIVLTLTLFEDREMIEERLKTYAHLFDDKVMKQLKRRRYTGWGRLSRKLINGIRDKQSGKTILDFLKSDGFANRNFMQLIHDDSLTFKEDIQKAQVSGQGDSLHEHIANLAGSPAIKKGILQTVKVVDELVKVMGRHKPENIVIEMARENQTTQKGQKNSRERMKRIEEGIKELGSQILKEHPVENTQLQNEKLYLYYLQNGRDMYVDQELDINRLSDYDVDHIVPQSFLKDDSIDNKVLTRSDKARGKSDNVPSEEVVKKMKNYWRQLLNAKLITQRKFDNLTKAERGGLSELDKAGFIKRQLVETRQITKHVAQILDSRMNTKYDENDKLIREVKVITLKSKLVSDFRKDFQFYKVREINNYHHAHDAYLNAVVGTALIKKYPKLESEFVYGDYKVYDVRKMIAKSEQEIGKATAKYFFYSNIMNFFKTEITLANGEIRKRPLIETNGETGEIVWDKGRDFATVRKVLSMPQVNIVKKTEVQTGGFSKESILPKRNSDKLIARKKDWDPKKYGGFDSPTVAYSVLVVAKVEKGKSKKLKSVKELLGITIMERSSFEKNPIDFLEAKGYKEVKKDLIIKLPKYSLFELENGRKRMLASAGELQKGNELALPSKYVNFLYLASHYEKLKGSPEDNEQKQLFVEQHKHYLDEIIEQISEFSKRVILADANLDKVLSAYNKHRDKPIREQAENIIHLFTLTNLGAPAAFKYFDTTIDRKRYTSTKEVLDATLIHQSITGLYETRIDLSQLGGDGGEAAAKGSSGGTLNLEDEYRLYETSAEPEVSPGSTWLSDFPQAWAETGGMGLAVRQAPLIIPLKATSTPVSIKQYPMSQEAKLGIKPHIQRLLDQGILVPCQSPWNTPLLPVKKPGTNDYRPVQDLREVNKRVEDIHPTVPNPYNLLSGLPPSHRWYTVLDLKDAFFCLRLHPTSQPLFAFEWRDPGMGISGQLTWTRLPQGFKNSPTLFNEALHRDLADFRIQHPDLILLQYVDDILLAATSELDCQQGTRALLLTLGNLGYRASAKKAQLCQKQVKYLGYLLKEGQRWLTEARKETVMGQPTPKTPRQLREFLGKAGFCRLFIPGFAEMAAPLYPLTKPGTLFNWGPDQQKAYQEIKQALLTAPALGLPDLTKPFELFVDEKQGYAKGVLTQKLGPWRRPVAYLSKKLDPVAAGWPPCLRMVAAIAVLRKDAGKLTMGQPLVILAPHAVEALVKQPPDRWLSNARMTHYQAMLLDTDRVQFGPVVALNPATLLPLPEEGAPHDCLEILAETHGTRPDLTDQPIPDADHTWYTDGSSFLQEGQRKAGAAVTTETEVIWARALPAGTSAQRAELIALTQALKMAEGKRLNVYTDSRYAFATAHIHGEIYRRRGWLTSEGREIKNKSEILALLKALFLPKRLSIIHCLGHQKGDSAEARGNRLADQAAREAAIKTPPDTSTLLAGKRTADGSEFEKRTADGSEFESPKKKAKVE

SEQ ID NO: 1899 - protein, 2094 aa, synthetic construct
MPAAKRVKLDGGDKKYSIGLDIGTNSVGWAVITDEYKVPSKKFKVLGNTDRHSIKKNLIGALLFDSGETAEATRLKRTARRRYTRRKNRICYLQEIFSNEMAKVDDSFFHRLEESFLVEEDKKHERHPIFGNIVDEVAYHEKYPTIYHLRKKLVDSTDKADLRLIYLALAHMIKFRGHFLIEGDLNPDNSDVDKLFIQLVQTYNQLFEENPINASGVDAKAILSARLSKSRRLENLIAQLPGEKKNGLFGNLIALSLGLTPNFKSNFDLAEDAKLQLSKDTYDDDLDNLLAQIGDQYADLFLAAKNLSDAILLSDILRVNTEITKAPLSASMIKRYDEHHQDLTLLKALVRQQLPEKYKEIFFDQSKNGYAGYIDGGASQEEFYKFIKPILEKMDGTEELLVKLNREDLLRKQRTFDNGSIPHQIHLGELHAILRRQEDFYPFLKDNREKIEKILTFRIPYYVGPLARGNSRFAWMTRKSEETITPWNFEEVVDKGASAQSFIERMTNFDKNLPNEKVLPKHSLLYEYFTVYNELTKVKYVTEGMRKPAFLSGEQKKAIVDLLFKTNRKVTVKQLKEDYFKKIECFDSVEISGVEDRFNASLGTYHDLLKIIKDKDFLDNEENEDILEDIVLTLTLFEDREMIEERLKTYAHLFDDKVMKQLKRRRYTGWGRLSRKLINGIRDKQSGKTILDFLKSDGFANRNFMQLIHDDSLTFKEDIQKAQVSGQGDSLHEHIANLAGSPAIKKGILQTVKVVDELVKVMGRHKPENIVIEMARENQTTQKGQKNSRERMKRIEEGIKELGSQILKEHPVENTQLQNEKLYLYYLQNGRDMYVDQELDINRLSDYDVDHIVPQSFLKDDSIDNKVLTRSDKARGKSDNVPSEEVVKKMKNYWRQLLNAKLITQRKFDNLTKAERGGLSELDKAGFIKRQLVETRQITKHVAQILDSRMNTKYDENDKLIREVKVITLKSKLVSDFRKDFQFYKVREINNYHHAHDAYLNAVVGTALIKKYPKLESEFVYGDYKVYDVRKMIAKSEQEIGKATAKYFFYSNIMNFFKTEITLANGEIRKRPLIETNGETGEIVWDKGRDFATVRKVLSMPQVNIVKKTEVQTGGFSKESILPKRNSDKLIARKKDWDPKKYGGFDSPTVAYSVLVVAKVEKGKSKKLKSVKELLGITIMERSSFEKNPIDFLEAKGYKEVKKDLIIKLPKYSLFELENGRKRMLASAGELQKGNELALPSKYVNFLYLASHYEKLKGSPEDNEQKQLFVEQHKHYLDEIIEQISEFSKRVILADANLDKVLSAYNKHRDKPIREQAENIIHLFTLTNLGAPAAFKYFDTTIDRKRYTSTKEVLDATLIHQSITGLYETRIDLSQLGGDGGGGSPAPGGGGGTLNLEDEYRLYETSAEPEVSPGSTWLSDFPQAWAETGGMGLAVRQAPLIIPLKATSTPVSIKQYPMSQEAKLGIKPHIQRLLDQGILVPCQSPWNTPLLPVKKPGTNDYRPVQDLREVNKRVEDIHPTVPNPYNLLSGLPPSHRWYTVLDLKDAFFCLRLHPTSQPLFAFEWRDPGMGISGQLTWTRLPQGFKNSPTLFNEALHRDLADFRIQHPDLILLQYVDDILLAATSELDCQQGTRALLLTLGNLGYRASAKKAQLCQKQVKYLGYLLKEGQRWLTEARKETVMGQPTPKTPRQLREFLGKAGFCRLFIPGFAEMAAPLYPLTKPGTLFNWGPDQQKAYQEIKQALLTAPALGLPDLTKPFELFVDEKQGYAKGVLTQKLGPWRRPVAYLSKKLDPVAAGWPPCLRMVAAIAVLRKDAGKLTMGQPLVILAPHAVEALVKQPPDRWLSNARMTHYQAMLLDTDRVQFGPVVALNPATLLPLPEEGAPHDCLEILAETHGTRPDLTDQPIPDADHTWYTDGSSFLQEGQRKAGAAVTTETEVIWARALPAGTSAQRAELIALTQALKMAEGKRLNVYTDSRYAFATAHIHGEIYRRRGWLTSEGREIKNKSEILALLKALFLPKRLSIIHCLGHQKGDSAEARGNRLADQAAREAAIKTPPDTSTLLAGKRTADGSEFEKRTADGSEFESPKKKAKVE

SEQ ID NO: 1900 - protein, 2091 aa, synthetic construct
MPAAKRVKLDGGDKKYSIGLDIGTNSVGWAVITDEYKVPSKKFKVLGNTDRHSIKKNLIGALLFDSGETAEATRLKRTARRRYTRRKNRICYLQEIFSNEMAKVDDSFFHRLEESFLVEEDKKHERHPIFGNIVDEVAYHEKYPTIYHLRKKLVDSTDKADLRLIYLALAHMIKFRGHFLIEGDLNPDNSDVDKLFIQLVQTYNQLFEENPINASGVDAKAILSARLSKSRRLENLIAQLPGEKKNGLFGNLIALSLGLTPNFKSNFDLAEDAKLQLSKDTYDDDLDNLLAQIGDQYADLFLAAKNLSDAILLSDILRVNTEITKAPLSASMIKRYDEHHQDLTLLKALVRQQLPEKYKEIFFDQSKNGYAGYIDGGASQEEFYKFIKPILEKMDGTEELLVKLNREDLLRKQRTFDNGSIPHQIHLGELHAILRRQEDFYPFLKDNREKIEKILTFRIPYYVGPLARGNSRFAWMTRKSEETITPWNFEEVVDKGASAQSFIERMTNFDKNLPNEKVLPKHSLLYEYFTVYNELTKVKYVTEGMRKPAFLSGEQKKAIVDLLFKTNRKVTVKQLKEDYFKKIECFDSVEISGVEDRFNASLGTYHDLLKIIKDKDFLDNEENEDILEDIVLTLTLFEDREMIEERLKTYAHLFDDKVMKQLKRRRYTGWGRLSRKLINGIRDKQSGKTILDFLKSDGFANRNFMQLIHDDSLTFKEDIQKAQVSGQGDSLHEHIANLAGSPAIKKGILQTVKVVDELVKVMGRHKPENIVIEMARENQTTQKGQKNSRERMKRIEEGIKELGSQILKEHPVENTQLQNEKLYLYYLQNGRDMYVDQELDINRLSDYDVDHIVPQSFLKDDSIDNKVLTRSDKARGKSDNVPSEEVVKKMKNYWRQLLNAKLITQRKFDNLTKAERGGLSELDKAGFIKRQLVETRQITKHVAQILDSRMNTKYDENDKLIREVKVITLKSKLVSDFRKDFQFYKVREINNYHHAHDAYLNAVVGTALIKKYPKLESEFVYGDYKVYDVRKMIAKSEQEIGKATAKYFFYSNIMNFFKTEITLANGEIRKRPLIETNGETGEIVWDKGRDFATVRKVLSMPQVNIVKKTEVQTGGFSKESILPKRNSDKLIARKKDWDPKKYGGFDSPTVAYSVLVVAKVEKGKSKKLKSVKELLGITIMERSSFEKNPIDFLEAKGYKEVKKDLIIKLPKYSLFELENGRKRMLASAGELQKGNELALPSKYVNFLYLASHYEKLKGSPEDNEQKQLFVEQHKHYLDEIIEQISEFSKRVILADANLDKVLSAYNKHRDKPIREQAENIIHLFTLTNLGAPAAFKYFDTTIDRKRYTSTKEVLDATLIHQSITGLYETRIDLSQLGGDGGPAPGSSGGTLNLEDEYRLYETSAEPEVSPGSTWLSDFPQAWAETGGMGLAVRQAPLIIPLKATSTPVSIKQYPMSQEAKLGIKPHIQRLLDQGILVPCQSPWNTPLLPVKKPGTNDYRPVQDLREVNKRVEDIHPTVPNPYNLLSGLPPSHRWYTVLDLKDAFFCLRLHPTSQPLFAFEWRDPGMGISGQLTWTRLPQGFKNSPTLFNEALHRDLADFRIQHPDLILLQYVDDILLAATSELDCQQGTRALLLTLGNLGYRASAKKAQLCQKQVKYLGYLLKEGQRWLTEARKETVMGQPTPKTPRQLREFLGKAGFCRLFIPGFAEMAAPLYPLTKPGTLFNWGPDQQKAYQEIKQALLTAPALGLPDLTKPFELFVDEKQGYAKGVLTQKLGPWRRPVAYLSKKLDPVAAGWPPCLRMVAAIAVLRKDAGKLTMGQPLVILAPHAVEALVKQPPDRWLSNARMTHYQAMLLDTDRVQFGPVVALNPATLLPLPEEGAPHDCLEILAETHGTRPDLTDQPIPDADHTWYTDGSSFLQEGQRKAGAAVTTETEVIWARALPAGTSAQRAELIALTQALKMAEGKRLNVYTDSRYAFATAHIHGEIYRRRGWLTSEGREIKNKSEILALLKALFLPKRLSIIHCLGHQKGDSAEARGNRLADQAAREAAIKTPPDTSTLLAGKRTADGSEFEKRTADGSEFESPKKKAKVE

SEQ ID NO: 1901 - protein, 2096 aa, synthetic construct
MPAAKRVKLDGGDKKYSIGLDIGTNSVGWAVITDEYKVPSKKFKVLGNTDRHSIKKNLIGALLFDSGETAEATRLKRTARRRYTRRKNRICYLQEIFSNEMAKVDDSFFHRLEESFLVEEDKKHERHPIFGNIVDEVAYHEKYPTIYHLRKKLVDSTDKADLRLIYLALAHMIKFRGHFLIEGDLNPDNSDVDKLFIQLVQTYNQLFEENPINASGVDAKAILSARLSKSRRLENLIAQLPGEKKNGLFGNLIALSLGLTPNFKSNFDLAEDAKLQLSKDTYDDDLDNLLAQIGDQYADLFLAAKNLSDAILLSDILRVNTEITKAPLSASMIKRYDEHHQDLTLLKALVRQQLPEKYKEIFFDQSKNGYAGYIDGGASQEEFYKFIKPILEKMDGTEELLVKLNREDLLRKQRTFDNGSIPHQIHLGELHAILRRQEDFYPFLKDNREKIEKILTFRIPYYVGPLARGNSRFAWMTRKSEETITPWNFEEVVDKGASAQSFIERMTNFDKNLPNEKVLPKHSLLYEYFTVYNELTKVKYVTEGMRKPAFLSGEQKKAIVDLLFKTNRKVTVKQLKEDYFKKIECFDSVEISGVEDRFNASLGTYHDLLKIIKDKDFLDNEENEDILEDIVLTLTLFEDREMIEERLKTYAHLFDDKVMKQLKRRRYTGWGRLSRKLINGIRDKQSGKTILDFLKSDGFANRNFMQLIHDDSLTFKEDIQKAQVSGQGDSLHEHIANLAGSPAIKKGILQTVKVVDELVKVMGRHKPENIVIEMARENQTTQKGQKNSRERMKRIEEGIKELGSQILKEHPVENTQLQNEKLYLYYLQNGRDMYVDQELDINRLSDYDVDHIVPQSFLKDDSIDNKVLTRSDKARGKSDNVPSEEVVKKMKNYWRQLLNAKLITQRKFDNLTKAERGGLSELDKAGFIKRQLVETRQITKHVAQILDSRMNTKYDENDKLIREVKVITLKSKLVSDFRKDFQFYKVREINNYHHAHDAYLNAVVGTALIKKYPKLESEFVYGDYKVYDVRKMIAKSEQEIGKATAKYFFYSNIMNFFKTEITLANGEIRKRPLIETNGETGEIVWDKGRDFATVRKVLSMPQVNIVKKTEVQTGGFSKESILPKRNSDKLIARKKDWDPKKYGGFDSPTVAYSVLVVAKVEKGKSKKLKSVKELLGITIMERSSFEKNPIDFLEAKGYKEVKKDLIIKLPKYSLFELENGRKRMLASAGELQKGNELALPSKYVNFLYLASHYEKLKGSPEDNEQKQLFVEQHKHYLDEIIEQISEFSKRVILADANLDKVLSAYNKHRDKPIREQAENIIHLFTLTNLGAPAAFKYFDTTIDRKRYTSTKEVLDATLIHQSITGLYETRIDLSQLGGDGGGSSGGSEAAAKGGTLNLEDEYRLYETSAEPEVSPGSTWLSDFPQAWAETGGMGLAVRQAPLIIPLKATSTPVSIKQYPMSQEAKLGIKPHIQRLLDQGILVPCQSPWNTPLLPVKKPGTNDYRPVQDLREVNKRVEDIHPTVPNPYNLLSGLPPSHRWYTVLDLKDAFFCLRLHPTSQPLFAFEWRDPGMGISGQLTWTRLPQGFKNSPTLFNEALHRDLADFRIQHPDLILLQYVDDILLAATSELDCQQGTRALLLTLGNLGYRASAKKAQLCQKQVKYLGYLLKEGQRWLTEARKETVMGQPTPKTPRQLREFLGKAGFCRLFIPGFAEMAAPLYPLTKPGTLFNWGPDQQKAYQEIKQALLTAPALGLPDLTKPFELFVDEKQGYAKGVLTQKLGPWRRPVAYLSKKLDPVAAGWPPCLRMVAAIAVLRKDAGKLTMGQPLVILAPHAVEALVKQPPDRWLSNARMTHYQAMLLDTDRVQFGPVVALNPATLLPLPEEGAPHDCLEILAETHGTRPDLTDQPIPDADHTWYTDGSSFLQEGQRKAGAAVTTETEVIWARALPAGTSAQRAELIALTQALKMAEGKRLNVYTDSRYAFATAHIHGEIYRRRGWLTSEGREIKNKSEILALLKALFLPKRLSIIHCLGHQKGDSAEARGNRLADQAAREAAIKTPPDTSTLLAGKRTADGSEFEKRTADGSEFESPKKKAKVE

SEQ ID NO: 1902 - protein, 2094 aa, synthetic construct
MPAAKRVKLDGGDKKYSIGLDIGTNSVGWAVITDEYKVPSKKFKVLGNTDRHSIKKNLIGALLFDSGETAEATRLKRTARRRYTRRKNRICYLQEIFSNEMAKVDDSFFHRLEESFLVEEDKKHERHPIFGNIVDEVAYHEKYPTIYHLRKKLVDSTDKADLRLIYLALAHMIKFRGHFLIEGDLNPDNSDVDKLFIQLVQTYNQLFEENPINASGVDAKAILSARLSKSRRLENLIAQLPGEKKNGLFGNLIALSLGLTPNFKSNFDLAEDAKLQLSKDTYDDDLDNLLAQIGDQYADLFLAAKNLSDAILLSDILRVNTEITKAPLSASMIKRYDEHHQDLTLLKALVRQQLPEKYKEIFFDQSKNGYAGYIDGGASQEEFYKFIKPILEKMDGTEELLVKLNREDLLRKQRTFDNGSIPHQIHLGELHAILRRQEDFYPFLKDNREKIEKILTFRIPYYVGPLARGNSRFAWMTRKSEETITPWNFEEVVDKGASAQSFIERMTNFDKNLPNEKVLPKHSLLYEYFTVYNELTKVKYVTEGMRKPAFLSGEQKKAIVDLLFKTNRKVTVKQLKEDYFKKIECFDSVEISGVEDRFNASLGTYHDLLKIIKDKDFLDNEENEDILEDIVLTLTLFEDREMIEERLKTYAHLFDDKVMKQLKRRRYTGWGRLSRKLINGIRDKQSGKTILDFLKSDGFANRNFMQLIHDDSLTFKEDIQKAQVSGQGDSLHEHIANLAGSPAIKKGILQTVKVVDELVKVMGRHKPENIVIEMARENQTTQKGQKNSRERMKRIEEGIKELGSQILKEHPVENTQLQNEKLYLYYLQNGRDMYVDQELDINRLSDYDVDHIVPQSFLKDDSIDNKVLTRSDKARGKSDNVPSEEVVKKMKNYWRQLLNAKLITQRKFDNLTKAERGGLSELDKAGFIKRQLVETRQITKHVAQILDSRMNTKYDENDKLIREVKVITLKSKLVSDFRKDFQFYKVREINNYHHAHDAYLNAVVGTALIKKYPKLESEFVYGDYKVYDVRKMIAKSEQEIGKATAKYFFYSNIMNFFKTEITLANGEIRKRPLIETNGETGEIVWDKGRDFATVRKVLSMPQVNIVKKTEVQTGGFSKESILPKRNSDKLIARKKDWDPKKYGGFDSPTVAYSVLVVAKVEKGKSKKLKSVKELLGITIMERSSFEKNPIDFLEAKGYKEVKKDLIIKLPKYSLFELENGRKRMLASAGELQKGNELALPSKYVNFLYLASHYEKLKGSPEDNEQKQLFVEQHKHYLDEIIEQISEFSKRVILADANLDKVLSAYNKHRDKPIREQAENIIHLFTLTNLGAPAAFKYFDTTIDRKRYTSTKEVLDATLIHQSITGLYETRIDLSQLGGDGGPAPGGSGSSGGTLNLEDEYRLYETSAEPEVSPGSTWLSDFPQAWAETGGMGLAVRQAPLIIPLKATSTPVSIKQYPMSQEAKLGIKPHIQRLLDQGILVPCQSPWNTPLLPVKKPGTNDYRPVQDLREVNKRVEDIHPTVPNPYNLLSGLPPSHRWYTVLDLKDAFFCLRLHPTSQPLFAFEWRDPGMGISGQLTWTRLPQGFKNSPTLFNEALHRDLADFRIQHPDLILLQYVDDILLAATSELDCQQGTRALLLTLGNLGYRASAKKAQLCQKQVKYLGYLLKEGQRWLTEARKETVMGQPTPKTPRQLREFLGKAGFCRLFIPGFAEMAAPLYPLTKPGTLFNWGPDQQKAYQEIKQALLTAPALGLPDLTKPFELFVDEKQGYAKGVLTQKLGPWRRPVAYLSKKLDPVAAGWPPCLRMVAAIAVLRKDAGKLTMGQPLVILAPHAVEALVKQPPDRWLSNARMTHYQAMLLDTDRVQFGPVVALNPATLLPLPEEGAPHDCLEILAETHGTRPDLTDQPIPDADHTWYTDGSSFLQEGQRKAGAAVTTETEVIWARALPAGTSAQRAELIALTQALKMAEGKRLNVYTDSRYAFATAHIHGEIYRRRGWLTSEGREIKNKSEILALLKALFLPKRLSIIHCLGHQKGDSAEARGNRLADQAAREAAIKTPPDTSTLLAGKRTADGSEFEKRTADGSEFESPKKKAKVE

SEQ ID NO: 1903 - protein, 2094 aa, synthetic construct
MPAAKRVKLDGGDKKYSIGLDIGTNSVGWAVITDEYKVPSKKFKVLGNTDRHSIKKNLIGALLFDSGETAEATRLKRTARRRYTRRKNRICYLQEIFSNEMAKVDDSFFHRLEESFLVEEDKKHERHPIFGNIVDEVAYHEKYPTIYHLRKKLVDSTDKADLRLIYLALAHMIKFRGHFLIEGDLNPDNSDVDKLFIQLVQTYNQLFEENPINASGVDAKAILSARLSKSRRLENLIAQLPGEKKNGLFGNLIALSLGLTPNFKSNFDLAEDAKLQLSKDTYDDDLDNLLAQIGDQYADLFLAAKNLSDAILLSDILRVNTEITKAPLSASMIKRYDEHHQDLTLLKALVRQQLPEKYKEIFFDQSKNGYAGYIDGGASQEEFYKFIKPILEKMDGTEELLVKLNREDLLRKQRTFDNGSIPHQIHLGELHAILRRQEDFYPFLKDNREKIEKILTFRIPYYVGPLARGNSRFAWMTRKSEETITPWNFEEVVDKGASAQSFIERMTNFDKNLPNEKVLPKHSLLYEYFTVYNELTKVKYVTEGMRKPAFLSGEQKKAIVDLLFKTNRKVTVKQLKEDYFKKIECFDSVEISGVEDRFNASLGTYHDLLKIIKDKDFLDNEENEDILEDIVLTLTLFEDREMIEERLKTYAHLFDDKVMKQLKRRRYTGWGRLSRKLINGIRDKQSGKTILDFLKSDGFANRNFMQLIHDDSLTFKEDIQKAQVSGQGDSLHEHIANLAGSPAIKKGILQTVKVVDELVKVMGRHKPENIVIEMARENQTTQKGQKNSRERMKRIEEGIKELGSQILKEHPVENTQLQNEKLYLYYLQNGRDMYVDQELDINRLSDYDVDHIVPQSFLKDDSIDNKVLTRSDKARGKSDNVPSEEVVKKMKNYWRQLLNAKLITQRKFDNLTKAERGGLSELDKAGFIKRQLVETRQITKHVAQILDSRMNTKYDENDKLIREVKVITLKSKLVSDFRKDFQFYKVREINNYHHAHDAYLNAVVGTALIKKYPKLESEFVYGDYKVYDVRKMIAKSEQEIGKATAKYFFYSNIMNFFKTEITLANGEIRKRPLIETNGETGEIVWDKGRDFATVRKVLSMPQVNIVKKTEVQTGGFSKESILPKRNSDKLIARKKDWDPKKYGGFDSPTVAYSVLVVAKVEKGKSKKLKSVKELLGITIMERSSFEKNPIDFLEAKGYKEVKKDLIIKLPKYSLFELENGRKRMLASAGELQKGNELALPSKYVNFLYLASHYEKLKGSPEDNEQKQLFVEQHKHYLDEIIEQISEFSKRVILADANLDKVLSAYNKHRDKPIREQAENIIHLFTLTNLGAPAAFKYFDTTIDRKRYTSTKEVLDATLIHQSITGLYETRIDLSQLGGDGGGGSPAPGSSGGTLNLEDEYRLYETSAEPEVSPGSTWLSDFPQAWAETGGMGLAVRQAPLIIPLKATSTPVSIKQYPMSQEAKLGIKPHIQRLLDQGILVPCQSPWNTPLLPVKKPGTNDYRPVQDLREVNKRVEDIHPTVPNPYNLLSGLPPSHRWYTVLDLKDAFFCLRLHPTSQPLFAFEWRDPGMGISGQLTWTRLPQGFKNSPTLFNEALHRDLADFRIQHPDLILLQYVDDILLAATSELDCQQGTRALLLTLGNLGYRASAKKAQLCQKQVKYLGYLLKEGQRWLTEARKETVMGQPTPKTPRQLREFLGKAGFCRLFIPGFAEMAAPLYPLTKPGTLFNWGPDQQKAYQEIKQALLTAPALGLPDLTKPFELFVDEKQGYAKGVLTQKLGPWRRPVAYLSKKLDPVAAGWPPCLRMVAAIAVLRKDAGKLTMGQPLVILAPHAVEALVKQPPDRWLSNARMTHYQAMLLDTDRVQFGPVVALNPATLLPLPEEGAPHDCLEILAETHGTRPDLTDQPIPDADHTWYTDGSSFLQEGQRKAGAAVTTETEVIWARALPAGTSAQRAELIALTQALKMAEGKRLNVYTDSRYAFATAHIHGEIYRRRGWLTSEGREIKNKSEILALLKALFLPKRLSIIHCLGHQKGDSAEARGNRLADQAAREAAIKTPPDTSTLLAGKRTADGSEFEKRTADGSEFESPKKKAKVE

SEQ ID NO: 1904 - protein, 2091 aa, synthetic construct
MPAAKRVKLDGGDKKYSIGLDIGTNSVGWAVITDEYKVPSKKFKVLGNTDRHSIKKNLIGALLFDSGETAEATRLKRTARRRYTRRKNRICYLQEIFSNEMAKVDDSFFHRLEESFLVEEDKKHERHPIFGNIVDEVAYHEKYPTIYHLRKKLVDSTDKADLRLIYLALAHMIKFRGHFLIEGDLNPDNSDVDKLFIQLVQTYNQLFEENPINASGVDAKAILSARLSKSRRLENLIAQLPGEKKNGLFGNLIALSLGLTPNFKSNFDLAEDAKLQLSKDTYDDDLDNLLAQIGDQYADLFLAAKNLSDAILLSDILRVNTEITKAPLSASMIKRYDEHHQDLTLLKALVRQQLPEKYKEIFFDQSKNGYAGYIDGGASQEEFYKFIKPILEKMDGTEELLVKLNREDLLRKQRTFDNGSIPHQIHLGELHAILRRQEDFYPFLKDNREKIEKILTFRIPYYVGPLARGNSRFAWMTRKSEETITPWNFEEVVDKGASAQSFIERMTNFDKNLPNEKVLPKHSLLYEYFTVYNELTKVKYVTEGMRKPAFLSGEQKKAIVDLLFKTNRKVTVKQLKEDYFKKIECFDSVEISGVEDRFNASLGTYHDLLKIIKDKDFLDNEENEDILEDIVLTLTLFEDREMIEERLKTYAHLFDDKVMKQLKRRRYTGWGRLSRKLINGIRDKQSGKTILDFLKSDGFANRNFMQLIHDDSLTFKEDIQKAQVSGQGDSLHEHIANLAGSPAIKKGILQTVKVVDELVKVMGRHKPENIVIEMARENQTTQKGQKNSRERMKRIEEGIKELGSQILKEHPVENTQLQNEKLYLYYLQNGRDMYVDQELDINRLSDYDVDHIVPQSFLKDDSIDNKVLTRSDKARGKSDNVPSEEVVKKMKNYWRQLLNAKLITQRKFDNLTKAERGGLSELDKAGFIKRQLVETRQITKHVAQILDSRMNTKYDENDKLIREVKVITLKSKLVSDFRKDFQFYKVREINNYHHAHDAYLNAVVGTALIKKYPKLESEFVYGDYKVYDVRKMIAKSEQEIGKATAKYFFYSNIMNFFKTEITLANGEIRKRPLIETNGETGEIVWDKGRDFATVRKVLSMPQVNIVKKTEVQTGGFSKESILPKRNSDKLIARKKDWDPKKYGGFDSPTVAYSVLVVAKVEKGKSKKLKSVKELLGITIMERSSFEKNPIDFLEAKGYKEVKKDLIIKLPKYSLFELENGRKRMLASAGELQKGNELALPSKYVNFLYLASHYEKLKGSPEDNEQKQLFVEQHKHYLDEIIEQISEFSKRVILADANLDKVLSAYNKHRDKPIREQAENIIHLFTLTNLGAPAAFKYFDTTIDRKRYTSTKEVLDATLIHQSITGLYETRIDLSQLGGDGGGSSGGGGGTLNLEDEYRLYETSAEPEVSPGSTWLSDFPQAWAETGGMGLAVRQAPLIIPLKATSTPVSIKQYPMSQEAKLGIKPHIQRLLDQGILVPCQSPWNTPLLPVKKPGTNDYRPVQDLREVNKRVEDIHPTVPNPYNLLSGLPPSHRWYTVLDLKDAFFCLRLHPTSQPLFAFEWRDPGMGISGQLTWTRLPQGFKNSPTLFNEALHRDLADFRIQHPDLILLQYVDDILLAATSELDCQQGTRALLLTLGNLGYRASAKKAQLCQKQVKYLGYLLKEGQRWLTEARKETVMGQPTPKTPRQLREFLGKAGFCRLFIPGFAEMAAPLYPLTKPGTLFNWGPDQQKAYQEIKQALLTAPALGLPDLTKPFELFVDEKQGYAKGVLTQKLGPWRRPVAYLSKKLDPVAAGWPPCLRMVAAIAVLRKDAGKLTMGQPLVILAPHAVEALVKQPPDRWLSNARMTHYQAMLLDTDRVQFGPVVALNPATLLPLPEEGAPHDCLEILAETHGTRPDLTDQPIPDADHTWYTDGSSFLQEGQRKAGAAVTTETEVIWARALPAGTSAQRAELIALTQALKMAEGKRLNVYTDSRYAFATAHIHGEIYRRRGWLTSEGREIKNKSEILALLKALFLPKRLSIIHCLGHQKGDSAEARGNRLADQAAREAAIKTPPDTSTLLAGKRTADGSEFEKRTADGSEFESPKKKAKVE

SEQ ID NO: 1905 - protein, 2094 aa, synthetic construct
MPAAKRVKLDGGDKKYSIGLDIGTNSVGWAVITDEYKVPSKKFKVLGNTDRHSIKKNLIGALLFDSGETAEATRLKRTARRRYTRRKNRICYLQEIFSNEMAKVDDSFFHRLEESFLVEEDKKHERHPIFGNIVDEVAYHEKYPTIYHLRKKLVDSTDKADLRLIYLALAHMIKFRGHFLIEGDLNPDNSDVDKLFIQLVQTYNQLFEENPINASGVDAKAILSARLSKSRRLENLIAQLPGEKKNGLFGNLIALSLGLTPNFKSNFDLAEDAKLQLSKDTYDDDLDNLLAQIGDQYADLFLAAKNLSDAILLSDILRVNTEITKAPLSASMIKRYDEHHQDLTLLKALVRQQLPEKYKEIFFDQSKNGYAGYIDGGASQEEFYKFIKPILEKMDGTEELLVKLNREDLLRKQRTFDNGSIPHQIHLGELHAILRRQEDFYPFLKDNREKIEKILTFRIPYYVGPLARGNSRFAWMTRKSEETITPWNFEEVVDKGASAQSFIERMTNFDKNLPNEKVLPKHSLLYEYFTVYNELTKVKYVTEGMRKPAFLSGEQKKAIVDLLFKTNRKVTVKQLKEDYFKKIECFDSVEISGVEDRFNASLGTYHDLLKIIKDKDFLDNEENEDILEDIVLTLTLFEDREMIEERLKTYAHLFDDKVMKQLKRRRYTGWGRLSRKLINGIRDKQSGKTILDFLKSDGFANRNFMQLIHDDSLTFKEDIQKAQVSGQGDSLHEHIANLAGSPAIKKGILQTVKVVDELVKVMGRHKPENIVIEMARENQTTQKGQKNSRERMKRIEEGIKELGSQILKEHPVENTQLQNEKLYLYYLQNGRDMYVDQELDINRLSDYDVDHIVPQSFLKDDSIDNKVLTRSDKARGKSDNVPSEEVVKKMKNYWRQLLNAKLITQRKFDNLTKAERGGLSELDKAGFIKRQLVETRQITKHVAQILDSRMNTKYDENDKLIREVKVITLKSKLVSDFRKDFQFYKVREINNYHHAHDAYLNAVVGTALIKKYPKLESEFVYGDYKVYDVRKMIAKSEQEIGKATAKYFFYSNIMNFFKTEITLANGEIRKRPLIETNGETGEIVWDKGRDFATVRKVLSMPQVNIVKKTEVQTGGFSKESILPKRNSDKLIARKKDWDPKKYGGFDSPTVAYSVLVVAKVEKGKSKKLKSVKELLGITIMERSSFEKNPIDFLEAKGYKEVKKDLIIKLPKYSLFELENGRKRMLASAGELQKGNELALPSKYVNFLYLASHYEKLKGSPEDNEQKQLFVEQHKHYLDEIIEQISEFSKRVILADANLDKVLSAYNKHRDKPIREQAENIIHLFTLTNLGAPAAFKYFDTTIDRKRYTSTKEVLDATLIHQSITGLYETRIDLSQLGGDGGGGGGSSPAPGGTLNLEDEYRLYETSAEPEVSPGSTWLSDFPQAWAETGGMGLAVRQAPLIIPLKATSTPVSIKQYPMSQEAKLGIKPHIQRLLDQGILVPCQSPWNTPLLPVKKPGTNDYRPVQDLREVNKRVEDIHPTVPNPYNLLSGLPPSHRWYTVLDLKDAFFCLRLHPTSQPLFAFEWRDPGMGISGQLTWTRLPQGFKNSPTLFNEALHRDLADFRIQHPDLILLQYVDDILLAATSELDCQQGTRALLLTLGNLGYRASAKKAQLCQKQVKYLGYLLKEGQRWLTEARKETVMGQPTPKTPRQLREFLGKAGFCRLFIPGFAEMAAPLYPLTKPGTLFNWGPDQQKAYQEIKQALLTAPALGLPDLTKPFELFVDEKQGYAKGVLTQKLGPWRRPVAYLSKKLDPVAAGWPPCLRMVAAIAVLRKDAGKLTMGQPLVILAPHAVEALVKQPPDRWLSNARMTHYQAMLLDTDRVQFGPVVALNPATLLPLPEEGAPHDCLEILAETHGTRPDLTDQPIPDADHTWYTDGSSFLQEGQRKAGAAVTTETEVIWARALPAGTSAQRAELIALTQALKMAEGKRLNVYTDSRYAFATAHIHGEIYRRRGWLTSEGREIKNKSEILALLKALFLPKRLSIIHCLGHQKGDSAEARGNRLADQAAREAAIKTPPDTSTLLAGKRTADGSEFEKRTADGSEFESPKKKAKVE

SEQ ID NO: 1906 - protein, 2096 aa, synthetic construct
MPAAKRVKLDGGDKKYSIGLDIGTNSVGWAVITDEYKVPSKKFKVLGNTDRHSIKKNLIGALLFDSGETAEATRLKRTARRRYTRRKNRICYLQEIFSNEMAKVDDSFFHRLEESFLVEEDKKHERHPIFGNIVDEVAYHEKYPTIYHLRKKLVDSTDKADLRLIYLALAHMIKFRGHFLIEGDLNPDNSDVDKLFIQLVQTYNQLFEENPINASGVDAKAILSARLSKSRRLENLIAQLPGEKKNGLFGNLIALSLGLTPNFKSNFDLAEDAKLQLSKDTYDDDLDNLLAQIGDQYADLFLAAKNLSDAILLSDILRVNTEITKAPLSASMIKRYDEHHQDLTLLKALVRQQLPEKYKEIFFDQSKNGYAGYIDGGASQEEFYKFIKPILEKMDGTEELLVKLNREDLLRKQRTFDNGSIPHQIHLGELHAILRRQEDFYPFLKDNREKIEKILTFRIPYYVGPLARGNSRFAWMTRKSEETITPWNFEEVVDKGASAQSFIERMTNFDKNLPNEKVLPKHSLLYEYFTVYNELTKVKYVTEGMRKPAFLSGEQKKAIVDLLFKTNRKVTVKQLKEDYFKKIECFDSVEISGVEDRFNASLGTYHDLLKIIKDKDFLDNEENEDILEDIVLTLTLFEDREMIEERLKTYAHLFDDKVMKQLKRRRYTGWGRLSRKLINGIRDKQSGKTILDFLKSDGFANRNFMQLIHDDSLTFKEDIQKAQVSGQGDSLHEHIANLAGSPAIKKGILQTVKVVDELVKVMGRHKPENIVIEMARENQTTQKGQKNSRERMKRIEEGIKELGSQILKEHPVENTQLQNEKLYLYYLQNGRDMYVDQELDINRLSDYDVDHIVPQSFLKDDSIDNKVLTRSDKARGKSDNVPSEEVVKKMKNYWRQLLNAKLITQRKFDNLTKAERGGLSELDKAGFIKRQLVETRQITKHVAQILDSRMNTKYDENDKLIREVKVITLKSKLVSDFRKDFQFYKVREINNYHHAHDAYLNAVVGTALIKKYPKLESEFVYGDYKVYDVRKMIAKSEQEIGKATAKYFFYSNIMNFFKTEITLANGEIRKRPLIETNGETGEIVWDKGRDFATVRKVLSMPQVNIVKKTEVQTGGFSKESILPKRNSDKLIARKKDWDPKKYGGFDSPTVAYSVLVVAKVEKGKSKKLKSVKELLGITIMERSSFEKNPIDFLEAKGYKEVKKDLIIKLPKYSLFELENGRKRMLASAGELQKGNELALPSKYVNFLYLASHYEKLKGSPEDNEQKQLFVEQHKHYLDEIIEQISEFSKRVILADANLDKVLSAYNKHRDKPIREQAENIIHLFTLTNLGAPAAFKYFDTTIDRKRYTSTKEVLDATLIHQSITGLYETRIDLSQLGGDGGGGGGGSEAAAKGGTLNLEDEYRLYETSAEPEVSPGSTWLSDFPQAWAETGGMGLAVRQAPLIIPLKATSTPVSIKQYPMSQEAKLGIKPHIQRLLDQGILVPCQSPWNTPLLPVKKPGTNDYRPVQDLREVNKRVEDIHPTVPNPYNLLSGLPPSHRWYTVLDLKDAFFCLRLHPTSQPLFAFEWRDPGMGISGQLTWTRLPQGFKNSPTLFNEALHRDLADFRIQHPDLILLQYVDDILLAATSELDCQQGTRALLLTLGNLGYRASAKKAQLCQKQVKYLGYLLKEGQRWLTEARKETVMGQPTPKTPRQLREFLGKAGFCRLFIPGFAEMAAPLYPLTKPGTLFNWGPDQQKAYQEIKQALLTAPALGLPDLTKPFELFVDEKQGYAKGVLTQKLGPWRRPVAYLSKKLDPVAAGWPPCLRMVAAIAVLRKDAGKLTMGQPLVILAPHAVEALVKQPPDRWLSNARMTHYQAMLLDTDRVQFGPVVALNPATLLPLPEEGAPHDCLEILAETHGTRPDLTDQPIPDADHTWYTDGSSFLQEGQRKAGAAVTTETEVIWARALPAGTSAQRAELIALTQALKMAEGKRLNVYTDSRYAFATAHIHGEIYRRRGWLTSEGREIKNKSEILALLKALFLPKRLSIIHCLGHQKGDSAEARGNRLADQAAREAAIKTPPDTSTLLAGKRTADGSEFEKRTADGSEFESPKKKAKVE

SEQ ID NO: 1907 - protein, 2096 aa, synthetic construct
MPAAKRVKLDGGDKKYSIGLDIGTNSVGWAVITDEYKVPSKKFKVLGNTDRHSIKKNLIGALLFDSGETAEATRLKRTARRRYTRRKNRICYLQEIFSNEMAKVDDSFFHRLEESFLVEEDKKHERHPIFGNIVDEVAYHEKYPTIYHLRKKLVDSTDKADLRLIYLALAHMIKFRGHFLIEGDLNPDNSDVDKLFIQLVQTYNQLFEENPINASGVDAKAILSARLSKSRRLENLIAQLPGEKKNGLFGNLIALSLGLTPNFKSNFDLAEDAKLQLSKDTYDDDLDNLLAQIGDQYADLFLAAKNLSDAILLSDILRVNTEITKAPLSASMIKRYDEHHQDLTLLKALVRQQLPEKYKEIFFDQSKNGYAGYIDGGASQEEFYKFIKPILEKMDGTEELLVKLNREDLLRKQRTFDNGSIPHQIHLGELHAILRRQEDFYPFLKDNREKIEKILTFRIPYYVGPLARGNSRFAWMTRKSEETITPWNFEEVVDKGASAQSFIERMTNFDKNLPNEKVLPKHSLLYEYFTVYNELTKVKYVTEGMRKPAFLSGEQKKAIVDLLFKTNRKVTVKQLKEDYFKKIECFDSVEISGVEDRFNASLGTYHDLLKIIKDKDFLDNEENEDILEDIVLTLTLFEDREMIEERLKTYAHLFDDKVMKQLKRRRYTGWGRLSRKLINGIRDKQSGKTILDFLKSDGFANRNFMQLIHDDSLTFKEDIQKAQVSGQGDSLHEHIANLAGSPAIKKGILQTVKVVDELVKVMGRHKPENIVIEMARENQTTQKGQKNSRERMKRIEEGIKELGSQILKEHPVENTQLQNEKLYLYYLQNGRDMYVDQELDINRLSDYDVDHIVPQSFLKDDSIDNKVLTRSDKARGKSDNVPSEEVVKKMKNYWRQLLNAKLITQRKFDNLTKAERGGLSELDKAGFIKRQLVETRQITKHVAQILDSRMNTKYDENDKLIREVKVITLKSKLVSDFRKDFQFYKVREINNYHHAHDAYLNAVVGTALIKKYPKLESEFVYGDYKVYDVRKMIAKSEQEIGKATAKYFFYSNIMNFFKTEITLANGEIRKRPLIETNGETGEIVWDKGRDFATVRKVLSMPQVNIVKKTEVQTGGFSKESILPKRNSDKLIARKKDWDPKKYGGFDSPTVAYSVLVVAKVEKGKSKKLKSVKELLGITIMERSSFEKNPIDFLEAKGYKEVKKDLIIKLPKYSLFELENGRKRMLASAGELQKGNELALPSKYVNFLYLASHYEKLKGSPEDNEQKQLFVEQHKHYLDEIIEQISEFSKRVILADANLDKVLSAYNKHRDKPIREQAENIIHLFTLTNLGAPAAFKYFDTTIDRKRYTSTKEVLDATLIHQSITGLYETRIDLSQLGGDGGEAAAKGGSGGGGGTLNLEDEYRLYETSAEPEVSPGSTWLSDFPQAWAETGGMGLAVRQAPLIIPLKATSTPVSIKQYPMSQEAKLGIKPHIQRLLDQGILVPCQSPWNTPLLPVKKPGTNDYRPVQDLREVNKRVEDIHPTVPNPYNLLSGLPPSHRWYTVLDLKDAFFCLRLHPTSQPLFAFEWRDPGMGISGQLTWTRLPQGFKNSPTLFNEALHRDLADFRIQHPDLILLQYVDDILLAATSELDCQQGTRALLLTLGNLGYRASAKKAQLCQKQVKYLGYLLKEGQRWLTEARKETVMGQPTPKTPRQLREFLGKAGFCRLFIPGFAEMAAPLYPLTKPGTLFNWGPDQQKAYQEIKQALLTAPALGLPDLTKPFELFVDEKQGYAKGVLTQKLGPWRRPVAYLSKKLDPVAAGWPPCLRMVAAIAVLRKDAGKLTMGQPLVILAPHAVEALVKQPPDRWLSNARMTHYQAMLLDTDRVQFGPVVALNPATLLPLPEEGAPHDCLEILAETHGTRPDLTDQPIPDADHTWYTDGSSFLQEGQRKAGAAVTTETEVIWARALPAGTSAQRAELIALTQALKMAEGKRLNVYTDSRYAFATAHIHGEIYRRRGWLTSEGREIKNKSEILALLKALFLPKRLSIIHCLGHQKGDSAEARGNRLADQAAREAAIKTPPDTSTLLAGKRTADGSEFEKRTADGSEFESPKKKAKVE

SEQ ID NO: 1908 - protein, 2096 aa, synthetic construct
MPAAKRVKLDGGDKKYSIGLDIGTNSVGWAVITDEYKVPSKKFKVLGNTDRHSIKKNLIGALLFDSGETAEATRLKRTARRRYTRRKNRICYLQEIFSNEMAKVDDSFFHRLEESFLVEEDKKHERHPIFGNIVDEVAYHEKYPTIYHLRKKLVDSTDKADLRLIYLALAHMIKFRGHFLIEGDLNPDNSDVDKLFIQLVQTYNQLFEENPINASGVDAKAILSARLSKSRRLENLIAQLPGEKKNGLFGNLIALSLGLTPNFKSNFDLAEDAKLQLSKDTYDDDLDNLLAQIGDQYADLFLAAKNLSDAILLSDILRVNTEITKAPLSASMIKRYDEHHQDLTLLKALVRQQLPEKYKEIFFDQSKNGYAGYIDGGASQEEFYKFIKPILEKMDGTEELLVKLNREDLLRKQRTFDNGSIPHQIHLGELHAILRRQEDFYPFLKDNREKIEKILTFRIPYYVGPLARGNSRFAWMTRKSEETITPWNFEEVVDKGASAQSFIERMTNFDKNLPNEKVLPKHSLLYEYFTVYNELTKVKYVTEGMRKPAFLSGEQKKAIVDLLFKTNRKVTVKQLKEDYFKKIECFDSVEISGVEDRFNASLGTYHDLLKIIKDKDFLDNEENEDILEDIVLTLTLFEDREMIEERLKTYAHLFDDKVMKQLKRRRYTGWGRLSRKLINGIRDKQSGKTILDFLKSDGFANRNFMQLIHDDSLTFKEDIQKAQVSGQGDSLHEHIANLAGSPAIKKGILQTVKVVDELVKVMGRHKPENIVIEMARENQTTQKGQKNSRERMKRIEEGIKELGSQILKEHPVENTQLQNEKLYLYYLQNGRDMYVDQELDINRLSDYDVDHIVPQSFLKDDSIDNKVLTRSDKARGKSDNVPSEEVVKKMKNYWRQLLNAKLITQRKFDNLTKAERGGLSELDKAGFIKRQLVETRQITKHVAQILDSRMNTKYDENDKLIREVKVITLKSKLVSDFRKDFQFYKVREINNYHHAHDAYLNAVVGTALIKKYPKLESEFVYGDYKVYDVRKMIAKSEQEIGKATAKYFFYSNIMNFFKTEITLANGEIRKRPLIETNGETGEIVWDKGRDFATVRKVLSMPQVNIVKKTEVQTGGFSKESILPKRNSDKLIARKKDWDPKKYGGFDSPTVAYSVLVVAKVEKGKSKKLKSVKELLGITIMERSSFEKNPIDFLEAKGYKEVKKDLIIKLPKYSLFELENGRKRMLASAGELQKGNELALPSKYVNFLYLASHYEKLKGSPEDNEQKQLFVEQHKHYLDEIIEQISEFSKRVILADANLDKVLSAYNKHRDKPIREQAENIIHLFTLTNLGAPAAFKYFDTTIDRKRYTSTKEVLDATLIHQSITGLYETRIDLSQLGGDGGGGSPAPEAAAKGGTLNLEDEYRLYETSAEPEVSPGSTWLSDFPQAWAETGGMGLAVRQAPLIIPLKATSTPVSIKQYPMSQEAKLGIKPHIQRLLDQGILVPCQSPWNTPLLPVKKPGTNDYRPVQDLREVNKRVEDIHPTVPNPYNLLSGLPPSHRWYTVLDLKDAFFCLRLHPTSQPLFAFEWRDPGMGISGQLTWTRLPQGFKNSPTLFNEALHRDLADFRIQHPDLILLQYVDDILLAATSELDCQQGTRALLLTLGNLGYRASAKKAQLCQKQVKYLGYLLKEGQRWLTEARKETVMGQPTPKTPRQLREFLGKAGFCRLFIPGFAEMAAPLYPLTKPGTLFNWGPDQQKAYQEIKQALLTAPALGLPDLTKPFELFVDEKQGYAKGVLTQKLGPWRRPVAYLSKKLDPVAAGWPPCLRMVAAIAVLRKDAGKLTMGQPLVILAPHAVEALVKQPPDRWLSNARMTHYQAMLLDTDRVQFGPVVALNPATLLPLPEEGAPHDCLEILAETHGTRPDLTDQPIPDADHTWYTDGSSFLQEGQRKAGAAVTTETEVIWARALPAGTSAQRAELIALTQALKMAEGKRLNVYTDSRYAFATAHIHGEIYRRRGWLTSEGREIKNKSEILALLKALFLPKRLSIIHCLGHQKGDSAEARGNRLADQAAREAAIKTPPDTSTLLAGKRTADGSEFEKRTADGSEFESPKKKAKVE

SEQ ID NO: 1909 - protein, 2094 aa, synthetic construct
MPAAKRVKLDGGDKKYSIGLDIGTNSVGWAVITDEYKVPSKKFKVLGNTDRHSIKKNLIGALLFDSGETAEATRLKRTARRRYTRRKNRICYLQEIFSNEMAKVDDSFFHRLEESFLVEEDKKHERHPIFGNIVDEVAYHEKYPTIYHLRKKLVDSTDKADLRLIYLALAHMIKFRGHFLIEGDLNPDNSDVDKLFIQLVQTYNQLFEENPINASGVDAKAILSARLSKSRRLENLIAQLPGEKKNGLFGNLIALSLGLTPNFKSNFDLAEDAKLQLSKDTYDDDLDNLLAQIGDQYADLFLAAKNLSDAILLSDILRVNTEITKAPLSASMIKRYDEHHQDLTLLKALVRQQLPEKYKEIFFDQSKNGYAGYIDGGASQEEFYKFIKPILEKMDGTEELLVKLNREDLLRKQRTFDNGSIPHQIHLGELHAILRRQEDFYPFLKDNREKIEKILTFRIPYYVGPLARGNSRFAWMTRKSEETITPWNFEEVVDKGASAQSFIERMTNFDKNLPNEKVLPKHSLLYEYFTVYNELTKVKYVTEGMRKPAFLSGEQKKAIVDLLFKTNRKVTVKQLKEDYFKKIECFDSVEISGVEDRFNASLGTYHDLLKIIKDKDFLDNEENEDILEDIVLTLTLFEDREMIEERLKTYAHLFDDKVMKQLKRRRYTGWGRLSRKLINGIRDKQSGKTILDFLKSDGFANRNFMQLIHDDSLTFKEDIQKAQVSGQGDSLHEHIANLAGSPAIKKGILQTVKVVDELVKVMGRHKPENIVIEMARENQTTQKGQKNSRERMKRIEEGIKELGSQILKEHPVENTQLQNEKLYLYYLQNGRDMYVDQELDINRLSDYDVDHIVPQSFLKDDSIDNKVLTRSDKARGKSDNVPSEEVVKKMKNYWRQLLNAKLITQRKFDNLTKAERGGLSELDKAGFIKRQLVETRQITKHVAQILDSRMNTKYDENDKLIREVKVITLKSKLVSDFRKDFQFYKVREINNYHHAHDAYLNAVVGTALIKKYPKLESEFVYGDYKVYDVRKMIAKSEQEIGKATAKYFFYSNIMNFFKTEITLANGEIRKRPLIETNGETGEIVWDKGRDFATVRKVLSMPQVNIVKKTEVQTGGFSKESILPKRNSDKLIARKKDWDPKKYGGFDSPTVAYSVLVVAKVEKGKSKKLKSVKELLGITIMERSSFEKNPIDFLEAKGYKEVKKDLIIKLPKYSLFELENGRKRMLASAGELQKGNELALPSKYVNFLYLASHYEKLKGSPEDNEQKQLFVEQHKHYLDEIIEQISEFSKRVILADANLDKVLSAYNKHRDKPIREQAENIIHLFTLTNLGAPAAFKYFDTTIDRKRYTSTKEVLDATLIHQSITGLYETRIDLSQLGGDGGGSSGGGGGSGGTLNLEDEYRLYETSAEPEVSPGSTWLSDFPQAWAETGGMGLAVRQAPLIIPLKATSTPVSIKQYPMSQEAKLGIKPHIQRLLDQGILVPCQSPWNTPLLPVKKPGTNDYRPVQDLREVNKRVEDIHPTVPNPYNLLSGLPPSHRWYTVLDLKDAFFCLRLHPTSQPLFAFEWRDPGMGISGQLTWTRLPQGFKNSPTLFNEALHRDLADFRIQHPDLILLQYVDDILLAATSELDCQQGTRALLLTLGNLGYRASAKKAQLCQKQVKYLGYLLKEGQRWLTEARKETVMGQPTPKTPRQLREFLGKAGFCRLFIPGFAEMAAPLYPLTKPGTLFNWGPDQQKAYQEIKQALLTAPALGLPDLTKPFELFVDEKQGYAKGVLTQKLGPWRRPVAYLSKKLDPVAAGWPPCLRMVAAIAVLRKDAGKLTMGQPLVILAPHAVEALVKQPPDRWLSNARMTHYQAMLLDTDRVQFGPVVALNPATLLPLPEEGAPHDCLEILAETHGTRPDLTDQPIPDADHTWYTDGSSFLQEGQRKAGAAVTTETEVIWARALPAGTSAQRAELIALTQALKMAEGKRLNVYTDSRYAFATAHIHGEIYRRRGWLTSEGREIKNKSEILALLKALFLPKRLSIIHCLGHQKGDSAEARGNRLADQAAREAAIKTPPDTSTLLAGKRTADGSEFEKRTADGSEFESPKKKAKVE

SEQ ID NO: 1910 - protein, 2096 aa, synthetic construct
MPAAKRVKLDGGDKKYSIGLDIGTNSVGWAVITDEYKVPSKKFKVLGNTDRHSIKKNLIGALLFDSGETAEATRLKRTARRRYTRRKNRICYLQEIFSNEMAKVDDSFFHRLEESFLVEEDKKHERHPIFGNIVDEVAYHEKYPTIYHLRKKLVDSTDKADLRLIYLALAHMIKFRGHFLIEGDLNPDNSDVDKLFIQLVQTYNQLFEENPINASGVDAKAILSARLSKSRRLENLIAQLPGEKKNGLFGNLIALSLGLTPNFKSNFDLAEDAKLQLSKDTYDDDLDNLLAQIGDQYADLFLAAKNLSDAILLSDILRVNTEITKAPLSASMIKRYDEHHQDLTLLKALVRQQLPEKYKEIFFDQSKNGYAGYIDGGASQEEFYKFIKPILEKMDGTEELLVKLNREDLLRKQRTFDNGSIPHQIHLGELHAILRRQEDFYPFLKDNREKIEKILTFRIPYYVGPLARGNSRFAWMTRKSEETITPWNFEEVVDKGASAQSFIERMTNFDKNLPNEKVLPKHSLLYEYFTVYNELTKVKYVTEGMRKPAFLSGEQKKAIVDLLFKTNRKVTVKQLKEDYFKKIECFDSVEISGVEDRFNASLGTYHDLLKIIKDKDFLDNEENEDILEDIVLTLTLFEDREMIEERLKTYAHLFDDKVMKQLKRRRYTGWGRLSRKLINGIRDKQSGKTILDFLKSDGFANRNFMQLIHDDSLTFKEDIQKAQVSGQGDSLHEHIANLAGSPAIKKGILQTVKVVDELVKVMGRHKPENIVIEMARENQTTQKGQKNSRERMKRIEEGIKELGSQILKEHPVENTQLQNEKLYLYYLQNGRDMYVDQELDINRLSDYDVDHIVPQSFLKDDSIDNKVLTRSDKARGKSDNVPSEEVVKKMKNYWRQLLNAKLITQRKFDNLTKAERGGLSELDKAGFIKRQLVETRQITKHVAQILDSRMNTKYDENDKLIREVKVITLKSKLVSDFRKDFQFYKVREINNYHHAHDAYLNAVVGTALIKKYPKLESEFVYGDYKVYDVRKMIAKSEQEIGKATAKYFFYSNIMNFFKTEITLANGEIRKRPLIETNGETGEIVWDKGRDFATVRKVLSMPQVNIVKKTEVQTGGFSKESILPKRNSDKLIARKKDWDPKKYGGFDSPTVAYSVLVVAKVEKGKSKKLKSVKELLGITIMERSSFEKNPIDFLEAKGYKEVKKDLIIKLPKYSLFELENGRKRMLASAGELQKGNELALPSKYVNFLYLASHYEKLKGSPEDNEQKQLFVEQHKHYLDEIIEQISEFSKRVILADANLDKVLSAYNKHRDKPIREQAENIIHLFTLTNLGAPAAFKYFDTTIDRKRYTSTKEVLDATLIHQSITGLYETRIDLSQLGGDGGGSSEAAAKGGSGGTLNLEDEYRLYETSAEPEVSPGSTWLSDFPQAWAETGGMGLAVRQAPLIIPLKATSTPVSIKQYPMSQEAKLGIKPHIQRLLDQGILVPCQSPWNTPLLPVKKPGTNDYRPVQDLREVNKRVEDIHPTVPNPYNLLSGLPPSHRWYTVLDLKDAFFCLRLHPTSQPLFAFEWRDPGMGISGQLTWTRLPQGFKNSPTLFNEALHRDLADFRIQHPDLILLQYVDDILLAATSELDCQQGTRALLLTLGNLGYRASAKKAQLCQKQVKYLGYLLKEGQRWLTEARKETVMGQPTPKTPRQLREFLGKAGFCRLFIPGFAEMAAPLYPLTKPGTLFNWGPDQQKAYQEIKQALLTAPALGLPDLTKPFELFVDEKQGYAKGVLTQKLGPWRRPVAYLSKKLDPVAAGWPPCLRMVAAIAVLRKDAGKLTMGQPLVILAPHAVEALVKQPPDRWLSNARMTHYQAMLLDTDRVQFGPVVALNPATLLPLPEEGAPHDCLEILAETHGTRPDLTDQPIPDADHTWYTDGSSFLQEGQRKAGAAVTTETEVIWARALPAGTSAQRAELIALTQALKMAEGKRLNVYTDSRYAFATAHIHGEIYRRRGWLTSEGREIKNKSEILALLKALFLPKRLSIIHCLGHQKGDSAEARGNRLADQAAREAAIKTPPDTSTLLAGKRTADGSEFEKRTADGSEFESPKKKAKVE

SEQ ID NO: 1911 - protein, 2091 aa, synthetic construct
MPAAKRVKLDGGDKKYSIGLDIGTNSVGWAVITDEYKVPSKKFKVLGNTDRHSIKKNLIGALLFDSGETAEATRLKRTARRRYTRRKNRICYLQEIFSNEMAKVDDSFFHRLEESFLVEEDKKHERHPIFGNIVDEVAYHEKYPTIYHLRKKLVDSTDKADLRLIYLALAHMIKFRGHFLIEGDLNPDNSDVDKLFIQLVQTYNQLFEENPINASGVDAKAILSARLSKSRRLENLIAQLPGEKKNGLFGNLIALSLGLTPNFKSNFDLAEDAKLQLSKDTYDDDLDNLLAQIGDQYADLFLAAKNLSDAILLSDILRVNTEITKAPLSASMIKRYDEHHQDLTLLKALVRQQLPEKYKEIFFDQSKNGYAGYIDGGASQEEFYKFIKPILEKMDGTEELLVKLNREDLLRKQRTFDNGSIPHQIHLGELHAILRRQEDFYPFLKDNREKIEKILTFRIPYYVGPLARGNSRFAWMTRKSEETITPWNFEEVVDKGASAQSFIERMTNFDKNLPNEKVLPKHSLLYEYFTVYNELTKVKYVTEGMRKPAFLSGEQKKAIVDLLFKTNRKVTVKQLKEDYFKKIECFDSVEISGVEDRFNASLGTYHDLLKIIKDKDFLDNEENEDILEDIVLTLTLFEDREMIEERLKTYAHLFDDKVMKQLKRRRYTGWGRLSRKLINGIRDKQSGKTILDFLKSDGFANRNFMQLIHDDSLTFKEDIQKAQVSGQGDSLHEHIANLAGSPAIKKGILQTVKVVDELVKVMGRHKPENIVIEMARENQTTQKGQKNSRERMKRIEEGIKELGSQILKEHPVENTQLQNEKLYLYYLQNGRDMYVDQELDINRLSDYDVDHIVPQSFLKDDSIDNKVLTRSDKARGKSDNVPSEEVVKKMKNYWRQLLNAKLITQRKFDNLTKAERGGLSELDKAGFIKRQLVETRQITKHVAQILDSRMNTKYDENDKLIREVKVITLKSKLVSDFRKDFQFYKVREINNYHHAHDAYLNAVVGTALIKKYPKLESEFVYGDYKVYDVRKMIAKSEQEIGKATAKYFFYSNIMNFFKTEITLANGEIRKRPLIETNGETGEIVWDKGRDFATVRKVLSMPQVNIVKKTEVQTGGFSKESILPKRNSDKLIARKKDWDPKKYGGFDSPTVAYSVLVVAKVEKGKSKKLKSVKELLGITIMERSSFEKNPIDFLEAKGYKEVKKDLIIKLPKYSLFELENGRKRMLASAGELQKGNELALPSKYVNFLYLASHYEKLKGSPEDNEQKQLFVEQHKHYLDEIIEQISEFSKRVILADANLDKVLSAYNKHRDKPIREQAENIIHLFTLTNLGAPAAFKYFDTTIDRKRYTSTKEVLDATLIHQSITGLYETRIDLSQLGGDGGGGSGSSGGTLNLEDEYRLYETSAEPEVSPGSTWLSDFPQAWAETGGMGLAVRQAPLIIPLKATSTPVSIKQYPMSQEAKLGIKPHIQRLLDQGILVPCQSPWNTPLLPVKKPGTNDYRPVQDLREVNKRVEDIHPTVPNPYNLLSGLPPSHRWYTVLDLKDAFFCLRLHPTSQPLFAFEWRDPGMGISGQLTWTRLPQGFKNSPTLFNEALHRDLADFRIQHPDLILLQYVDDILLAATSELDCQQGTRALLLTLGNLGYRASAKKAQLCQKQVKYLGYLLKEGQRWLTEARKETVMGQPTPKTPRQLREFLGKAGFCRLFIPGFAEMAAPLYPLTKPGTLFNWGPDQQKAYQEIKQALLTAPALGLPDLTKPFELFVDEKQGYAKGVLTQKLGPWRRPVAYLSKKLDPVAAGWPPCLRMVAAIAVLRKDAGKLTMGQPLVILAPHAVEALVKQPPDRWLSNARMTHYQAMLLDTDRVQFGPVVALNPATLLPLPEEGAPHDCLEILAETHGTRPDLTDQPIPDADHTWYTDGSSFLQEGQRKAGAAVTTETEVIWARALPAGTSAQRAELIALTQALKMAEGKRLNVYTDSRYAFATAHIHGEIYRRRGWLTSEGREIKNKSEILALLKALFLPKRLSIIHCLGHQKGDSAEARGNRLADQAAREAAIKTPPDTSTLLAGKRTADGSEFEKRTADGSEFESPKKKAKVE

SEQ ID NO: 1912 - protein, 2096 aa, synthetic construct
MPAAKRVKLDGGDKKYSIGLDIGTNSVGWAVITDEYKVPSKKFKVLGNTDRHSIKKNLIGALLFDSGETAEATRLKRTARRRYTRRKNRICYLQEIFSNEMAKVDDSFFHRLEESFLVEEDKKHERHPIFGNIVDEVAYHEKYPTIYHLRKKLVDSTDKADLRLIYLALAHMIKFRGHFLIEGDLNPDNSDVDKLFIQLVQTYNQLFEENPINASGVDAKAILSARLSKSRRLENLIAQLPGEKKNGLFGNLIALSLGLTPNFKSNFDLAEDAKLQLSKDTYDDDLDNLLAQIGDQYADLFLAAKNLSDAILLSDILRVNTEITKAPLSASMIKRYDEHHQDLTLLKALVRQQLPEKYKEIFFDQSKNGYAGYIDGGASQEEFYKFIKPILEKMDGTEELLVKLNREDLLRKQRTFDNGSIPHQIHLGELHAILRRQEDFYPFLKDNREKIEKILTFRIPYYVGPLARGNSRFAWMTRKSEETITPWNFEEVVDKGASAQSFIERMTNFDKNLPNEKVLPKHSLLYEYFTVYNELTKVKYVTEGMRKPAFLSGEQKKAIVDLLFKTNRKVTVKQLKEDYFKKIECFDSVEISGVEDRFNASLGTYHDLLKIIKDKDFLDNEENEDILEDIVLTLTLFEDREMIEERLKTYAHLFDDKVMKQLKRRRYTGWGRLSRKLINGIRDKQSGKTILDFLKSDGFANRNFMQLIHDDSLTFKEDIQKAQVSGQGDSLHEHIANLAGSPAIKKGILQTVKVVDELVKVMGRHKPENIVIEMARENQTTQKGQKNSRERMKRIEEGIKELGSQILKEHPVENTQLQNEKLYLYYLQNGRDMYVDQELDINRLSDYDVDHIVPQSFLKDDSIDNKVLTRSDKARGKSDNVPSEEVVKKMKNYWRQLLNAKLITQRKFDNLTKAERGGLSELDKAGFIKRQLVETRQITKHVAQILDSRMNTKYDENDKLIREVKVITLKSKLVSDFRKDFQFYKVREINNYHHAHDAYLNAVVGTALIKKYPKLESEFVYGDYKVYDVRKMIAKSEQEIGKATAKYFFYSNIMNFFKTEITLANGEIRKRPLIETNGETGEIVWDKGRDFATVRKVLSMPQVNIVKKTEVQTGGFSKESILPKRNSDKLIARKKDWDPKKYGGFDSPTVAYSVLVVAKVEKGKSKKLKSVKELLGITIMERSSFEKNPIDFLEAKGYKEVKKDLIIKLPKYSLFELENGRKRMLASAGELQKGNELALPSKYVNFLYLASHYEKLKGSPEDNEQKQLFVEQHKHYLDEIIEQISEFSKRVILADANLDKVLSAYNKHRDKPIREQAENIIHLFTLTNLGAPAAFKYFDTTIDRKRYTSTKEVLDATLIHQSITGLYETRIDLSQLGGDGGPAPGSSEAAAKGGTLNLEDEYRLYETSAEPEVSPGSTWLSDFPQAWAETGGMGLAVRQAPLIIPLKATSTPVSIKQYPMSQEAKLGIKPHIQRLLDQGILVPCQSPWNTPLLPVKKPGTNDYRPVQDLREVNKRVEDIHPTVPNPYNLLSGLPPSHRWYTVLDLKDAFFCLRLHPTSQPLFAFEWRDPGMGISGQLTWTRLPQGFKNSPTLFNEALHRDLADFRIQHPDLILLQYVDDILLAATSELDCQQGTRALLLTLGNLGYRASAKKAQLCQKQVKYLGYLLKEGQRWLTEARKETVMGQPTPKTPRQLREFLGKAGFCRLFIPGFAEMAAPLYPLTKPGTLFNWGPDQQKAYQEIKQALLTAPALGLPDLTKPFELFVDEKQGYAKGVLTQKLGPWRRPVAYLSKKLDPVAAGWPPCLRMVAAIAVLRKDAGKLTMGQPLVILAPHAVEALVKQPPDRWLSNARMTHYQAMLLDTDRVQFGPVVALNPATLLPLPEEGAPHDCLEILAETHGTRPDLTDQPIPDADHTWYTDGSSFLQEGQRKAGAAVTTETEVIWARALPAGTSAQRAELIALTQALKMAEGKRLNVYTDSRYAFATAHIHGEIYRRRGWLTSEGREIKNKSEILALLKALFLPKRLSIIHCLGHQKGDSAEARGNRLADQAAREAAIKTPPDTSTLLAGKRTADGSEFEKRTADGSEFESPKKKAKVE

SEQ ID NO: 1913 - protein, 2096 aa, synthetic construct
MPAAKRVKLDGGDKKYSIGLDIGTNSVGWAVITDEYKVPSKKFKVLGNTDRHSIKKNLIGALLFDSGETAEATRLKRTARRRYTRRKNRICYLQEIFSNEMAKVDDSFFHRLEESFLVEEDKKHERHPIFGNIVDEVAYHEKYPTIYHLRKKLVDSTDKADLRLIYLALAHMIKFRGHFLIEGDLNPDNSDVDKLFIQLVQTYNQLFEENPINASGVDAKAILSARLSKSRRLENLIAQLPGEKKNGLFGNLIALSLGLTPNFKSNFDLAEDAKLQLSKDTYDDDLDNLLAQIGDQYADLFLAAKNLSDAILLSDILRVNTEITKAPLSASMIKRYDEHHQDLTLLKALVRQQLPEKYKEIFFDQSKNGYAGYIDGGASQEEFYKFIKPILEKMDGTEELLVKLNREDLLRKQRTFDNGSIPHQIHLGELHAILRRQEDFYPFLKDNREKIEKILTFRIPYYVGPLARGNSRFAWMTRKSEETITPWNFEEVVDKGASAQSFIERMTNFDKNLPNEKVLPKHSLLYEYFTVYNELTKVKYVTEGMRKPAFLSGEQKKAIVDLLFKTNRKVTVKQLKEDYFKKIECFDSVEISGVEDRFNASLGTYHDLLKIIKDKDFLDNEENEDILEDIVLTLTLFEDREMIEERLKTYAHLFDDKVMKQLKRRRYTGWGRLSRKLINGIRDKQSGKTILDFLKSDGFANRNFMQLIHDDSLTFKEDIQKAQVSGQGDSLHEHIANLAGSPAIKKGILQTVKVVDELVKVMGRHKPENIVIEMARENQTTQKGQKNSRERMKRIEEGIKELGSQILKEHPVENTQLQNEKLYLYYLQNGRDMYVDQELDINRLSDYDVDHIVPQSFLKDDSIDNKVLTRSDKARGKSDNVPSEEVVKKMKNYWRQLLNAKLITQRKFDNLTKAERGGLSELDKAGFIKRQLVETRQITKHVAQILDSRMNTKYDENDKLIREVKVITLKSKLVSDFRKDFQFYKVREINNYHHAHDAYLNAVVGTALIKKYPKLESEFVYGDYKVYDVRKMIAKSEQEIGKATAKYFFYSNIMNFFKTEITLANGEIRKRPLIETNGETGEIVWDKGRDFATVRKVLSMPQVNIVKKTEVQTGGFSKESILPKRNSDKLIARKKDWDPKKYGGFDSPTVAYSVLVVAKVEKGKSKKLKSVKELLGITIMERSSFEKNPIDFLEAKGYKEVKKDLIIKLPKYSLFELENGRKRMLASAGELQKGNELALPSKYVNFLYLASHYEKLKGSPEDNEQKQLFVEQHKHYLDEIIEQISEFSKRVILADANLDKVLSAYNKHRDKPIREQAENIIHLFTLTNLGAPAAFKYFDTTIDRKRYTSTKEVLDATLIHQSITGLYETRIDLSQLGGDGGEAAAKGSSGGSGGTLNLEDEYRLYETSAEPEVSPGSTWLSDFPQAWAETGGMGLAVRQAPLIIPLKATSTPVSIKQYPMSQEAKLGIKPHIQRLLDQGILVPCQSPWNTPLLPVKKPGTNDYRPVQDLREVNKRVEDIHPTVPNPYNLLSGLPPSHRWYTVLDLKDAFFCLRLHPTSQPLFAFEWRDPGMGISGQLTWTRLPQGFKNSPTLFNEALHRDLADFRIQHPDLILLQYVDDILLAATSELDCQQGTRALLLTLGNLGYRASAKKAQLCQKQVKYLGYLLKEGQRWLTEARKETVMGQPTPKTPRQLREFLGKAGFCRLFIPGFAEMAAPLYPLTKPGTLFNWGPDQQKAYQEIKQALLTAPALGLPDLTKPFELFVDEKQGYAKGVLTQKLGPWRRPVAYLSKKLDPVAAGWPPCLRMVAAIAVLRKDAGKLTMGQPLVILAPHAVEALVKQPPDRWLSNARMTHYQAMLLDTDRVQFGPVVALNPATLLPLPEEGAPHDCLEILAETHGTRPDLTDQPIPDADHTWYTDGSSFLQEGQRKAGAAVTTETEVIWARALPAGTSAQRAELIALTQALKMAEGKRLNVYTDSRYAFATAHIHGEIYRRRGWLTSEGREIKNKSEILALLKALFLPKRLSIIHCLGHQKGDSAEARGNRLADQAAREAAIKTPPDTSTLLAGKRTADGSEFEKRTADGSEFESPKKKAKVE

SEQ ID NO: 1914 - protein, 2091 aa, synthetic construct
MPAAKRVKLDGGDKKYSIGLDIGTNSVGWAVITDEYKVPSKKFKVLGNTDRHSIKKNLIGALLFDSGETAEATRLKRTARRRYTRRKNRICYLQEIFSNEMAKVDDSFFHRLEESFLVEEDKKHERHPIFGNIVDEVAYHEKYPTIYHLRKKLVDSTDKADLRLIYLALAHMIKFRGHFLIEGDLNPDNSDVDKLFIQLVQTYNQLFEENPINASGVDAKAILSARLSKSRRLENLIAQLPGEKKNGLFGNLIALSLGLTPNFKSNFDLAEDAKLQLSKDTYDDDLDNLLAQIGDQYADLFLAAKNLSDAILLSDILRVNTEITKAPLSASMIKRYDEHHQDLTLLKALVRQQLPEKYKEIFFDQSKNGYAGYIDGGASQEEFYKFIKPILEKMDGTEELLVKLNREDLLRKQRTFDNGSIPHQIHLGELHAILRRQEDFYPFLKDNREKIEKILTFRIPYYVGPLARGNSRFAWMTRKSEETITPWNFEEVVDKGASAQSFIERMTNFDKNLPNEKVLPKHSLLYEYFTVYNELTKVKYVTEGMRKPAFLSGEQKKAIVDLLFKTNRKVTVKQLKEDYFKKIECFDSVEISGVEDRFNASLGTYHDLLKIIKDKDFLDNEENEDILEDIVLTLTLFEDREMIEERLKTYAHLFDDKVMKQLKRRRYTGWGRLSRKLINGIRDKQSGKTILDFLKSDGFANRNFMQLIHDDSLTFKEDIQKAQVSGQGDSLHEHIANLAGSPAIKKGILQTVKVVDELVKVMGRHKPENIVIEMARENQTTQKGQKNSRERMKRIEEGIKELGSQILKEHPVENTQLQNEKLYLYYLQNGRDMYVDQELDINRLSDYDVDHIVPQSFLKDDSIDNKVLTRSDKARGKSDNVPSEEVVKKMKNYWRQLLNAKLITQRKFDNLTKAERGGLSELDKAGFIKRQLVETRQITKHVAQILDSRMNTKYDENDKLIREVKVITLKSKLVSDFRKDFQFYKVREINNYHHAHDAYLNAVVGTALIKKYPKLESEFVYGDYKVYDVRKMIAKSEQEIGKATAKYFFYSNIMNFFKTEITLANGEIRKRPLIETNGETGEIVWDKGRDFATVRKVLSMPQVNIVKKTEVQTGGFSKESILPKRNSDKLIARKKDWDPKKYGGFDSPTVAYSVLVVAKVEKGKSKKLKSVKELLGITIMERSSFEKNPIDFLEAKGYKEVKKDLIIKLPKYSLFELENGRKRMLASAGELQKGNELALPSKYVNFLYLASHYEKLKGSPEDNEQKQLFVEQHKHYLDEIIEQISEFSKRVILADANLDKVLSAYNKHRDKPIREQAENIIHLFTLTNLGAPAAFKYFDTTIDRKRYTSTKEVLDATLIHQSITGLYETRIDLSQLGGDGGGGSPAPGGTLNLEDEYRLYETSAEPEVSPGSTWLSDFPQAWAETGGMGLAVRQAPLIIPLKATSTPVSIKQYPMSQEAKLGIKPHIQRLLDQGILVPCQSPWNTPLLPVKKPGTNDYRPVQDLREVNKRVEDIHPTVPNPYNLLSGLPPSHRWYTVLDLKDAFFCLRLHPTSQPLFAFEWRDPGMGISGQLTWTRLPQGFKNSPTLFNEALHRDLADFRIQHPDLILLQYVDDILLAATSELDCQQGTRALLLTLGNLGYRASAKKAQLCQKQVKYLGYLLKEGQRWLTEARKETVMGQPTPKTPRQLREFLGKAGFCRLFIPGFAEMAAPLYPLTKPGTLFNWGPDQQKAYQEIKQALLTAPALGLPDLTKPFELFVDEKQGYAKGVLTQKLGPWRRPVAYLSKKLDPVAAGWPPCLRMVAAIAVLRKDAGKLTMGQPLVILAPHAVEALVKQPPDRWLSNARMTHYQAMLLDTDRVQFGPVVALNPATLLPLPEEGAPHDCLEILAETHGTRPDLTDQPIPDADHTWYTDGSSFLQEGQRKAGAAVTTETEVIWARALPAGTSAQRAELIALTQALKMAEGKRLNVYTDSRYAFATAHIHGEIYRRRGWLTSEGREIKNKSEILALLKALFLPKRLSIIHCLGHQKGDSAEARGNRLADQAAREAAIKTPPDTSTLLAGKRTADGSEFEKRTADGSEFESPKKKAKVE

SEQ ID NO: 1915 - protein, 2096 aa, synthetic construct
MPAAKRVKLDGGDKKYSIGLDIGTNSVGWAVITDEYKVPSKKFKVLGNTDRHSIKKNLIGALLFDSGETAEATRLKRTARRRYTRRKNRICYLQEIFSNEMAKVDDSFFHRLEESFLVEEDKKHERHPIFGNIVDEVAYHEKYPTIYHLRKKLVDSTDKADLRLIYLALAHMIKFRGHFLIEGDLNPDNSDVDKLFIQLVQTYNQLFEENPINASGVDAKAILSARLSKSRRLENLIAQLPGEKKNGLFGNLIALSLGLTPNFKSNFDLAEDAKLQLSKDTYDDDLDNLLAQIGDQYADLFLAAKNLSDAILLSDILRVNTEITKAPLSASMIKRYDEHHQDLTLLKALVRQQLPEKYKEIFFDQSKNGYAGYIDGGASQEEFYKFIKPILEKMDGTEELLVKLNREDLLRKQRTFDNGSIPHQIHLGELHAILRRQEDFYPFLKDNREKIEKILTFRIPYYVGPLARGNSRFAWMTRKSEETITPWNFEEVVDKGASAQSFIERMTNFDKNLPNEKVLPKHSLLYEYFTVYNELTKVKYVTEGMRKPAFLSGEQKKAIVDLLFKTNRKVTVKQLKEDYFKKIECFDSVEISGVEDRFNASLGTYHDLLKIIKDKDFLDNEENEDILEDIVLTLTLFEDREMIEERLKTYAHLFDDKVMKQLKRRRYTGWGRLSRKLINGIRDKQSGKTILDFLKSDGFANRNFMQLIHDDSLTFKEDIQKAQVSGQGDSLHEHIANLAGSPAIKKGILQTVKVVDELVKVMGRHKPENIVIEMARENQTTQKGQKNSRERMKRIEEGIKELGSQILKEHPVENTQLQNEKLYLYYLQNGRDMYVDQELDINRLSDYDVDHIVPQSFLKDDSIDNKVLTRSDKARGKSDNVPSEEVVKKMKNYWRQLLNAKLITQRKFDNLTKAERGGLSELDKAGFIKRQLVETRQITKHVAQILDSRMNTKYDENDKLIREVKVITLKSKLVSDFRKDFQFYKVREINNYHHAHDAYLNAVVGTALIKKYPKLESEFVYGDYKVYDVRKMIAKSEQEIGKATAKYFFYSNIMNFFKTEITLANGEIRKRPLIETNGETGEIVWDKGRDFATVRKVLSMPQVNIVKKTEVQTGGFSKESILPKRNSDKLIARKKDWDPKKYGGFDSPTVAYSVLVVAKVEKGKSKKLKSVKELLGITIMERSSFEKNPIDFLEAKGYKEVKKDLIIKLPKYSLFELENGRKRMLASAGELQKGNELALPSKYVNFLYLASHYEKLKGSPEDNEQKQLFVEQHKHYLDEIIEQISEFSKRVILADANLDKVLSAYNKHRDKPIREQAENIIHLFTLTNLGAPAAFKYFDTTIDRKRYTSTKEVLDATLIHQSITGLYETRIDLSQLGGDGGGGSEAAAKGGGGGTLNLEDEYRLYETSAEPEVSPGSTWLSDFPQAWAETGGMGLAVRQAPLIIPLKATSTPVSIKQYPMSQEAKLGIKPHIQRLLDQGILVPCQSPWNTPLLPVKKPGTNDYRPVQDLREVNKRVEDIHPTVPNPYNLLSGLPPSHRWYTVLDLKDAFFCLRLHPTSQPLFAFEWRDPGMGISGQLTWTRLPQGFKNSPTLFNEALHRDLADFRIQHPDLILLQYVDDILLAATSELDCQQGTRALLLTLGNLGYRASAKKAQLCQKQVKYLGYLLKEGQRWLTEARKETVMGQPTPKTPRQLREFLGKAGFCRLFIPGFAEMAAPLYPLTKPGTLFNWGPDQQKAYQEIKQALLTAPALGLPDLTKPFELFVDEKQGYAKGVLTQKLGPWRRPVAYLSKKLDPVAAGWPPCLRMVAAIAVLRKDAGKLTMGQPLVILAPHAVEALVKQPPDRWLSNARMTHYQAMLLDTDRVQFGPVVALNPATLLPLPEEGAPHDCLEILAETHGTRPDLTDQPIPDADHTWYTDGSSFLQEGQRKAGAAVTTETEVIWARALPAGTSAQRAELIALTQALKMAEGKRLNVYTDSRYAFATAHIHGEIYRRRGWLTSEGREIKNKSEILALLKALFLPKRLSIIHCLGHQKGDSAEARGNRLADQAAREAAIKTPPDTSTLLAGKRTADGSEFEKRTADGSEFESPKKKAKVE

SEQ ID NO: 1916 - protein, 2097 aa, synthetic construct
MPAAKRVKLDGGDKKYSIGLDIGTNSVGWAVITDEYKVPSKKFKVLGNTDRHSIKKNLIGALLFDSGETAEATRLKRTARRRYTRRKNRICYLQEIFSNEMAKVDDSFFHRLEESFLVEEDKKHERHPIFGNIVDEVAYHEKYPTIYHLRKKLVDSTDKADLRLIYLALAHMIKFRGHFLIEGDLNPDNSDVDKLFIQLVQTYNQLFEENPINASGVDAKAILSARLSKSRRLENLIAQLPGEKKNGLFGNLIALSLGLTPNFKSNFDLAEDAKLQLSKDTYDDDLDNLLAQIGDQYADLFLAAKNLSDAILLSDILRVNTEITKAPLSASMIKRYDEHHQDLTLLKALVRQQLPEKYKEIFFDQSKNGYAGYIDGGASQEEFYKFIKPILEKMDGTEELLVKLNREDLLRKQRTFDNGSIPHQIHLGELHAILRRQEDFYPFLKDNREKIEKILTFRIPYYVGPLARGNSRFAWMTRKSEETITPWNFEEVVDKGASAQSFIERMTNFDKNLPNEKVLPKHSLLYEYFTVYNELTKVKYVTEGMRKPAFLSGEQKKAIVDLLFKTNRKVTVKQLKEDYFKKIECFDSVEISGVEDRFNASLGTYHDLLKIIKDKDFLDNEENEDILEDIVLTLTLFEDREMIEERLKTYAHLFDDKVMKQLKRRRYTGWGRLSRKLINGIRDKQSGKTILDFLKSDGFANRNFMQLIHDDSLTFKEDIQKAQVSGQGDSLHEHIANLAGSPAIKKGILQTVKVVDELVKVMGRHKPENIVIEMARENQTTQKGQKNSRERMKRIEEGIKELGSQILKEHPVENTQLQNEKLYLYYLQNGRDMYVDQELDINRLSDYDVDHIVPQSFLKDDSIDNKVLTRSDKARGKSDNVPSEEVVKKMKNYWRQLLNAKLITQRKFDNLTKAERGGLSELDKAGFIKRQLVETRQITKHVAQILDSRMNTKYDENDKLIREVKVITLKSKLVSDFRKDFQFYKVREINNYHHAHDAYLNAVVGTALIKKYPKLESEFVYGDYKVYDVRKMIAKSEQEIGKATAKYFFYSNIMNFFKTEITLANGEIRKRPLIETNGETGEIVWDKGRDFATVRKVLSMPQVNIVKKTEVQTGGFSKESILPKRNSDKLIARKKDWDPKKYGGFDSPTVAYSVLVVAKVEKGKSKKLKSVKELLGITIMERSSFEKNPIDFLEAKGYKEVKKDLIIKLPKYSLFELENGRKRMLASAGELQKGNELALPSKYVNFLYLASHYEKLKGSPEDNEQKQLFVEQHKHYLDEIIEQISEFSKRVILADANLDKVLSAYNKHRDKPIREQAENIIHLFTLTNLGAPAAFKYFDTTIDRKRYTSTKEVLDATLIHQSITGLYETRIDLSQLGGDGGGGSGGSGGSGGSGGTLNLEDEYRLYETSAEPEVSPGSTWLSDFPQAWAETGGMGLAVRQAPLIIPLKATSTPVSIKQYPMSQEAKLGIKPHIQRLLDQGILVPCQSPWNTPLLPVKKPGTNDYRPVQDLREVNKRVEDIHPTVPNPYNLLSGLPPSHRWYTVLDLKDAFFCLRLHPTSQPLFAFEWRDPGMGISGQLTWTRLPQGFKNSPTLFNEALHRDLADFRIQHPDLILLQYVDDILLAATSELDCQQGTRALLLTLGNLGYRASAKKAQLCQKQVKYLGYLLKEGQRWLTEARKETVMGQPTPKTPRQLREFLGKAGFCRLFIPGFAEMAAPLYPLTKPGTLFNWGPDQQKAYQEIKQALLTAPALGLPDLTKPFELFVDEKQGYAKGVLTQKLGPWRRPVAYLSKKLDPVAAGWPPCLRMVAAIAVLRKDAGKLTMGQPLVILAPHAVEALVKQPPDRWLSNARMTHYQAMLLDTDRVQFGPVVALNPATLLPLPEEGAPHDCLEILAETHGTRPDLTDQPIPDADHTWYTDGSSFLQEGQRKAGAAVTTETEVIWARALPAGTSAQRAELIALTQALKMAEGKRLNVYTDSRYAFATAHIHGEIYRRRGWLTSEGREIKNKSEILALLKALFLPKRLSIIHCLGHQKGDSAEARGNRLADQAAREAAIKTPPDTSTLLAGKRTADGSEFEKRTADGSEFESPKKKAKVE

SEQ ID NO: 1917 - protein, 2090 aa, synthetic construct
MPAAKRVKLDGGDKKYSIGLDIGTNSVGWAVITDEYKVPSKKFKVLGNTDRHSIKKNLIGALLFDSGETAEATRLKRTARRRYTRRKNRICYLQEIFSNEMAKVDDSFFHRLEESFLVEEDKKHERHPIFGNIVDEVAYHEKYPTIYHLRKKLVDSTDKADLRLIYLALAHMIKFRGHFLIEGDLNPDNSDVDKLFIQLVQTYNQLFEENPINASGVDAKAILSARLSKSRRLENLIAQLPGEKKNGLFGNLIALSLGLTPNFKSNFDLAEDAKLQLSKDTYDDDLDNLLAQIGDQYADLFLAAKNLSDAILLSDILRVNTEITKAPLSASMIKRYDEHHQDLTLLKALVRQQLPEKYKEIFFDQSKNGYAGYIDGGASQEEFYKFIKPILEKMDGTEELLVKLNREDLLRKQRTFDNGSIPHQIHLGELHAILRRQEDFYPFLKDNREKIEKILTFRIPYYVGPLARGNSRFAWMTRKSEETITPWNFEEVVDKGASAQSFIERMTNFDKNLPNEKVLPKHSLLYEYFTVYNELTKVKYVTEGMRKPAFLSGEQKKAIVDLLFKTNRKVTVKQLKEDYFKKIECFDSVEISGVEDRFNASLGTYHDLLKIIKDKDFLDNEENEDILEDIVLTLTLFEDREMIEERLKTYAHLFDDKVMKQLKRRRYTGWGRLSRKLINGIRDKQSGKTILDFLKSDGFANRNFMQLIHDDSLTFKEDIQKAQVSGQGDSLHEHIANLAGSPAIKKGILQTVKVVDELVKVMGRHKPENIVIEMARENQTTQKGQKNSRERMKRIEEGIKELGSQILKEHPVENTQLQNEKLYLYYLQNGRDMYVDQELDINRLSDYDVDHIVPQSFLKDDSIDNKVLTRSDKARGKSDNVPSEEVVKKMKNYWRQLLNAKLITQRKFDNLTKAERGGLSELDKAGFIKRQLVETRQITKHVAQILDSRMNTKYDENDKLIREVKVITLKSKLVSDFRKDFQFYKVREINNYHHAHDAYLNAVVGTALIKKYPKLESEFVYGDYKVYDVRKMIAKSEQEIGKATAKYFFYSNIMNFFKTEITLANGEIRKRPLIETNGETGEIVWDKGRDFATVRKVLSMPQVNIVKKTEVQTGGFSKESILPKRNSDKLIARKKDWDPKKYGGFDSPTVAYSVLVVAKVEKGKSKKLKSVKELLGITIMERSSFEKNPIDFLEAKGYKEVKKDLIIKLPKYSLFELENGRKRMLASAGELQKGNELALPSKYVNFLYLASHYEKLKGSPEDNEQKQLFVEQHKHYLDEIIEQISEFSKRVILADANLDKVLSAYNKHRDKPIREQAENIIHLFTLTNLGAPAAFKYFDTTIDRKRYTSTKEVLDATLIHQSITGLYETRIDLSQLGGDGGGGGGGGGTLNLEDEYRLYETSAEPEVSPGSTWLSDFPQAWAETGGMGLAVRQAPLIIPLKATSTPVSIKQYPMSQEAKLGIKPHIQRLLDQGILVPCQSPWNTPLLPVKKPGTNDYRPVQDLREVNKRVEDIHPTVPNPYNLLSGLPPSHRWYTVLDLKDAFFCLRLHPTSQPLFAFEWRDPGMGISGQLTWTRLPQGFKNSPTLFNEALHRDLADFRIQHPDLILLQYVDDILLAATSELDCQQGTRALLLTLGNLGYRASAKKAQLCQKQVKYLGYLLKEGQRWLTEARKETVMGQPTPKTPRQLREFLGKAGFCRLFIPGFAEMAAPLYPLTKPGTLFNWGPDQQKAYQEIKQALLTAPALGLPDLTKPFELFVDEKQGYAKGVLTQKLGPWRRPVAYLSKKLDPVAAGWPPCLRMVAAIAVLRKDAGKLTMGQPLVILAPHAVEALVKQPPDRWLSNARMTHYQAMLLDTDRVQFGPVVALNPATLLPLPEEGAPHDCLEILAETHGTRPDLTDQPIPDADHTWYTDGSSFLQEGQRKAGAAVTTETEVIWARALPAGTSAQRAELIALTQALKMAEGKRLNVYTDSRYAFATAHIHGEIYRRRGWLTSEGREIKNKSEILALLKALFLPKRLSIIHCLGHQKGDSAEARGNRLADQAAREAAIKTPPDTSTLLAGKRTADGSEFEKRTADGSEFESPKKKAKVE

SEQ ID NO: 1918 - protein, 2131 aa, synthetic construct
MPAAKRVKLDGGDKKYSIGLDIGTNSVGWAVITDEYKVPSKKFKVLGNTDRHSIKKNLIGALLFDSGETAEATRLKRTARRRYTRRKNRICYLQEIFSNEMAKVDDSFFHRLEESFLVEEDKKHERHPIFGNIVDEVAYHEKYPTIYHLRKKLVDSTDKADLRLIYLALAHMIKFRGHFLIEGDLNPDNSDVDKLFIQLVQTYNQLFEENPINASGVDAKAILSARLSKSRRLENLIAQLPGEKKNGLFGNLIALSLGLTPNFKSNFDLAEDAKLQLSKDTYDDDLDNLLAQIGDQYADLFLAAKNLSDAILLSDILRVNTEITKAPLSASMIKRYDEHHQDLTLLKALVRQQLPEKYKEIFFDQSKNGYAGYIDGGASQEEFYKFIKPILEKMDGTEELLVKLNREDLLRKQRTFDNGSIPHQIHLGELHAILRRQEDFYPFLKDNREKIEKILTFRIPYYVGPLARGNSRFAWMTRKSEETITPWNFEEVVDKGASAQSFIERMTNFDKNLPNEKVLPKHSLLYEYFTVYNELTKVKYVTEGMRKPAFLSGEQKKAIVDLLFKTNRKVTVKQLKEDYFKKIECFDSVEISGVEDRFNASLGTYHDLLKIIKDKDFLDNEENEDILEDIVLTLTLFEDREMIEERLKTYAHLFDDKVMKQLKRRRYTGWGRLSRKLINGIRDKQSGKTILDFLKSDGFANRNFMQLIHDDSLTFKEDIQKAQVSGQGDSLHEHIANLAGSPAIKKGILQTVKVVDELVKVMGRHKPENIVIEMARENQTTQKGQKNSRERMKRIEEGIKELGSQILKEHPVENTQLQNEKLYLYYLQNGRDMYVDQELDINRLSDYDVDHIVPQSFLKDDSIDNKVLTRSDKARGKSDNVPSEEVVKKMKNYWRQLLNAKLITQRKFDNLTKAERGGLSELDKAGFIKRQLVETRQITKHVAQILDSRMNTKYDENDKLIREVKVITLKSKLVSDFRKDFQFYKVREINNYHHAHDAYLNAVVGTALIKKYPKLESEFVYGDYKVYDVRKMIAKSEQEIGKATAKYFFYSNIMNFFKTEITLANGEIRKRPLIETNGETGEIVWDKGRDFATVRKVLSMPQVNIVKKTEVQTGGFSKESILPKRNSDKLIARKKDWDPKKYGGFDSPTVAYSVLVVAKVEKGKSKKLKSVKELLGITIMERSSFEKNPIDFLEAKGYKEVKKDLIIKLPKYSLFELENGRKRMLASAGELQKGNELALPSKYVNFLYLASHYEKLKGSPEDNEQKQLFVEQHKHYLDEIIEQISEFSKRVILADANLDKVLSAYNKHRDKPIREQAENIIHLFTLTNLGAPAAFKYFDTTIDRKRYTSTKEVLDATLIHQSITGLYETRIDLSQLGGDGGAEAAAKEAAAKEAAAKEAAAKALEAEAAAKEAAAKEAAAKEAAAKAGGTLNLEDEYRLYETSAEPEVSPGSTWLSDFPQAWAETGGMGLAVRQAPLIIPLKATSTPVSIKQYPMSQEAKLGIKPHIQRLLDQGILVPCQSPWNTPLLPVKKPGTNDYRPVQDLREVNKRVEDIHPTVPNPYNLLSGLPPSHRWYTVLDLKDAFFCLRLHPTSQPLFAFEWRDPGMGISGQLTWTRLPQGFKNSPTLFNEALHRDLADFRIQHPDLILLQYVDDILLAATSELDCQQGTRALLLTLGNLGYRASAKKAQLCQKQVKYLGYLLKEGQRWLTEARKETVMGQPTPKTPRQLREFLGKAGFCRLFIPGFAEMAAPLYPLTKPGTLFNWGPDQQKAYQEIKQALLTAPALGLPDLTKPFELFVDEKQGYAKGVLTQKLGPWRRPVAYLSKKLDPVAAGWPPCLRMVAAIAVLRKDAGKLTMGQPLVILAPHAVEALVKQPPDRWLSNARMTHYQAMLLDTDRVQFGPVVALNPATLLPLPEEGAPHDCLEILAETHGTRPDLTDQPIPDADHTWYTDGSSFLQEGQRKAGAAVTTETEVIWARALPAGTSAQRAELIALTQALKMAEGKRLNVYTDSRYAFATAHIHGEIYRRRGWLTSEGREIKNKSEILALLKALFLPKRLSIIHCLGHQKGDSAEARGNRLADQAAREAAIKTPPDTSTLLAGKRTADGSEFEKRTADGSEFESPKKKAKVE

SEQ ID NO: 1919 - protein, 2096 aa, synthetic construct
MPAAKRVKLDGGDKKYSIGLDIGTNSVGWAVITDEYKVPSKKFKVLGNTDRHSIKKNLIGALLFDSGETAEATRLKRTARRRYTRRKNRICYLQEIFSNEMAKVDDSFFHRLEESFLVEEDKKHERHPIFGNIVDEVAYHEKYPTIYHLRKKLVDSTDKADLRLIYLALAHMIKFRGHFLIEGDLNPDNSDVDKLFIQLVQTYNQLFEENPINASGVDAKAILSARLSKSRRLENLIAQLPGEKKNGLFGNLIALSLGLTPNFKSNFDLAEDAKLQLSKDTYDDDLDNLLAQIGDQYADLFLAAKNLSDAILLSDILRVNTEITKAPLSASMIKRYDEHHQDLTLLKALVRQQLPEKYKEIFFDQSKNGYAGYIDGGASQEEFYKFIKPILEKMDGTEELLVKLNREDLLRKQRTFDNGSIPHQIHLGELHAILRRQEDFYPFLKDNREKIEKILTFRIPYYVGPLARGNSRFAWMTRKSEETITPWNFEEVVDKGASAQSFIERMTNFDKNLPNEKVLPKHSLLYEYFTVYNELTKVKYVTEGMRKPAFLSGEQKKAIVDLLFKTNRKVTVKQLKEDYFKKIECFDSVEISGVEDRFNASLGTYHDLLKIIKDKDFLDNEENEDILEDIVLTLTLFEDREMIEERLKTYAHLFDDKVMKQLKRRRYTGWGRLSRKLINGIRDKQSGKTILDFLKSDGFANRNFMQLIHDDSLTFKEDIQKAQVSGQGDSLHEHIANLAGSPAIKKGILQTVKVVDELVKVMGRHKPENIVIEMARENQTTQKGQKNSRERMKRIEEGIKELGSQILKEHPVENTQLQNEKLYLYYLQNGRDMYVDQELDINRLSDYDVDHIVPQSFLKDDSIDNKVLTRSDKARGKSDNVPSEEVVKKMKNYWRQLLNAKLITQRKFDNLTKAERGGLSELDKAGFIKRQLVETRQITKHVAQILDSRMNTKYDENDKLIREVKVITLKSKLVSDFRKDFQFYKVREINNYHHAHDAYLNAVVGTALIKKYPKLESEFVYGDYKVYDVRKMIAKSEQEIGKATAKYFFYSNIMNFFKTEITLANGEIRKRPLIETNGETGEIVWDKGRDFATVRKVLSMPQVNIVKKTEVQTGGFSKESILPKRNSDKLIARKKDWDPKKYGGFDSPTVAYSVLVVAKVEKGKSKKLKSVKELLGITIMERSSFEKNPIDFLEAKGYKEVKKDLIIKLPKYSLFELENGRKRMLASAGELQKGNELALPSKYVNFLYLASHYEKLKGSPEDNEQKQLFVEQHKHYLDEIIEQISEFSKRVILADANLDKVLSAYNKHRDKPIREQAENIIHLFTLTNLGAPAAFKYFDTTIDRKRYTSTKEVLDATLIHQSITGLYETRIDLSQLGGDGGPAPEAAAKGSSGGTLNLEDEYRLYETSAEPEVSPGSTWLSDFPQAWAETGGMGLAVRQAPLIIPLKATSTPVSIKQYPMSQEAKLGIKPHIQRLLDQGILVPCQSPWNTPLLPVKKPGTNDYRPVQDLREVNKRVEDIHPTVPNPYNLLSGLPPSHRWYTVLDLKDAFFCLRLHPTSQPLFAFEWRDPGMGISGQLTWTRLPQGFKNSPTLFNEALHRDLADFRIQHPDLILLQYVDDILLAATSELDCQQGTRALLLTLGNLGYRASAKKAQLCQKQVKYLGYLLKEGQRWLTEARKETVMGQPTPKTPRQLREFLGKAGFCRLFIPGFAEMAAPLYPLTKPGTLFNWGPDQQKAYQEIKQALLTAPALGLPDLTKPFELFVDEKQGYAKGVLTQKLGPWRRPVAYLSKKLDPVAAGWPPCLRMVAAIAVLRKDAGKLTMGQPLVILAPHAVEALVKQPPDRWLSNARMTHYQAMLLDTDRVQFGPVVALNPATLLPLPEEGAPHDCLEILAETHGTRPDLTDQPIPDADHTWYTDGSSFLQEGQRKAGAAVTTETEVIWARALPAGTSAQRAELIALTQALKMAEGKRLNVYTDSRYAFATAHIHGEIYRRRGWLTSEGREIKNKSEILALLKALFLPKRLSIIHCLGHQKGDSAEARGNRLADQAAREAAIKTPPDTSTLLAGKRTADGSEFEKRTADGSEFESPKKKAKVE

SEQ ID NO: 1920 - protein, 2096 aa, synthetic construct
MPAAKRVKLDGGDKKYSIGLDIGTNSVGWAVITDEYKVPSKKFKVLGNTDRHSIKKNLIGALLFDSGETAEATRLKRTARRRYTRRKNRICYLQEIFSNEMAKVDDSFFHRLEESFLVEEDKKHERHPIFGNIVDEVAYHEKYPTIYHLRKKLVDSTDKADLRLIYLALAHMIKFRGHFLIEGDLNPDNSDVDKLFIQLVQTYNQLFEENPINASGVDAKAILSARLSKSRRLENLIAQLPGEKKNGLFGNLIALSLGLTPNFKSNFDLAEDAKLQLSKDTYDDDLDNLLAQIGDQYADLFLAAKNLSDAILLSDILRVNTEITKAPLSASMIKRYDEHHQDLTLLKALVRQQLPEKYKEIFFDQSKNGYAGYIDGGASQEEFYKFIKPILEKMDGTEELLVKLNREDLLRKQRTFDNGSIPHQIHLGELHAILRRQEDFYPFLKDNREKIEKILTFRIPYYVGPLARGNSRFAWMTRKSEETITPWNFEEVVDKGASAQSFIERMTNFDKNLPNEKVLPKHSLLYEYFTVYNELTKVKYVTEGMRKPAFLSGEQKKAIVDLLFKTNRKVTVKQLKEDYFKKIECFDSVEISGVEDRFNASLGTYHDLLKIIKDKDFLDNEENEDILEDIVLTLTLFEDREMIEERLKTYAHLFDDKVMKQLKRRRYTGWGRLSRKLINGIRDKQSGKTILDFLKSDGFANRNFMQLIHDDSLTFKEDIQKAQVSGQGDSLHEHIANLAGSPAIKKGILQTVKVVDELVKVMGRHKPENIVIEMARENQTTQKGQKNSRERMKRIEEGIKELGSQILKEHPVENTQLQNEKLYLYYLQNGRDMYVDQELDINRLSDYDVDHIVPQSFLKDDSIDNKVLTRSDKARGKSDNVPSEEVVKKMKNYWRQLLNAKLITQRKFDNLTKAERGGLSELDKAGFIKRQLVETRQITKHVAQILDSRMNTKYDENDKLIREVKVITLKSKLVSDFRKDFQFYKVREINNYHHAHDAYLNAVVGTALIKKYPKLESEFVYGDYKVYDVRKMIAKSEQEIGKATAKYFFYSNIMNFFKTEITLANGEIRKRPLIETNGETGEIVWDKGRDFATVRKVLSMPQVNIVKKTEVQTGGFSKESILPKRNSDKLIARKKDWDPKKYGGFDSPTVAYSVLVVAKVEKGKSKKLKSVKELLGITIMERSSFEKNPIDFLEAKGYKEVKKDLIIKLPKYSLFELENGRKRMLASAGELQKGNELALPSKYVNFLYLASHYEKLKGSPEDNEQKQLFVEQHKHYLDEIIEQISEFSKRVILADANLDKVLSAYNKHRDKPIREQAENIIHLFTLTNLGAPAAFKYFDTTIDRKRYTSTKEVLDATLIHQSITGLYETRIDLSQLGGDGGGGGEAAAKGGSGGTLNLEDEYRLYETSAEPEVSPGSTWLSDFPQAWAETGGMGLAVRQAPLIIPLKATSTPVSIKQYPMSQEAKLGIKPHIQRLLDQGILVPCQSPWNTPLLPVKKPGTNDYRPVQDLREVNKRVEDIHPTVPNPYNLLSGLPPSHRWYTVLDLKDAFFCLRLHPTSQPLFAFEWRDPGMGISGQLTWTRLPQGFKNSPTLFNEALHRDLADFRIQHPDLILLQYVDDILLAATSELDCQQGTRALLLTLGNLGYRASAKKAQLCQKQVKYLGYLLKEGQRWLTEARKETVMGQPTPKTPRQLREFLGKAGFCRLFIPGFAEMAAPLYPLTKPGTLFNWGPDQQKAYQEIKQALLTAPALGLPDLTKPFELFVDEKQGYAKGVLTQKLGPWRRPVAYLSKKLDPVAAGWPPCLRMVAAIAVLRKDAGKLTMGQPLVILAPHAVEALVKQPPDRWLSNARMTHYQAMLLDTDRVQFGPVVALNPATLLPLPEEGAPHDCLEILAETHGTRPDLTDQPIPDADHTWYTDGSSFLQEGQRKAGAAVTTETEVIWARALPAGTSAQRAELIALTQALKMAEGKRLNVYTDSRYAFATAHIHGEIYRRRGWLTSEGREIKNKSEILALLKALFLPKRLSIIHCLGHQKGDSAEARGNRLADQAAREAAIKTPPDTSTLLAGKRTADGSEFEKRTADGSEFESPKKKAKVE

SEQ ID NO: 1921 - protein, 2096 aa, synthetic construct
MPAAKRVKLDGGDKKYSIGLDIGTNSVGWAVITDEYKVPSKKFKVLGNTDRHSIKKNLIGALLFDSGETAEATRLKRTARRRYTRRKNRICYLQEIFSNEMAKVDDSFFHRLEESFLVEEDKKHERHPIFGNIVDEVAYHEKYPTIYHLRKKLVDSTDKADLRLIYLALAHMIKFRGHFLIEGDLNPDNSDVDKLFIQLVQTYNQLFEENPINASGVDAKAILSARLSKSRRLENLIAQLPGEKKNGLFGNLIALSLGLTPNFKSNFDLAEDAKLQLSKDTYDDDLDNLLAQIGDQYADLFLAAKNLSDAILLSDILRVNTEITKAPLSASMIKRYDEHHQDLTLLKALVRQQLPEKYKEIFFDQSKNGYAGYIDGGASQEEFYKFIKPILEKMDGTEELLVKLNREDLLRKQRTFDNGSIPHQIHLGELHAILRRQEDFYPFLKDNREKIEKILTFRIPYYVGPLARGNSRFAWMTRKSEETITPWNFEEVVDKGASAQSFIERMTNFDKNLPNEKVLPKHSLLYEYFTVYNELTKVKYVTEGMRKPAFLSGEQKKAIVDLLFKTNRKVTVKQLKEDYFKKIECFDSVEISGVEDRFNASLGTYHDLLKIIKDKDFLDNEENEDILEDIVLTLTLFEDREMIEERLKTYAHLFDDKVMKQLKRRRYTGWGRLSRKLINGIRDKQSGKTILDFLKSDGFANRNFMQLIHDDSLTFKEDIQKAQVSGQGDSLHEHIANLAGSPAIKKGILQTVKVVDELVKVMGRHKPENIVIEMARENQTTQKGQKNSRERMKRIEEGIKELGSQILKEHPVENTQLQNEKLYLYYLQNGRDMYVDQELDINRLSDYDVDHIVPQSFLKDDSIDNKVLTRSDKARGKSDNVPSEEVVKKMKNYWRQLLNAKLITQRKFDNLTKAERGGLSELDKAGFIKRQLVETRQITKHVAQILDSRMNTKYDENDKLIREVKVITLKSKLVSDFRKDFQFYKVREINNYHHAHDAYLNAVVGTALIKKYPKLESEFVYGDYKVYDVRKMIAKSEQEIGKATAKYFFYSNIMNFFKTEITLANGEIRKRPLIETNGETGEIVWDKGRDFATVRKVLSMPQVNIVKKTEVQTGGFSKESILPKRNSDKLIARKKDWDPKKYGGFDSPTVAYSVLVVAKVEKGKSKKLKSVKELLGITIMERSSFEKNPIDFLEAKGYKEVKKDLIIKLPKYSLFELENGRKRMLASAGELQKGNELALPSKYVNFLYLASHYEKLKGSPEDNEQKQLFVEQHKHYLDEIIEQISEFSKRVILADANLDKVLSAYNKHRDKPIREQAENIIHLFTLTNLGAPAAFKYFDTTIDRKRYTSTKEVLDATLIHQSITGLYETRIDLSQLGGDGGEAAAKGSSGGGGGTLNLEDEYRLYETSAEPEVSPGSTWLSDFPQAWAETGGMGLAVRQAPLIIPLKATSTPVSIKQYPMSQEAKLGIKPHIQRLLDQGILVPCQSPWNTPLLPVKKPGTNDYRPVQDLREVNKRVEDIHPTVPNPYNLLSGLPPSHRWYTVLDLKDAFFCLRLHPTSQPLFAFEWRDPGMGISGQLTWTRLPQGFKNSPTLFNEALHRDLADFRIQHPDLILLQYVDDILLAATSELDCQQGTRALLLTLGNLGYRASAKKAQLCQKQVKYLGYLLKEGQRWLTEARKETVMGQPTPKTPRQLREFLGKAGFCRLFIPGFAEMAAPLYPLTKPGTLFNWGPDQQKAYQEIKQALLTAPALGLPDLTKPFELFVDEKQGYAKGVLTQKLGPWRRPVAYLSKKLDPVAAGWPPCLRMVAAIAVLRKDAGKLTMGQPLVILAPHAVEALVKQPPDRWLSNARMTHYQAMLLDTDRVQFGPVVALNPATLLPLPEEGAPHDCLEILAETHGTRPDLTDQPIPDADHTWYTDGSSFLQEGQRKAGAAVTTETEVIWARALPAGTSAQRAELIALTQALKMAEGKRLNVYTDSRYAFATAHIHGEIYRRRGWLTSEGREIKNKSEILALLKALFLPKRLSIIHCLGHQKGDSAEARGNRLADQAAREAAIKTPPDTSTLLAGKRTADGSEFEKRTADGSEFESPKKKAKVE

SEQ ID NO: 1922 - protein, 2093 aa, synthetic construct
MPAAKRVKLDGGDKKYSIGLDIGTNSVGWAVITDEYKVPSKKFKVLGNTDRHSIKKNLIGALLFDSGETAEATRLKRTARRRYTRRKNRICYLQEIFSNEMAKVDDSFFHRLEESFLVEEDKKHERHPIFGNIVDEVAYHEKYPTIYHLRKKLVDSTDKADLRLIYLALAHMIKFRGHFLIEGDLNPDNSDVDKLFIQLVQTYNQLFEENPINASGVDAKAILSARLSKSRRLENLIAQLPGEKKNGLFGNLIALSLGLTPNFKSNFDLAEDAKLQLSKDTYDDDLDNLLAQIGDQYADLFLAAKNLSDAILLSDILRVNTEITKAPLSASMIKRYDEHHQDLTLLKALVRQQLPEKYKEIFFDQSKNGYAGYIDGGASQEEFYKFIKPILEKMDGTEELLVKLNREDLLRKQRTFDNGSIPHQIHLGELHAILRRQEDFYPFLKDNREKIEKILTFRIPYYVGPLARGNSRFAWMTRKSEETITPWNFEEVVDKGASAQSFIERMTNFDKNLPNEKVLPKHSLLYEYFTVYNELTKVKYVTEGMRKPAFLSGEQKKAIVDLLFKTNRKVTVKQLKEDYFKKIECFDSVEISGVEDRFNASLGTYHDLLKIIKDKDFLDNEENEDILEDIVLTLTLFEDREMIEERLKTYAHLFDDKVMKQLKRRRYTGWGRLSRKLINGIRDKQSGKTILDFLKSDGFANRNFMQLIHDDSLTFKEDIQKAQVSGQGDSLHEHIANLAGSPAIKKGILQTVKVVDELVKVMGRHKPENIVIEMARENQTTQKGQKNSRERMKRIEEGIKELGSQILKEHPVENTQLQNEKLYLYYLQNGRDMYVDQELDINRLSDYDVDHIVPQSFLKDDSIDNKVLTRSDKARGKSDNVPSEEVVKKMKNYWRQLLNAKLITQRKFDNLTKAERGGLSELDKAGFIKRQLVETRQITKHVAQILDSRMNTKYDENDKLIREVKVITLKSKLVSDFRKDFQFYKVREINNYHHAHDAYLNAVVGTALIKKYPKLESEFVYGDYKVYDVRKMIAKSEQEIGKATAKYFFYSNIMNFFKTEITLANGEIRKRPLIETNGETGEIVWDKGRDFATVRKVLSMPQVNIVKKTEVQTGGFSKESILPKRNSDKLIARKKDWDPKKYGGFDSPTVAYSVLVVAKVEKGKSKKLKSVKELLGITIMERSSFEKNPIDFLEAKGYKEVKKDLIIKLPKYSLFELENGRKRMLASAGELQKGNELALPSKYVNFLYLASHYEKLKGSPEDNEQKQLFVEQHKHYLDEIIEQISEFSKRVILADANLDKVLSAYNKHRDKPIREQAENIIHLFTLTNLGAPAAFKYFDTTIDRKRYTSTKEVLDATLIHQSITGLYETRIDLSQLGGDGGGGSEAAAKGGTLNLEDEYRLYETSAEPEVSPGSTWLSDFPQAWAETGGMGLAVRQAPLIIPLKATSTPVSIKQYPMSQEAKLGIKPHIQRLLDQGILVPCQSPWNTPLLPVKKPGTNDYRPVQDLREVNKRVEDIHPTVPNPYNLLSGLPPSHRWYTVLDLKDAFFCLRLHPTSQPLFAFEWRDPGMGISGQLTWTRLPQGFKNSPTLFNEALHRDLADFRIQHPDLILLQYVDDILLAATSELDCQQGTRALLLTLGNLGYRASAKKAQLCQKQVKYLGYLLKEGQRWLTEARKETVMGQPTPKTPRQLREFLGKAGFCRLFIPGFAEMAAPLYPLTKPGTLFNWGPDQQKAYQEIKQALLTAPALGLPDLTKPFELFVDEKQGYAKGVLTQKLGPWRRPVAYLSKKLDPVAAGWPPCLRMVAAIAVLRKDAGKLTMGQPLVILAPHAVEALVKQPPDRWLSNARMTHYQAMLLDTDRVQFGPVVALNPATLLPLPEEGAPHDCLEILAETHGTRPDLTDQPIPDADHTWYTDGSSFLQEGQRKAGAAVTTETEVIWARALPAGTSAQRAELIALTQALKMAEGKRLNVYTDSRYAFATAHIHGEIYRRRGWLTSEGREIKNKSEILALLKALFLPKRLSIIHCLGHQKGDSAEARGNRLADQAAREAAIKTPPDTSTLLAGKRTADGSEFEKRTADGSEFESPKKKAKVE

SEQ ID NO: 1923 - protein, 2100 aa, synthetic construct
MPAAKRVKLDGGDKKYSIGLDIGTNSVGWAVITDEYKVPSKKFKVLGNTDRHSIKKNLIGALLFDSGETAEATRLKRTARRRYTRRKNRICYLQEIFSNEMAKVDDSFFHRLEESFLVEEDKKHERHPIFGNIVDEVAYHEKYPTIYHLRKKLVDSTDKADLRLIYLALAHMIKFRGHFLIEGDLNPDNSDVDKLFIQLVQTYNQLFEENPINASGVDAKAILSARLSKSRRLENLIAQLPGEKKNGLFGNLIALSLGLTPNFKSNFDLAEDAKLQLSKDTYDDDLDNLLAQIGDQYADLFLAAKNLSDAILLSDILRVNTEITKAPLSASMIKRYDEHHQDLTLLKALVRQQLPEKYKEIFFDQSKNGYAGYIDGGASQEEFYKFIKPILEKMDGTEELLVKLNREDLLRKQRTFDNGSIPHQIHLGELHAILRRQEDFYPFLKDNREKIEKILTFRIPYYVGPLARGNSRFAWMTRKSEETITPWNFEEVVDKGASAQSFIERMTNFDKNLPNEKVLPKHSLLYEYFTVYNELTKVKYVTEGMRKPAFLSGEQKKAIVDLLFKTNRKVTVKQLKEDYFKKIECFDSVEISGVEDRFNASLGTYHDLLKIIKDKDFLDNEENEDILEDIVLTLTLFEDREMIEERLKTYAHLFDDKVMKQLKRRRYTGWGRLSRKLINGIRDKQSGKTILDFLKSDGFANRNFMQLIHDDSLTFKEDIQKAQVSGQGDSLHEHIANLAGSPAIKKGILQTVKVVDELVKVMGRHKPENIVIEMARENQTTQKGQKNSRERMKRIEEGIKELGSQILKEHPVENTQLQNEKLYLYYLQNGRDMYVDQELDINRLSDYDVDHIVPQSFLKDDSIDNKVLTRSDKARGKSDNVPSEEVVKKMKNYWRQLLNAKLITQRKFDNLTKAERGGLSELDKAGFIKRQLVETRQITKHVAQILDSRMNTKYDENDKLIREVKVITLKSKLVSDFRKDFQFYKVREINNYHHAHDAYLNAVVGTALIKKYPKLESEFVYGDYKVYDVRKMIAKSEQEIGKATAKYFFYSNIMNFFKTEITLANGEIRKRPLIETNGETGEIVWDKGRDFATVRKVLSMPQVNIVKKTEVQTGGFSKESILPKRNSDKLIARKKDWDPKKYGGFDSPTVAYSVLVVAKVEKGKSKKLKSVKELLGITIMERSSFEKNPIDFLEAKGYKEVKKDLIIKLPKYSLFELENGRKRMLASAGELQKGNELALPSKYVNFLYLASHYEKLKGSPEDNEQKQLFVEQHKHYLDEIIEQISEFSKRVILADANLDKVLSAYNKHRDKPIREQAENIIHLFTLTNLGAPAAFKYFDTTIDRKRYTSTKEVLDATLIHQSITGLYETRIDLSQLGGDGGGSSGSSGSSGSSGSSGGTLNLEDEYRLYETSAEPEVSPGSTWLSDFPQAWAETGGMGLAVRQAPLIIPLKATSTPVSIKQYPMSQEAKLGIKPHIQRLLDQGILVPCQSPWNTPLLPVKKPGTNDYRPVQDLREVNKRVEDIHPTVPNPYNLLSGLPPSHRWYTVLDLKDAFFCLRLHPTSQPLFAFEWRDPGMGISGQLTWTRLPQGFKNSPTLFNEALHRDLADFRIQHPDLILLQYVDDILLAATSELDCQQGTRALLLTLGNLGYRASAKKAQLCQKQVKYLGYLLKEGQRWLTEARKETVMGQPTPKTPRQLREFLGKAGFCRLFIPGFAEMAAPLYPLTKPGTLFNWGPDQQKAYQEIKQALLTAPALGLPDLTKPFELFVDEKQGYAKGVLTQKLGPWRRPVAYLSKKLDPVAAGWPPCLRMVAAIAVLRKDAGKLTMGQPLVILAPHAVEALVKQPPDRWLSNARMTHYQAMLLDTDRVQFGPVVALNPATLLPLPEEGAPHDCLEILAETHGTRPDLTDQPIPDADHTWYTDGSSFLQEGQRKAGAAVTTETEVIWARALPAGTSAQRAELIALTQALKMAEGKRLNVYTDSRYAFATAHIHGEIYRRRGWLTSEGREIKNKSEILALLKALFLPKRLSIIHCLGHQKGDSAEARGNRLADQAAREAAIKTPPDTSTLLAGKRTADGSEFEKRTADGSEFESPKKKAKVE

SEQ ID NO: 1924 - protein, 2096 aa, synthetic construct
MPAAKRVKLDGGDKKYSIGLDIGTNSVGWAVITDEYKVPSKKFKVLGNTDRHSIKKNLIGALLFDSGETAEATRLKRTARRRYTRRKNRICYLQEIFSNEMAKVDDSFFHRLEESFLVEEDKKHERHPIFGNIVDEVAYHEKYPTIYHLRKKLVDSTDKADLRLIYLALAHMIKFRGHFLIEGDLNPDNSDVDKLFIQLVQTYNQLFEENPINASGVDAKAILSARLSKSRRLENLIAQLPGEKKNGLFGNLIALSLGLTPNFKSNFDLAEDAKLQLSKDTYDDDLDNLLAQIGDQYADLFLAAKNLSDAILLSDILRVNTEITKAPLSASMIKRYDEHHQDLTLLKALVRQQLPEKYKEIFFDQSKNGYAGYIDGGASQEEFYKFIKPILEKMDGTEELLVKLNREDLLRKQRTFDNGSIPHQIHLGELHAILRRQEDFYPFLKDNREKIEKILTFRIPYYVGPLARGNSRFAWMTRKSEETITPWNFEEVVDKGASAQSFIERMTNFDKNLPNEKVLPKHSLLYEYFTVYNELTKVKYVTEGMRKPAFLSGEQKKAIVDLLFKTNRKVTVKQLKEDYFKKIECFDSVEISGVEDRFNASLGTYHDLLKIIKDKDFLDNEENEDILEDIVLTLTLFEDREMIEERLKTYAHLFDDKVMKQLKRRRYTGWGRLSRKLINGIRDKQSGKTILDFLKSDGFANRNFMQLIHDDSLTFKEDIQKAQVSGQGDSLHEHIANLAGSPAIKKGILQTVKVVDELVKVMGRHKPENIVIEMARENQTTQKGQKNSRERMKRIEEGIKELGSQILKEHPVENTQLQNEKLYLYYLQNGRDMYVDQELDINRLSDYDVDHIVPQSFLKDDSIDNKVLTRSDKARGKSDNVPSEEVVKKMKNYWRQLLNAKLITQRKFDNLTKAERGGLSELDKAGFIKRQLVETRQITKHVAQILDSRMNTKYDENDKLIREVKVITLKSKLVSDFRKDFQFYKVREINNYHHAHDAYLNAVVGTALIKKYPKLESEFVYGDYKVYDVRKMIAKSEQEIGKATAKYFFYSNIMNFFKTEITLANGEIRKRPLIETNGETGEIVWDKGRDFATVRKVLSMPQVNIVKKTEVQTGGFSKESILPKRNSDKLIARKKDWDPKKYGGFDSPTVAYSVLVVAKVEKGKSKKLKSVKELLGITIMERSSFEKNPIDFLEAKGYKEVKKDLIIKLPKYSLFELENGRKRMLASAGELQKGNELALPSKYVNFLYLASHYEKLKGSPEDNEQKQLFVEQHKHYLDEIIEQISEFSKRVILADANLDKVLSAYNKHRDKPIREQAENIIHLFTLTNLGAPAAFKYFDTTIDRKRYTSTKEVLDATLIHQSITGLYETRIDLSQLGGDGGPAPAPAPAPAPGGTLNLEDEYRLYETSAEPEVSPGSTWLSDFPQAWAETGGMGLAVRQAPLIIPLKATSTPVSIKQYPMSQEAKLGIKPHIQRLLDQGILVPCQSPWNTPLLPVKKPGTNDYRPVQDLREVNKRVEDIHPTVPNPYNLLSGLPPSHRWYTVLDLKDAFFCLRLHPTSQPLFAFEWRDPGMGISGQLTWTRLPQGFKNSPTLFNEALHRDLADFRIQHPDLILLQYVDDILLAATSELDCQQGTRALLLTLGNLGYRASAKKAQLCQKQVKYLGYLLKEGQRWLTEARKETVMGQPTPKTPRQLREFLGKAGFCRLFIPGFAEMAAPLYPLTKPGTLFNWGPDQQKAYQEIKQALLTAPALGLPDLTKPFELFVDEKQGYAKGVLTQKLGPWRRPVAYLSKKLDPVAAGWPPCLRMVAAIAVLRKDAGKLTMGQPLVILAPHAVEALVKQPPDRWLSNARMTHYQAMLLDTDRVQFGPVVALNPATLLPLPEEGAPHDCLEILAETHGTRPDLTDQPIPDADHTWYTDGSSFLQEGQRKAGAAVTTETEVIWARALPAGTSAQRAELIALTQALKMAEGKRLNVYTDSRYAFATAHIHGEIYRRRGWLTSEGREIKNKSEILALLKALFLPKRLSIIHCLGHQKGDSAEARGNRLADQAAREAAIKTPPDTSTLLAGKRTADGSEFEKRTADGSEFESPKKKAKVE

SEQ ID NO: 1925 - protein, 2094 aa, synthetic construct
MPAAKRVKLDGGDKKYSIGLDIGTNSVGWAVITDEYKVPSKKFKVLGNTDRHSIKKNLIGALLFDSGETAEATRLKRTARRRYTRRKNRICYLQEIFSNEMAKVDDSFFHRLEESFLVEEDKKHERHPIFGNIVDEVAYHEKYPTIYHLRKKLVDSTDKADLRLIYLALAHMIKFRGHFLIEGDLNPDNSDVDKLFIQLVQTYNQLFEENPINASGVDAKAILSARLSKSRRLENLIAQLPGEKKNGLFGNLIALSLGLTPNFKSNFDLAEDAKLQLSKDTYDDDLDNLLAQIGDQYADLFLAAKNLSDAILLSDILRVNTEITKAPLSASMIKRYDEHHQDLTLLKALVRQQLPEKYKEIFFDQSKNGYAGYIDGGASQEEFYKFIKPILEKMDGTEELLVKLNREDLLRKQRTFDNGSIPHQIHLGELHAILRRQEDFYPFLKDNREKIEKILTFRIPYYVGPLARGNSRFAWMTRKSEETITPWNFEEVVDKGASAQSFIERMTNFDKNLPNEKVLPKHSLLYEYFTVYNELTKVKYVTEGMRKPAFLSGEQKKAIVDLLFKTNRKVTVKQLKEDYFKKIECFDSVEISGVEDRFNASLGTYHDLLKIIKDKDFLDNEENEDILEDIVLTLTLFEDREMIEERLKTYAHLFDDKVMKQLKRRRYTGWGRLSRKLINGIRDKQSGKTILDFLKSDGFANRNFMQLIHDDSLTFKEDIQKAQVSGQGDSLHEHIANLAGSPAIKKGILQTVKVVDELVKVMGRHKPENIVIEMARENQTTQKGQKNSRERMKRIEEGIKELGSQILKEHPVENTQLQNEKLYLYYLQNGRDMYVDQELDINRLSDYDVDHIVPQSFLKDDSIDNKVLTRSDKARGKSDNVPSEEVVKKMKNYWRQLLNAKLITQRKFDNLTKAERGGLSELDKAGFIKRQLVETRQITKHVAQILDSRMNTKYDENDKLIREVKVITLKSKLVSDFRKDFQFYKVREINNYHHAHDAYLNAVVGTALIKKYPKLESEFVYGDYKVYDVRKMIAKSEQEIGKATAKYFFYSNIMNFFKTEITLANGEIRKRPLIETNGETGEIVWDKGRDFATVRKVLSMPQVNIVKKTEVQTGGFSKESILPKRNSDKLIARKKDWDPKKYGGFDSPTVAYSVLVVAKVEKGKSKKLKSVKELLGITIMERSSFEKNPIDFLEAKGYKEVKKDLIIKLPKYSLFELENGRKRMLASAGELQKGNELALPSKYVNFLYLASHYEKLKGSPEDNEQKQLFVEQHKHYLDEIIEQISEFSKRVILADANLDKVLSAYNKHRDKPIREQAENIIHLFTLTNLGAPAAFKYFDTTIDRKRYTSTKEVLDATLIHQSITGLYETRIDLSQLGGDGGGSSGSSGSSGGTLNLEDEYRLYETSAEPEVSPGSTWLSDFPQAWAETGGMGLAVRQAPLIIPLKATSTPVSIKQYPMSQEAKLGIKPHIQRLLDQGILVPCQSPWNTPLLPVKKPGTNDYRPVQDLREVNKRVEDIHPTVPNPYNLLSGLPPSHRWYTVLDLKDAFFCLRLHPTSQPLFAFEWRDPGMGISGQLTWTRLPQGFKNSPTLFNEALHRDLADFRIQHPDLILLQYVDDILLAATSELDCQQGTRALLLTLGNLGYRASAKKAQLCQKQVKYLGYLLKEGQRWLTEARKETVMGQPTPKTPRQLREFLGKAGFCRLFIPGFAEMAAPLYPLTKPGTLFNWGPDQQKAYQEIKQALLTAPALGLPDLTKPFELFVDEKQGYAKGVLTQKLGPWRRPVAYLSKKLDPVAAGWPPCLRMVAAIAVLRKDAGKLTMGQPLVILAPHAVEALVKQPPDRWLSNARMTHYQAMLLDTDRVQFGPVVALNPATLLPLPEEGAPHDCLEILAETHGTRPDLTDQPIPDADHTWYTDGSSFLQEGQRKAGAAVTTETEVIWARALPAGTSAQRAELIALTQALKMAEGKRLNVYTDSRYAFATAHIHGEIYRRRGWLTSEGREIKNKSEILALLKALFLPKRLSIIHCLGHQKGDSAEARGNRLADQAAREAAIKTPPDTSTLLAGKRTADGSEFEKRTADGSEFESPKKKAKVE

SEQ ID NO: 1926 - protein, 2094 aa, synthetic construct
MPAAKRVKLDGGDKKYSIGLDIGTNSVGWAVITDEYKVPSKKFKVLGNTDRHSIKKNLIGALLFDSGETAEATRLKRTARRRYTRRKNRICYLQEIFSNEMAKVDDSFFHRLEESFLVEEDKKHERHPIFGNIVDEVAYHEKYPTIYHLRKKLVDSTDKADLRLIYLALAHMIKFRGHFLIEGDLNPDNSDVDKLFIQLVQTYNQLFEENPINASGVDAKAILSARLSKSRRLENLIAQLPGEKKNGLFGNLIALSLGLTPNFKSNFDLAEDAKLQLSKDTYDDDLDNLLAQIGDQYADLFLAAKNLSDAILLSDILRVNTEITKAPLSASMIKRYDEHHQDLTLLKALVRQQLPEKYKEIFFDQSKNGYAGYIDGGASQEEFYKFIKPILEKMDGTEELLVKLNREDLLRKQRTFDNGSIPHQIHLGELHAILRRQEDFYPFLKDNREKIEKILTFRIPYYVGPLARGNSRFAWMTRKSEETITPWNFEEVVDKGASAQSFIERMTNFDKNLPNEKVLPKHSLLYEYFTVYNELTKVKYVTEGMRKPAFLSGEQKKAIVDLLFKTNRKVTVKQLKEDYFKKIECFDSVEISGVEDRFNASLGTYHDLLKIIKDKDFLDNEENEDILEDIVLTLTLFEDREMIEERLKTYAHLFDDKVMKQLKRRRYTGWGRLSRKLINGIRDKQSGKTILDFLKSDGFANRNFMQLIHDDSLTFKEDIQKAQVSGQGDSLHEHIANLAGSPAIKKGILQTVKVVDELVKVMGRHKPENIVIEMARENQTTQKGQKNSRERMKRIEEGIKELGSQILKEHPVENTQLQNEKLYLYYLQNGRDMYVDQELDINRLSDYDVDHIVPQSFLKDDSIDNKVLTRSDKARGKSDNVPSEEVVKKMKNYWRQLLNAKLITQRKFDNLTKAERGGLSELDKAGFIKRQLVETRQITKHVAQILDSRMNTKYDENDKLIREVKVITLKSKLVSDFRKDFQFYKVREINNYHHAHDAYLNAVVGTALIKKYPKLESEFVYGDYKVYDVRKMIAKSEQEIGKATAKYFFYSNIMNFFKTEITLANGEIRKRPLIETNGETGEIVWDKGRDFATVRKVLSMPQVNIVKKTEVQTGGFSKESILPKRNSDKLIARKKDWDPKKYGGFDSPTVAYSVLVVAKVEKGKSKKLKSVKELLGITIMERSSFEKNPIDFLEAKGYKEVKKDLIIKLPKYSLFELENGRKRMLASAGELQKGNELALPSKYVNFLYLASHYEKLKGSPEDNEQKQLFVEQHKHYLDEIIEQISEFSKRVILADANLDKVLSAYNKHRDKPIREQAENIIHLFTLTNLGAPAAFKYFDTTIDRKRYTSTKEVLDATLIHQSITGLYETRIDLSQLGGDGGGSSGGSPAPGGTLNLEDEYRLYETSAEPEVSPGSTWLSDFPQAWAETGGMGLAVRQAPLIIPLKATSTPVSIKQYPMSQEAKLGIKPHIQRLLDQGILVPCQSPWNTPLLPVKKPGTNDYRPVQDLREVNKRVEDIHPTVPNPYNLLSGLPPSHRWYTVLDLKDAFFCLRLHPTSQPLFAFEWRDPGMGISGQLTWTRLPQGFKNSPTLFNEALHRDLADFRIQHPDLILLQYVDDILLAATSELDCQQGTRALLLTLGNLGYRASAKKAQLCQKQVKYLGYLLKEGQRWLTEARKETVMGQPTPKTPRQLREFLGKAGFCRLFIPGFAEMAAPLYPLTKPGTLFNWGPDQQKAYQEIKQALLTAPALGLPDLTKPFELFVDEKQGYAKGVLTQKLGPWRRPVAYLSKKLDPVAAGWPPCLRMVAAIAVLRKDAGKLTMGQPLVILAPHAVEALVKQPPDRWLSNARMTHYQAMLLDTDRVQFGPVVALNPATLLPLPEEGAPHDCLEILAETHGTRPDLTDQPIPDADHTWYTDGSSFLQEGQRKAGAAVTTETEVIWARALPAGTSAQRAELIALTQALKMAEGKRLNVYTDSRYAFATAHIHGEIYRRRGWLTSEGREIKNKSEILALLKALFLPKRLSIIHCLGHQKGDSAEARGNRLADQAAREAAIKTPPDTSTLLAGKRTADGSEFEKRTADGSEFESPKKKAKVE

SEQ ID NO: 1927 - protein, 2091 aa, synthetic construct
MPAAKRVKLDGGDKKYSIGLDIGTNSVGWAVITDEYKVPSKKFKVLGNTDRHSIKKNLIGALLFDSGETAEATRLKRTARRRYTRRKNRICYLQEIFSNEMAKVDDSFFHRLEESFLVEEDKKHERHPIFGNIVDEVAYHEKYPTIYHLRKKLVDSTDKADLRLIYLALAHMIKFRGHFLIEGDLNPDNSDVDKLFIQLVQTYNQLFEENPINASGVDAKAILSARLSKSRRLENLIAQLPGEKKNGLFGNLIALSLGLTPNFKSNFDLAEDAKLQLSKDTYDDDLDNLLAQIGDQYADLFLAAKNLSDAILLSDILRVNTEITKAPLSASMIKRYDEHHQDLTLLKALVRQQLPEKYKEIFFDQSKNGYAGYIDGGASQEEFYKFIKPILEKMDGTEELLVKLNREDLLRKQRTFDNGSIPHQIHLGELHAILRRQEDFYPFLKDNREKIEKILTFRIPYYVGPLARGNSRFAWMTRKSEETITPWNFEEVVDKGASAQSFIERMTNFDKNLPNEKVLPKHSLLYEYFTVYNELTKVKYVTEGMRKPAFLSGEQKKAIVDLLFKTNRKVTVKQLKEDYFKKIECFDSVEISGVEDRFNASLGTYHDLLKIIKDKDFLDNEENEDILEDIVLTLTLFEDREMIEERLKTYAHLFDDKVMKQLKRRRYTGWGRLSRKLINGIRDKQSGKTILDFLKSDGFANRNFMQLIHDDSLTFKEDIQKAQVSGQGDSLHEHIANLAGSPAIKKGILQTVKVVDELVKVMGRHKPENIVIEMARENQTTQKGQKNSRERMKRIEEGIKELGSQILKEHPVENTQLQNEKLYLYYLQNGRDMYVDQELDINRLSDYDVDHIVPQSFLKDDSIDNKVLTRSDKARGKSDNVPSEEVVKKMKNYWRQLLNAKLITQRKFDNLTKAERGGLSELDKAGFIKRQLVETRQITKHVAQILDSRMNTKYDENDKLIREVKVITLKSKLVSDFRKDFQFYKVREINNYHHAHDAYLNAVVGTALIKKYPKLESEFVYGDYKVYDVRKMIAKSEQEIGKATAKYFFYSNIMNFFKTEITLANGEIRKRPLIETNGETGEIVWDKGRDFATVRKVLSMPQVNIVKKTEVQTGGFSKESILPKRNSDKLIARKKDWDPKKYGGFDSPTVAYSVLVVAKVEKGKSKKLKSVKELLGITIMERSSFEKNPIDFLEAKGYKEVKKDLIIKLPKYSLFELENGRKRMLASAGELQKGNELALPSKYVNFLYLASHYEKLKGSPEDNEQKQLFVEQHKHYLDEIIEQISEFSKRVILADANLDKVLSAYNKHRDKPIREQAENIIHLFTLTNLGAPAAFKYFDTTIDRKRYTSTKEVLDATLIHQSITGLYETRIDLSQLGGDGGGSSGSSGGTLNLEDEYRLYETSAEPEVSPGSTWLSDFPQAWAETGGMGLAVRQAPLIIPLKATSTPVSIKQYPMSQEAKLGIKPHIQRLLDQGILVPCQSPWNTPLLPVKKPGTNDYRPVQDLREVNKRVEDIHPTVPNPYNLLSGLPPSHRWYTVLDLKDAFFCLRLHPTSQPLFAFEWRDPGMGISGQLTWTRLPQGFKNSPTLFNEALHRDLADFRIQHPDLILLQYVDDILLAATSELDCQQGTRALLLTLGNLGYRASAKKAQLCQKQVKYLGYLLKEGQRWLTEARKETVMGQPTPKTPRQLREFLGKAGFCRLFIPGFAEMAAPLYPLTKPGTLFNWGPDQQKAYQEIKQALLTAPALGLPDLTKPFELFVDEKQGYAKGVLTQKLGPWRRPVAYLSKKLDPVAAGWPPCLRMVAAIAVLRKDAGKLTMGQPLVILAPHAVEALVKQPPDRWLSNARMTHYQAMLLDTDRVQFGPVVALNPATLLPLPEEGAPHDCLEILAETHGTRPDLTDQPIPDADHTWYTDGSSFLQEGQRKAGAAVTTETEVIWARALPAGTSAQRAELIALTQALKMAEGKRLNVYTDSRYAFATAHIHGEIYRRRGWLTSEGREIKNKSEILALLKALFLPKRLSIIHCLGHQKGDSAEARGNRLADQAAREAAIKTPPDTSTLLAGKRTADGSEFEKRTADGSEFESPKKKAKVE

SEQ ID NO: 1928 - protein, 2091 aa, synthetic construct
MPAAKRVKLDGGDKKYSIGLDIGTNSVGWAVITDEYKVPSKKFKVLGNTDRHSIKKNLIGALLFDSGETAEATRLKRTARRRYTRRKNRICYLQEIFSNEMAKVDDSFFHRLEESFLVEEDKKHERHPIFGNIVDEVAYHEKYPTIYHLRKKLVDSTDKADLRLIYLALAHMIKFRGHFLIEGDLNPDNSDVDKLFIQLVQTYNQLFEENPINASGVDAKAILSARLSKSRRLENLIAQLPGEKKNGLFGNLIALSLGLTPNFKSNFDLAEDAKLQLSKDTYDDDLDNLLAQIGDQYADLFLAAKNLSDAILLSDILRVNTEITKAPLSASMIKRYDEHHQDLTLLKALVRQQLPEKYKEIFFDQSKNGYAGYIDGGASQEEFYKFIKPILEKMDGTEELLVKLNREDLLRKQRTFDNGSIPHQIHLGELHAILRRQEDFYPFLKDNREKIEKILTFRIPYYVGPLARGNSRFAWMTRKSEETITPWNFEEVVDKGASAQSFIERMTNFDKNLPNEKVLPKHSLLYEYFTVYNELTKVKYVTEGMRKPAFLSGEQKKAIVDLLFKTNRKVTVKQLKEDYFKKIECFDSVEISGVEDRFNASLGTYHDLLKIIKDKDFLDNEENEDILEDIVLTLTLFEDREMIEERLKTYAHLFDDKVMKQLKRRRYTGWGRLSRKLINGIRDKQSGKTILDFLKSDGFANRNFMQLIHDDSLTFKEDIQKAQVSGQGDSLHEHIANLAGSPAIKKGILQTVKVVDELVKVMGRHKPENIVIEMARENQTTQKGQKNSRERMKRIEEGIKELGSQILKEHPVENTQLQNEKLYLYYLQNGRDMYVDQELDINRLSDYDVDHIVPQSFLKDDSIDNKVLTRSDKARGKSDNVPSEEVVKKMKNYWRQLLNAKLITQRKFDNLTKAERGGLSELDKAGFIKRQLVETRQITKHVAQILDSRMNTKYDENDKLIREVKVITLKSKLVSDFRKDFQFYKVREINNYHHAHDAYLNAVVGTALIKKYPKLESEFVYGDYKVYDVRKMIAKSEQEIGKATAKYFFYSNIMNFFKTEITLANGEIRKRPLIETNGETGEIVWDKGRDFATVRKVLSMPQVNIVKKTEVQTGGFSKESILPKRNSDKLIARKKDWDPKKYGGFDSPTVAYSVLVVAKVEKGKSKKLKSVKELLGITIMERSSFEKNPIDFLEAKGYKEVKKDLIIKLPKYSLFELENGRKRMLASAGELQKGNELALPSKYVNFLYLASHYEKLKGSPEDNEQKQLFVEQHKHYLDEIIEQISEFSKRVILADANLDKVLSAYNKHRDKPIREQAENIIHLFTLTNLGAPAAFKYFDTTIDRKRYTSTKEVLDATLIHQSITGLYETRIDLSQLGGDGGGGGGGSGGTLNLEDEYRLYETSAEPEVSPGSTWLSDFPQAWAETGGMGLAVRQAPLIIPLKATSTPVSIKQYPMSQEAKLGIKPHIQRLLDQGILVPCQSPWNTPLLPVKKPGTNDYRPVQDLREVNKRVEDIHPTVPNPYNLLSGLPPSHRWYTVLDLKDAFFCLRLHPTSQPLFAFEWRDPGMGISGQLTWTRLPQGFKNSPTLFNEALHRDLADFRIQHPDLILLQYVDDILLAATSELDCQQGTRALLLTLGNLGYRASAKKAQLCQKQVKYLGYLLKEGQRWLTEARKETVMGQPTPKTPRQLREFLGKAGFCRLFIPGFAEMAAPLYPLTKPGTLFNWGPDQQKAYQEIKQALLTAPALGLPDLTKPFELFVDEKQGYAKGVLTQKLGPWRRPVAYLSKKLDPVAAGWPPCLRMVAAIAVLRKDAGKLTMGQPLVILAPHAVEALVKQPPDRWLSNARMTHYQAMLLDTDRVQFGPVVALNPATLLPLPEEGAPHDCLEILAETHGTRPDLTDQPIPDADHTWYTDGSSFLQEGQRKAGAAVTTETEVIWARALPAGTSAQRAELIALTQALKMAEGKRLNVYTDSRYAFATAHIHGEIYRRRGWLTSEGREIKNKSEILALLKALFLPKRLSIIHCLGHQKGDSAEARGNRLADQAAREAAIKTPPDTSTLLAGKRTADGSEFEKRTADGSEFESPKKKAKVE

SEQ ID NO: 1929 - protein, 2096 aa, synthetic construct
MPAAKRVKLDGGDKKYSIGLDIGTNSVGWAVITDEYKVPSKKFKVLGNTDRHSIKKNLIGALLFDSGETAEATRLKRTARRRYTRRKNRICYLQEIFSNEMAKVDDSFFHRLEESFLVEEDKKHERHPIFGNIVDEVAYHEKYPTIYHLRKKLVDSTDKADLRLIYLALAHMIKFRGHFLIEGDLNPDNSDVDKLFIQLVQTYNQLFEENPINASGVDAKAILSARLSKSRRLENLIAQLPGEKKNGLFGNLIALSLGLTPNFKSNFDLAEDAKLQLSKDTYDDDLDNLLAQIGDQYADLFLAAKNLSDAILLSDILRVNTEITKAPLSASMIKRYDEHHQDLTLLKALVRQQLPEKYKEIFFDQSKNGYAGYIDGGASQEEFYKFIKPILEKMDGTEELLVKLNREDLLRKQRTFDNGSIPHQIHLGELHAILRRQEDFYPFLKDNREKIEKILTFRIPYYVGPLARGNSRFAWMTRKSEETITPWNFEEVVDKGASAQSFIERMTNFDKNLPNEKVLPKHSLLYEYFTVYNELTKVKYVTEGMRKPAFLSGEQKKAIVDLLFKTNRKVTVKQLKEDYFKKIECFDSVEISGVEDRFNASLGTYHDLLKIIKDKDFLDNEENEDILEDIVLTLTLFEDREMIEERLKTYAHLFDDKVMKQLKRRRYTGWGRLSRKLINGIRDKQSGKTILDFLKSDGFANRNFMQLIHDDSLTFKEDIQKAQVSGQGDSLHEHIANLAGSPAIKKGILQTVKVVDELVKVMGRHKPENIVIEMARENQTTQKGQKNSRERMKRIEEGIKELGSQILKEHPVENTQLQNEKLYLYYLQNGRDMYVDQELDINRLSDYDVDHIVPQSFLKDDSIDNKVLTRSDKARGKSDNVPSEEVVKKMKNYWRQLLNAKLITQRKFDNLTKAERGGLSELDKAGFIKRQLVETRQITKHVAQILDSRMNTKYDENDKLIREVKVITLKSKLVSDFRKDFQFYKVREINNYHHAHDAYLNAVVGTALIKKYPKLESEFVYGDYKVYDVRKMIAKSEQEIGKATAKYFFYSNIMNFFKTEITLANGEIRKRPLIETNGETGEIVWDKGRDFATVRKVLSMPQVNIVKKTEVQTGGFSKESILPKRNSDKLIARKKDWDPKKYGGFDSPTVAYSVLVVAKVEKGKSKKLKSVKELLGITIMERSSFEKNPIDFLEAKGYKEVKKDLIIKLPKYSLFELENGRKRMLASAGELQKGNELALPSKYVNFLYLASHYEKLKGSPEDNEQKQLFVEQHKHYLDEIIEQISEFSKRVILADANLDKVLSAYNKHRDKPIREQAENIIHLFTLTNLGAPAAFKYFDTTIDRKRYTSTKEVLDATLIHQSITGLYETRIDLSQLGGDGGGGGPAPEAAAKGGTLNLEDEYRLYETSAEPEVSPGSTWLSDFPQAWAETGGMGLAVRQAPLIIPLKATSTPVSIKQYPMSQEAKLGIKPHIQRLLDQGILVPCQSPWNTPLLPVKKPGTNDYRPVQDLREVNKRVEDIHPTVPNPYNLLSGLPPSHRWYTVLDLKDAFFCLRLHPTSQPLFAFEWRDPGMGISGQLTWTRLPQGFKNSPTLFNEALHRDLADFRIQHPDLILLQYVDDILLAATSELDCQQGTRALLLTLGNLGYRASAKKAQLCQKQVKYLGYLLKEGQRWLTEARKETVMGQPTPKTPRQLREFLGKAGFCRLFIPGFAEMAAPLYPLTKPGTLFNWGPDQQKAYQEIKQALLTAPALGLPDLTKPFELFVDEKQGYAKGVLTQKLGPWRRPVAYLSKKLDPVAAGWPPCLRMVAAIAVLRKDAGKLTMGQPLVILAPHAVEALVKQPPDRWLSNARMTHYQAMLLDTDRVQFGPVVALNPATLLPLPEEGAPHDCLEILAETHGTRPDLTDQPIPDADHTWYTDGSSFLQEGQRKAGAAVTTETEVIWARALPAGTSAQRAELIALTQALKMAEGKRLNVYTDSRYAFATAHIHGEIYRRRGWLTSEGREIKNKSEILALLKALFLPKRLSIIHCLGHQKGDSAEARGNRLADQAAREAAIKTPPDTSTLLAGKRTADGSEFEKRTADGSEFESPKKKAKVE

SEQ ID NO: 1930 - protein, 2091 aa, synthetic construct
MPAAKRVKLDGGDKKYSIGLDIGTNSVGWAVITDEYKVPSKKFKVLGNTDRHSIKKNLIGALLFDSGETAEATRLKRTARRRYTRRKNRICYLQEIFSNEMAKVDDSFFHRLEESFLVEEDKKHERHPIFGNIVDEVAYHEKYPTIYHLRKKLVDSTDKADLRLIYLALAHMIKFRGHFLIEGDLNPDNSDVDKLFIQLVQTYNQLFEENPINASGVDAKAILSARLSKSRRLENLIAQLPGEKKNGLFGNLIALSLGLTPNFKSNFDLAEDAKLQLSKDTYDDDLDNLLAQIGDQYADLFLAAKNLSDAILLSDILRVNTEITKAPLSASMIKRYDEHHQDLTLLKALVRQQLPEKYKEIFFDQSKNGYAGYIDGGASQEEFYKFIKPILEKMDGTEELLVKLNREDLLRKQRTFDNGSIPHQIHLGELHAILRRQEDFYPFLKDNREKIEKILTFRIPYYVGPLARGNSRFAWMTRKSEETITPWNFEEVVDKGASAQSFIERMTNFDKNLPNEKVLPKHSLLYEYFTVYNELTKVKYVTEGMRKPAFLSGEQKKAIVDLLFKTNRKVTVKQLKEDYFKKIECFDSVEISGVEDRFNASLGTYHDLLKIIKDKDFLDNEENEDILEDIVLTLTLFEDREMIEERLKTYAHLFDDKVMKQLKRRRYTGWGRLSRKLINGIRDKQSGKTILDFLKSDGFANRNFMQLIHDDSLTFKEDIQKAQVSGQGDSLHEHIANLAGSPAIKKGILQTVKVVDELVKVMGRHKPENIVIEMARENQTTQKGQKNSRERMKRIEEGIKELGSQILKEHPVENTQLQNEKLYLYYLQNGRDMYVDQELDINRLSDYDVDHIVPQSFLKDDSIDNKVLTRSDKARGKSDNVPSEEVVKKMKNYWRQLLNAKLITQRKFDNLTKAERGGLSELDKAGFIKRQLVETRQITKHVAQILDSRMNTKYDENDKLIREVKVITLKSKLVSDFRKDFQFYKVREINNYHHAHDAYLNAVVGTALIKKYPKLESEFVYGDYKVYDVRKMIAKSEQEIGKATAKYFFYSNIMNFFKTEITLANGEIRKRPLIETNGETGEIVWDKGRDFATVRKVLSMPQVNIVKKTEVQTGGFSKESILPKRNSDKLIARKKDWDPKKYGGFDSPTVAYSVLVVAKVEKGKSKKLKSVKELLGITIMERSSFEKNPIDFLEAKGYKEVKKDLIIKLPKYSLFELENGRKRMLASAGELQKGNELALPSKYVNFLYLASHYEKLKGSPEDNEQKQLFVEQHKHYLDEIIEQISEFSKRVILADANLDKVLSAYNKHRDKPIREQAENIIHLFTLTNLGAPAAFKYFDTTIDRKRYTSTKEVLDATLIHQSITGLYETRIDLSQLGGDGGGGGGSSGGTLNLEDEYRLYETSAEPEVSPGSTWLSDFPQAWAETGGMGLAVRQAPLIIPLKATSTPVSIKQYPMSQEAKLGIKPHIQRLLDQGILVPCQSPWNTPLLPVKKPGTNDYRPVQDLREVNKRVEDIHPTVPNPYNLLSGLPPSHRWYTVLDLKDAFFCLRLHPTSQPLFAFEWRDPGMGISGQLTWTRLPQGFKNSPTLFNEALHRDLADFRIQHPDLILLQYVDDILLAATSELDCQQGTRALLLTLGNLGYRASAKKAQLCQKQVKYLGYLLKEGQRWLTEARKETVMGQPTPKTPRQLREFLGKAGFCRLFIPGFAEMAAPLYPLTKPGTLFNWGPDQQKAYQEIKQALLTAPALGLPDLTKPFELFVDEKQGYAKGVLTQKLGPWRRPVAYLSKKLDPVAAGWPPCLRMVAAIAVLRKDAGKLTMGQPLVILAPHAVEALVKQPPDRWLSNARMTHYQAMLLDTDRVQFGPVVALNPATLLPLPEEGAPHDCLEILAETHGTRPDLTDQPIPDADHTWYTDGSSFLQEGQRKAGAAVTTETEVIWARALPAGTSAQRAELIALTQALKMAEGKRLNVYTDSRYAFATAHIHGEIYRRRGWLTSEGREIKNKSEILALLKALFLPKRLSIIHCLGHQKGDSAEARGNRLADQAAREAAIKTPPDTSTLLAGKRTADGSEFEKRTADGSEFESPKKKAKVE

SEQ ID NO: 1931 - protein, 2091 aa, synthetic construct
MPAAKRVKLDGGDKKYSIGLDIGTNSVGWAVITDEYKVPSKKFKVLGNTDRHSIKKNLIGALLFDSGETAEATRLKRTARRRYTRRKNRICYLQEIFSNEMAKVDDSFFHRLEESFLVEEDKKHERHPIFGNIVDEVAYHEKYPTIYHLRKKLVDSTDKADLRLIYLALAHMIKFRGHFLIEGDLNPDNSDVDKLFIQLVQTYNQLFEENPINASGVDAKAILSARLSKSRRLENLIAQLPGEKKNGLFGNLIALSLGLTPNFKSNFDLAEDAKLQLSKDTYDDDLDNLLAQIGDQYADLFLAAKNLSDAILLSDILRVNTEITKAPLSASMIKRYDEHHQDLTLLKALVRQQLPEKYKEIFFDQSKNGYAGYIDGGASQEEFYKFIKPILEKMDGTEELLVKLNREDLLRKQRTFDNGSIPHQIHLGELHAILRRQEDFYPFLKDNREKIEKILTFRIPYYVGPLARGNSRFAWMTRKSEETITPWNFEEVVDKGASAQSFIERMTNFDKNLPNEKVLPKHSLLYEYFTVYNELTKVKYVTEGMRKPAFLSGEQKKAIVDLLFKTNRKVTVKQLKEDYFKKIECFDSVEISGVEDRFNASLGTYHDLLKIIKDKDFLDNEENEDILEDIVLTLTLFEDREMIEERLKTYAHLFDDKVMKQLKRRRYTGWGRLSRKLINGIRDKQSGKTILDFLKSDGFANRNFMQLIHDDSLTFKEDIQKAQVSGQGDSLHEHIANLAGSPAIKKGILQTVKVVDELVKVMGRHKPENIVIEMARENQTTQKGQKNSRERMKRIEEGIKELGSQILKEHPVENTQLQNEKLYLYYLQNGRDMYVDQELDINRLSDYDVDHIVPQSFLKDDSIDNKVLTRSDKARGKSDNVPSEEVVKKMKNYWRQLLNAKLITQRKFDNLTKAERGGLSELDKAGFIKRQLVETRQITKHVAQILDSRMNTKYDENDKLIREVKVITLKSKLVSDFRKDFQFYKVREINNYHHAHDAYLNAVVGTALIKKYPKLESEFVYGDYKVYDVRKMIAKSEQEIGKATAKYFFYSNIMNFFKTEITLANGEIRKRPLIETNGETGEIVWDKGRDFATVRKVLSMPQVNIVKKTEVQTGGFSKESILPKRNSDKLIARKKDWDPKKYGGFDSPTVAYSVLVVAKVEKGKSKKLKSVKELLGITIMERSSFEKNPIDFLEAKGYKEVKKDLIIKLPKYSLFELENGRKRMLASAGELQKGNELALPSKYVNFLYLASHYEKLKGSPEDNEQKQLFVEQHKHYLDEIIEQISEFSKRVILADANLDKVLSAYNKHRDKPIREQAENIIHLFTLTNLGAPAAFKYFDTTIDRKRYTSTKEVLDATLIHQSITGLYETRIDLSQLGGDGGGSSGGSGGTLNLEDEYRLYETSAEPEVSPGSTWLSDFPQAWAETGGMGLAVRQAPLIIPLKATSTPVSIKQYPMSQEAKLGIKPHIQRLLDQGILVPCQSPWNTPLLPVKKPGTNDYRPVQDLREVNKRVEDIHPTVPNPYNLLSGLPPSHRWYTVLDLKDAFFCLRLHPTSQPLFAFEWRDPGMGISGQLTWTRLPQGFKNSPTLFNEALHRDLADFRIQHPDLILLQYVDDILLAATSELDCQQGTRALLLTLGNLGYRASAKKAQLCQKQVKYLGYLLKEGQRWLTEARKETVMGQPTPKTPRQLREFLGKAGFCRLFIPGFAEMAAPLYPLTKPGTLFNWGPDQQKAYQEIKQALLTAPALGLPDLTKPFELFVDEKQGYAKGVLTQKLGPWRRPVAYLSKKLDPVAAGWPPCLRMVAAIAVLRKDAGKLTMGQPLVILAPHAVEALVKQPPDRWLSNARMTHYQAMLLDTDRVQFGPVVALNPATLLPLPEEGAPHDCLEILAETHGTRPDLTDQPIPDADHTWYTDGSSFLQEGQRKAGAAVTTETEVIWARALPAGTSAQRAELIALTQALKMAEGKRLNVYTDSRYAFATAHIHGEIYRRRGWLTSEGREIKNKSEILALLKALFLPKRLSIIHCLGHQKGDSAEARGNRLADQAAREAAIKTPPDTSTLLAGKRTADGSEFEKRTADGSEFESPKKKAKVE

SEQ ID NO: 1932 - protein, 2094 aa, synthetic construct
MPAAKRVKLDGGDKKYSIGLDIGTNSVGWAVITDEYKVPSKKFKVLGNTDRHSIKKNLIGALLFDSGETAEATRLKRTARRRYTRRKNRICYLQEIFSNEMAKVDDSFFHRLEESFLVEEDKKHERHPIFGNIVDEVAYHEKYPTIYHLRKKLVDSTDKADLRLIYLALAHMIKFRGHFLIEGDLNPDNSDVDKLFIQLVQTYNQLFEENPINASGVDAKAILSARLSKSRRLENLIAQLPGEKKNGLFGNLIALSLGLTPNFKSNFDLAEDAKLQLSKDTYDDDLDNLLAQIGDQYADLFLAAKNLSDAILLSDILRVNTEITKAPLSASMIKRYDEHHQDLTLLKALVRQQLPEKYKEIFFDQSKNGYAGYIDGGASQEEFYKFIKPILEKMDGTEELLVKLNREDLLRKQRTFDNGSIPHQIHLGELHAILRRQEDFYPFLKDNREKIEKILTFRIPYYVGPLARGNSRFAWMTRKSEETITPWNFEEVVDKGASAQSFIERMTNFDKNLPNEKVLPKHSLLYEYFTVYNELTKVKYVTEGMRKPAFLSGEQKKAIVDLLFKTNRKVTVKQLKEDYFKKIECFDSVEISGVEDRFNASLGTYHDLLKIIKDKDFLDNEENEDILEDIVLTLTLFEDREMIEERLKTYAHLFDDKVMKQLKRRRYTGWGRLSRKLINGIRDKQSGKTILDFLKSDGFANRNFMQLIHDDSLTFKEDIQKAQVSGQGDSLHEHIANLAGSPAIKKGILQTVKVVDELVKVMGRHKPENIVIEMARENQTTQKGQKNSRERMKRIEEGIKELGSQILKEHPVENTQLQNEKLYLYYLQNGRDMYVDQELDINRLSDYDVDHIVPQSFLKDDSIDNKVLTRSDKARGKSDNVPSEEVVKKMKNYWRQLLNAKLITQRKFDNLTKAERGGLSELDKAGFIKRQLVETRQITKHVAQILDSRMNTKYDENDKLIREVKVITLKSKLVSDFRKDFQFYKVREINNYHHAHDAYLNAVVGTALIKKYPKLESEFVYGDYKVYDVRKMIAKSEQEIGKATAKYFFYSNIMNFFKTEITLANGEIRKRPLIETNGETGEIVWDKGRDFATVRKVLSMPQVNIVKKTEVQTGGFSKESILPKRNSDKLIARKKDWDPKKYGGFDSPTVAYSVLVVAKVEKGKSKKLKSVKELLGITIMERSSFEKNPIDFLEAKGYKEVKKDLIIKLPKYSLFELENGRKRMLASAGELQKGNELALPSKYVNFLYLASHYEKLKGSPEDNEQKQLFVEQHKHYLDEIIEQISEFSKRVILADANLDKVLSAYNKHRDKPIREQAENIIHLFTLTNLGAPAAFKYFDTTIDRKRYTSTKEVLDATLIHQSITGLYETRIDLSQLGGDGGGSSGGSGGGGGTLNLEDEYRLYETSAEPEVSPGSTWLSDFPQAWAETGGMGLAVRQAPLIIPLKATSTPVSIKQYPMSQEAKLGIKPHIQRLLDQGILVPCQSPWNTPLLPVKKPGTNDYRPVQDLREVNKRVEDIHPTVPNPYNLLSGLPPSHRWYTVLDLKDAFFCLRLHPTSQPLFAFEWRDPGMGISGQLTWTRLPQGFKNSPTLFNEALHRDLADFRIQHPDLILLQYVDDILLAATSELDCQQGTRALLLTLGNLGYRASAKKAQLCQKQVKYLGYLLKEGQRWLTEARKETVMGQPTPKTPRQLREFLGKAGFCRLFIPGFAEMAAPLYPLTKPGTLFNWGPDQQKAYQEIKQALLTAPALGLPDLTKPFELFVDEKQGYAKGVLTQKLGPWRRPVAYLSKKLDPVAAGWPPCLRMVAAIAVLRKDAGKLTMGQPLVILAPHAVEALVKQPPDRWLSNARMTHYQAMLLDTDRVQFGPVVALNPATLLPLPEEGAPHDCLEILAETHGTRPDLTDQPIPDADHTWYTDGSSFLQEGQRKAGAAVTTETEVIWARALPAGTSAQRAELIALTQALKMAEGKRLNVYTDSRYAFATAHIHGEIYRRRGWLTSEGREIKNKSEILALLKALFLPKRLSIIHCLGHQKGDSAEARGNRLADQAAREAAIKTPPDTSTLLAGKRTADGSEFEKRTADGSEFESPKKKAKVE

SEQ ID NO: 1933 - protein, 2092 aa, synthetic construct
MPAAKRVKLDGGDKKYSIGLDIGTNSVGWAVITDEYKVPSKKFKVLGNTDRHSIKKNLIGALLFDSGETAEATRLKRTARRRYTRRKNRICYLQEIFSNEMAKVDDSFFHRLEESFLVEEDKKHERHPIFGNIVDEVAYHEKYPTIYHLRKKLVDSTDKADLRLIYLALAHMIKFRGHFLIEGDLNPDNSDVDKLFIQLVQTYNQLFEENPINASGVDAKAILSARLSKSRRLENLIAQLPGEKKNGLFGNLIALSLGLTPNFKSNFDLAEDAKLQLSKDTYDDDLDNLLAQIGDQYADLFLAAKNLSDAILLSDILRVNTEITKAPLSASMIKRYDEHHQDLTLLKALVRQQLPEKYKEIFFDQSKNGYAGYIDGGASQEEFYKFIKPILEKMDGTEELLVKLNREDLLRKQRTFDNGSIPHQIHLGELHAILRRQEDFYPFLKDNREKIEKILTFRIPYYVGPLARGNSRFAWMTRKSEETITPWNFEEVVDKGASAQSFIERMTNFDKNLPNEKVLPKHSLLYEYFTVYNELTKVKYVTEGMRKPAFLSGEQKKAIVDLLFKTNRKVTVKQLKEDYFKKIECFDSVEISGVEDRFNASLGTYHDLLKIIKDKDFLDNEENEDILEDIVLTLTLFEDREMIEERLKTYAHLFDDKVMKQLKRRRYTGWGRLSRKLINGIRDKQSGKTILDFLKSDGFANRNFMQLIHDDSLTFKEDIQKAQVSGQGDSLHEHIANLAGSPAIKKGILQTVKVVDELVKVMGRHKPENIVIEMARENQTTQKGQKNSRERMKRIEEGIKELGSQILKEHPVENTQLQNEKLYLYYLQNGRDMYVDQELDINRLSDYDVDHIVPQSFLKDDSIDNKVLTRSDKARGKSDNVPSEEVVKKMKNYWRQLLNAKLITQRKFDNLTKAERGGLSELDKAGFIKRQLVETRQITKHVAQILDSRMNTKYDENDKLIREVKVITLKSKLVSDFRKDFQFYKVREINNYHHAHDAYLNAVVGTALIKKYPKLESEFVYGDYKVYDVRKMIAKSEQEIGKATAKYFFYSNIMNFFKTEITLANGEIRKRPLIETNGETGEIVWDKGRDFATVRKVLSMPQVNIVKKTEVQTGGFSKESILPKRNSDKLIARKKDWDPKKYGGFDSPTVAYSVLVVAKVEKGKSKKLKSVKELLGITIMERSSFEKNPIDFLEAKGYKEVKKDLIIKLPKYSLFELENGRKRMLASAGELQKGNELALPSKYVNFLYLASHYEKLKGSPEDNEQKQLFVEQHKHYLDEIIEQISEFSKRVILADANLDKVLSAYNKHRDKPIREQAENIIHLFTLTNLGAPAAFKYFDTTIDRKRYTSTKEVLDATLIHQSITGLYETRIDLSQLGGDGGPAPAPAPGGTLNLEDEYRLYETSAEPEVSPGSTWLSDFPQAWAETGGMGLAVRQAPLIIPLKATSTPVSIKQYPMSQEAKLGIKPHIQRLLDQGILVPCQSPWNTPLLPVKKPGTNDYRPVQDLREVNKRVEDIHPTVPNPYNLLSGLPPSHRWYTVLDLKDAFFCLRLHPTSQPLFAFEWRDPGMGISGQLTWTRLPQGFKNSPTLFNEALHRDLADFRIQHPDLILLQYVDDILLAATSELDCQQGTRALLLTLGNLGYRASAKKAQLCQKQVKYLGYLLKEGQRWLTEARKETVMGQPTPKTPRQLREFLGKAGFCRLFIPGFAEMAAPLYPLTKPGTLFNWGPDQQKAYQEIKQALLTAPALGLPDLTKPFELFVDEKQGYAKGVLTQKLGPWRRPVAYLSKKLDPVAAGWPPCLRMVAAIAVLRKDAGKLTMGQPLVILAPHAVEALVKQPPDRWLSNARMTHYQAMLLDTDRVQFGPVVALNPATLLPLPEEGAPHDCLEILAETHGTRPDLTDQPIPDADHTWYTDGSSFLQEGQRKAGAAVTTETEVIWARALPAGTSAQRAELIALTQALKMAEGKRLNVYTDSRYAFATAHIHGEIYRRRGWLTSEGREIKNKSEILALLKALFLPKRLSIIHCLGHQKGDSAEARGNRLADQAAREAAIKTPPDTSTLLAGKRTADGSEFEKRTADGSEFESPKKKAKVE

SEQ ID NO: 1934 - protein, 2102 aa, synthetic construct
MPAAKRVKLDGGDKKYSIGLDIGTNSVGWAVITDEYKVPSKKFKVLGNTDRHSIKKNLIGALLFDSGETAEATRLKRTARRRYTRRKNRICYLQEIFSNEMAKVDDSFFHRLEESFLVEEDKKHERHPIFGNIVDEVAYHEKYPTIYHLRKKLVDSTDKADLRLIYLALAHMIKFRGHFLIEGDLNPDNSDVDKLFIQLVQTYNQLFEENPINASGVDAKAILSARLSKSRRLENLIAQLPGEKKNGLFGNLIALSLGLTPNFKSNFDLAEDAKLQLSKDTYDDDLDNLLAQIGDQYADLFLAAKNLSDAILLSDILRVNTEITKAPLSASMIKRYDEHHQDLTLLKALVRQQLPEKYKEIFFDQSKNGYAGYIDGGASQEEFYKFIKPILEKMDGTEELLVKLNREDLLRKQRTFDNGSIPHQIHLGELHAILRRQEDFYPFLKDNREKIEKILTFRIPYYVGPLARGNSRFAWMTRKSEETITPWNFEEVVDKGASAQSFIERMTNFDKNLPNEKVLPKHSLLYEYFTVYNELTKVKYVTEGMRKPAFLSGEQKKAIVDLLFKTNRKVTVKQLKEDYFKKIECFDSVEISGVEDRFNASLGTYHDLLKIIKDKDFLDNEENEDILEDIVLTLTLFEDREMIEERLKTYAHLFDDKVMKQLKRRRYTGWGRLSRKLINGIRDKQSGKTILDFLKSDGFANRNFMQLIHDDSLTFKEDIQKAQVSGQGDSLHEHIANLAGSPAIKKGILQTVKVVDELVKVMGRHKPENIVIEMARENQTTQKGQKNSRERMKRIEEGIKELGSQILKEHPVENTQLQNEKLYLYYLQNGRDMYVDQELDINRLSDYDVDHIVPQSFLKDDSIDNKVLTRSDKARGKSDNVPSEEVVKKMKNYWRQLLNAKLITQRKFDNLTKAERGGLSELDKAGFIKRQLVETRQITKHVAQILDSRMNTKYDENDKLIREVKVITLKSKLVSDFRKDFQFYKVREINNYHHAHDAYLNAVVGTALIKKYPKLESEFVYGDYKVYDVRKMIAKSEQEIGKATAKYFFYSNIMNFFKTEITLANGEIRKRPLIETNGETGEIVWDKGRDFATVRKVLSMPQVNIVKKTEVQTGGFSKESILPKRNSDKLIARKKDWDPKKYGGFDSPTVAYSVLVVAKVEKGKSKKLKSVKELLGITIMERSSFEKNPIDFLEAKGYKEVKKDLIIKLPKYSLFELENGRKRMLASAGELQKGNELALPSKYVNFLYLASHYEKLKGSPEDNEQKQLFVEQHKHYLDEIIEQISEFSKRVILADANLDKVLSAYNKHRDKPIREQAENIIHLFTLTNLGAPAAFKYFDTTIDRKRYTSTKEVLDATLIHQSITGLYETRIDLSQLGGDGGPAPAPAPAPAPGGTVSLQDEHRLFDIPVTTSLPDVWLQDFPQAWAETGGLGRAKCQAPIIIDLKPTAVPVSIKQYPMSLEAHMGIRQHIIKFLELGVLRPCRSPWNTPLLPVKKPGTQDYRPVQDLREINKRTVDIHPTVPNPYNLLSTLKPDYSWYTVLDLKDAFFCLPLAPQSQELFAFEWKDPERGISGQLTWTRLPQGFKNSPTLFNEALHRDLTDFRTQHPEVTLLQYVDDLLLAAPTKKACTQGTRHLLQELGEKGYRASAKKAQICQTKVTYLGYILSEGKRWLTPGRIETVARIPPPRNPREVREFLGKAGFCRLFIPGFAELAAPLYALTKPSTPFTWQTEHQLAFEALKKALLSAPALGLPDTSKPFTLFLDERQGIAKGVLTQKLGPWKRPVAYLSKKLDPVAAGWPPCLRIMAATAMLVKDSAKLTLGQPLTVITPHTLEAIVRQPPDRWITNARLTHYQALLLDTDRVQFGPPVTLNPATLLPVPENQPSPHDCRQVLAETHGTREDLKDQELPDADHTWYTDGSSYLDSGTRRAGAAVVDGHNTIWAQSLPPGTSAQKAELIALTKALELSKGKKANIYTDSRYAFATAHTHGSIYERRGWLTSEGKEIKNKAEIIALLKALFLPQEVAIIHCPGHQKGQDPVAVGNRQADRVARQAAMAEVLTLATEPDNTSHITAGKRTADGSEFEKRTADGSEFESPKKKAKVE

SEQ ID NO: 1935 - protein, 2102 aa, synthetic construct
MPAAKRVKLDGGDKKYSIGLDIGTNSVGWAVITDEYKVPSKKFKVLGNTDRHSIKKNLIGALLFDSGETAEATRLKRTARRRYTRRKNRICYLQEIFSNEMAKVDDSFFHRLEESFLVEEDKKHERHPIFGNIVDEVAYHEKYPTIYHLRKKLVDSTDKADLRLIYLALAHMIKFRGHFLIEGDLNPDNSDVDKLFIQLVQTYNQLFEENPINASGVDAKAILSARLSKSRRLENLIAQLPGEKKNGLFGNLIALSLGLTPNFKSNFDLAEDAKLQLSKDTYDDDLDNLLAQIGDQYADLFLAAKNLSDAILLSDILRVNTEITKAPLSASMIKRYDEHHQDLTLLKALVRQQLPEKYKEIFFDQSKNGYAGYIDGGASQEEFYKFIKPILEKMDGTEELLVKLNREDLLRKQRTFDNGSIPHQIHLGELHAILRRQEDFYPFLKDNREKIEKILTFRIPYYVGPLARGNSRFAWMTRKSEETITPWNFEEVVDKGASAQSFIERMTNFDKNLPNEKVLPKHSLLYEYFTVYNELTKVKYVTEGMRKPAFLSGEQKKAIVDLLFKTNRKVTVKQLKEDYFKKIECFDSVEISGVEDRFNASLGTYHDLLKIIKDKDFLDNEENEDILEDIVLTLTLFEDREMIEERLKTYAHLFDDKVMKQLKRRRYTGWGRLSRKLINGIRDKQSGKTILDFLKSDGFANRNFMQLIHDDSLTFKEDIQKAQVSGQGDSLHEHIANLAGSPAIKKGILQTVKVVDELVKVMGRHKPENIVIEMARENQTTQKGQKNSRERMKRIEEGIKELGSQILKEHPVENTQLQNEKLYLYYLQNGRDMYVDQELDINRLSDYDVDHIVPQSFLKDDSIDNKVLTRSDKARGKSDNVPSEEVVKKMKNYWRQLLNAKLITQRKFDNLTKAERGGLSELDKAGFIKRQLVETRQITKHVAQILDSRMNTKYDENDKLIREVKVITLKSKLVSDFRKDFQFYKVREINNYHHAHDAYLNAVVGTALIKKYPKLESEFVYGDYKVYDVRKMIAKSEQEIGKATAKYFFYSNIMNFFKTEITLANGEIRKRPLIETNGETGEIVWDKGRDFATVRKVLSMPQVNIVKKTEVQTGGFSKESILPKRNSDKLIARKKDWDPKKYGGFDSPTVAYSVLVVAKVEKGKSKKLKSVKELLGITIMERSSFEKNPIDFLEAKGYKEVKKDLIIKLPKYSLFELENGRKRMLASAGELQKGNELALPSKYVNFLYLASHYEKLKGSPEDNEQKQLFVEQHKHYLDEIIEQISEFSKRVILADANLDKVLSAYNKHRDKPIREQAENIIHLFTLTNLGAPAAFKYFDTTIDRKRYTSTKEVLDATLIHQSITGLYETRIDLSQLGGDGGEAAAKGGSGGGGGTVSLQDEHRLFDIPVTTSLPDVWLQDFPQAWAETGGLGRAKCQAPIIIDLKPTAVPVSIKQYPMSLEAHMGIRQHIIKFLELGVLRPCRSPWNTPLLPVKKPGTQDYRPVQDLREINKRTVDIHPTVPNPYNLLSTLKPDYSWYTVLDLKDAFFCLPLAPQSQELFAFEWKDPERGISGQLTWTRLPQGFKNSPTLFNEALHRDLTDFRTQHPEVTLLQYVDDLLLAAPTKKACTQGTRHLLQELGEKGYRASAKKAQICQTKVTYLGYILSEGKRWLTPGRIETVARIPPPRNPREVREFLGKAGFCRLFIPGFAELAAPLYALTKPSTPFTWQTEHQLAFEALKKALLSAPALGLPDTSKPFTLFLDERQGIAKGVLTQKLGPWKRPVAYLSKKLDPVAAGWPPCLRIMAATAMLVKDSAKLTLGQPLTVITPHTLEAIVRQPPDRWITNARLTHYQALLLDTDRVQFGPPVTLNPATLLPVPENQPSPHDCRQVLAETHGTREDLKDQELPDADHTWYTDGSSYLDSGTRRAGAAVVDGHNTIWAQSLPPGTSAQKAELIALTKALELSKGKKANIYTDSRYAFATAHTHGSIYERRGWLTSEGKEIKNKAEIIALLKALFLPQEVAIIHCPGHQKGQDPVAVGNRQADRVARQAAMAEVLTLATEPDNTSHITAGKRTADGSEFEKRTADGSEFESPKKKAKVE

SEQ ID NO: 1936 - protein, 2121 aa, synthetic construct
MPAAKRVKLDGGDKKYSIGLDIGTNSVGWAVITDEYKVPSKKFKVLGNTDRHSIKKNLIGALLFDSGETAEATRLKRTARRRYTRRKNRICYLQEIFSNEMAKVDDSFFHRLEESFLVEEDKKHERHPIFGNIVDEVAYHEKYPTIYHLRKKLVDSTDKADLRLIYLALAHMIKFRGHFLIEGDLNPDNSDVDKLFIQLVQTYNQLFEENPINASGVDAKAILSARLSKSRRLENLIAQLPGEKKNGLFGNLIALSLGLTPNFKSNFDLAEDAKLQLSKDTYDDDLDNLLAQIGDQYADLFLAAKNLSDAILLSDILRVNTEITKAPLSASMIKRYDEHHQDLTLLKALVRQQLPEKYKEIFFDQSKNGYAGYIDGGASQEEFYKFIKPILEKMDGTEELLVKLNREDLLRKQRTFDNGSIPHQIHLGELHAILRRQEDFYPFLKDNREKIEKILTFRIPYYVGPLARGNSRFAWMTRKSEETITPWNFEEVVDKGASAQSFIERMTNFDKNLPNEKVLPKHSLLYEYFTVYNELTKVKYVTEGMRKPAFLSGEQKKAIVDLLFKTNRKVTVKQLKEDYFKKIECFDSVEISGVEDRFNASLGTYHDLLKIIKDKDFLDNEENEDILEDIVLTLTLFEDREMIEERLKTYAHLFDDKVMKQLKRRRYTGWGRLSRKLINGIRDKQSGKTILDFLKSDGFANRNFMQLIHDDSLTFKEDIQKAQVSGQGDSLHEHIANLAGSPAIKKGILQTVKVVDELVKVMGRHKPENIVIEMARENQTTQKGQKNSRERMKRIEEGIKELGSQILKEHPVENTQLQNEKLYLYYLQNGRDMYVDQELDINRLSDYDVDHIVPQSFLKDDSIDNKVLTRSDKARGKSDNVPSEEVVKKMKNYWRQLLNAKLITQRKFDNLTKAERGGLSELDKAGFIKRQLVETRQITKHVAQILDSRMNTKYDENDKLIREVKVITLKSKLVSDFRKDFQFYKVREINNYHHAHDAYLNAVVGTALIKKYPKLESEFVYGDYKVYDVRKMIAKSEQEIGKATAKYFFYSNIMNFFKTEITLANGEIRKRPLIETNGETGEIVWDKGRDFATVRKVLSMPQVNIVKKTEVQTGGFSKESILPKRNSDKLIARKKDWDPKKYGGFDSPTVAYSVLVVAKVEKGKSKKLKSVKELLGITIMERSSFEKNPIDFLEAKGYKEVKKDLIIKLPKYSLFELENGRKRMLASAGELQKGNELALPSKYVNFLYLASHYEKLKGSPEDNEQKQLFVEQHKHYLDEIIEQISEFSKRVILADANLDKVLSAYNKHRDKPIREQAENIIHLFTLTNLGAPAAFKYFDTTIDRKRYTSTKEVLDATLIHQSITGLYETRIDLSQLGGDGGGGGGSGGGGSGGGGSGGGGSGGGGSGGGGSGGTVSLQDEHRLFDIPVTTSLPDVWLQDFPQAWAETGGLGRAKCQAPIIIDLKPTAVPVSIKQYPMSLEAHMGIRQHIIKFLELGVLRPCRSPWNTPLLPVKKPGTQDYRPVQDLREINKRTVDIHPTVPNPYNLLSTLKPDYSWYTVLDLKDAFFCLPLAPQSQELFAFEWKDPERGISGQLTWTRLPQGFKNSPTLFNEALHRDLTDFRTQHPEVTLLQYVDDLLLAAPTKKACTQGTRHLLQELGEKGYRASAKKAQICQTKVTYLGYILSEGKRWLTPGRIETVARIPPPRNPREVREFLGKAGFCRLFIPGFAELAAPLYALTKPSTPFTWQTEHQLAFEALKKALLSAPALGLPDTSKPFTLFLDERQGIAKGVLTQKLGPWKRPVAYLSKKLDPVAAGWPPCLRIMAATAMLVKDSAKLTLGQPLTVITPHTLEAIVRQPPDRWITNARLTHYQALLLDTDRVQFGPPVTLNPATLLPVPENQPSPHDCRQVLAETHGTREDLKDQELPDADHTWYTDGSSYLDSGTRRAGAAVVDGHNTIWAQSLPPGTSAQKAELIALTKALELSKGKKANIYTDSRYAFATAHTHGSIYERRGWLTSEGKEIKNKAEIIALLKALFLPQEVAIIHCPGHQKGQDPVAVGNRQADRVARQAAMAEVLTLATEPDNTSHITAGKRTADGSEFEKRTADGSEFESPKKKAKVE

SEQ ID NO: 1937 - protein, 2102 aa, synthetic construct
MPAAKRVKLDGGDKKYSIGLDIGTNSVGWAVITDEYKVPSKKFKVLGNTDRHSIKKNLIGALLFDSGETAEATRLKRTARRRYTRRKNRICYLQEIFSNEMAKVDDSFFHRLEESFLVEEDKKHERHPIFGNIVDEVAYHEKYPTIYHLRKKLVDSTDKADLRLIYLALAHMIKFRGHFLIEGDLNPDNSDVDKLFIQLVQTYNQLFEENPINASGVDAKAILSARLSKSRRLENLIAQLPGEKKNGLFGNLIALSLGLTPNFKSNFDLAEDAKLQLSKDTYDDDLDNLLAQIGDQYADLFLAAKNLSDAILLSDILRVNTEITKAPLSASMIKRYDEHHQDLTLLKALVRQQLPEKYKEIFFDQSKNGYAGYIDGGASQEEFYKFIKPILEKMDGTEELLVKLNREDLLRKQRTFDNGSIPHQIHLGELHAILRRQEDFYPFLKDNREKIEKILTFRIPYYVGPLARGNSRFAWMTRKSEETITPWNFEEVVDKGASAQSFIERMTNFDKNLPNEKVLPKHSLLYEYFTVYNELTKVKYVTEGMRKPAFLSGEQKKAIVDLLFKTNRKVTVKQLKEDYFKKIECFDSVEISGVEDRFNASLGTYHDLLKIIKDKDFLDNEENEDILEDIVLTLTLFEDREMIEERLKTYAHLFDDKVMKQLKRRRYTGWGRLSRKLINGIRDKQSGKTILDFLKSDGFANRNFMQLIHDDSLTFKEDIQKAQVSGQGDSLHEHIANLAGSPAIKKGILQTVKVVDELVKVMGRHKPENIVIEMARENQTTQKGQKNSRERMKRIEEGIKELGSQILKEHPVENTQLQNEKLYLYYLQNGRDMYVDQELDINRLSDYDVDHIVPQSFLKDDSIDNKVLTRSDKARGKSDNVPSEEVVKKMKNYWRQLLNAKLITQRKFDNLTKAERGGLSELDKAGFIKRQLVETRQITKHVAQILDSRMNTKYDENDKLIREVKVITLKSKLVSDFRKDFQFYKVREINNYHHAHDAYLNAVVGTALIKKYPKLESEFVYGDYKVYDVRKMIAKSEQEIGKATAKYFFYSNIMNFFKTEITLANGEIRKRPLIETNGETGEIVWDKGRDFATVRKVLSMPQVNIVKKTEVQTGGFSKESILPKRNSDKLIARKKDWDPKKYGGFDSPTVAYSVLVVAKVEKGKSKKLKSVKELLGITIMERSSFEKNPIDFLEAKGYKEVKKDLIIKLPKYSLFELENGRKRMLASAGELQKGNELALPSKYVNFLYLASHYEKLKGSPEDNEQKQLFVEQHKHYLDEIIEQISEFSKRVILADANLDKVLSAYNKHRDKPIREQAENIIHLFTLTNLGAPAAFKYFDTTIDRKRYTSTKEVLDATLIHQSITGLYETRIDLSQLGGDGGGGGGGSEAAAKGGTVSLQDEHRLFDIPVTTSLPDVWLQDFPQAWAETGGLGRAKCQAPIIIDLKPTAVPVSIKQYPMSLEAHMGIRQHIIKFLELGVLRPCRSPWNTPLLPVKKPGTQDYRPVQDLREINKRTVDIHPTVPNPYNLLSTLKPDYSWYTVLDLKDAFFCLPLAPQSQELFAFEWKDPERGISGQLTWTRLPQGFKNSPTLFNEALHRDLTDFRTQHPEVTLLQYVDDLLLAAPTKKACTQGTRHLLQELGEKGYRASAKKAQICQTKVTYLGYILSEGKRWLTPGRIETVARIPPPRNPREVREFLGKAGFCRLFIPGFAELAAPLYALTKPSTPFTWQTEHQLAFEALKKALLSAPALGLPDTSKPFTLFLDERQGIAKGVLTQKLGPWKRPVAYLSKKLDPVAAGWPPCLRIMAATAMLVKDSAKLTLGQPLTVITPHTLEAIVRQPPDRWITNARLTHYQALLLDTDRVQFGPPVTLNPATLLPVPENQPSPHDCRQVLAETHGTREDLKDQELPDADHTWYTDGSSYLDSGTRRAGAAVVDGHNTIWAQSLPPGTSAQKAELIALTKALELSKGKKANIYTDSRYAFATAHTHGSIYERRGWLTSEGKEIKNKAEIIALLKALFLPQEVAIIHCPGHQKGQDPVAVGNRQADRVARQAAMAEVLTLATEPDNTSHITAGKRTADGSEFEKRTADGSEFESPKKKAKVE

SEQ ID NO: 1938 - protein, 2102 aa, synthetic construct
MPAAKRVKLDGGDKKYSIGLDIGTNSVGWAVITDEYKVPSKKFKVLGNTDRHSIKKNLIGALLFDSGETAEATRLKRTARRRYTRRKNRICYLQEIFSNEMAKVDDSFFHRLEESFLVEEDKKHERHPIFGNIVDEVAYHEKYPTIYHLRKKLVDSTDKADLRLIYLALAHMIKFRGHFLIEGDLNPDNSDVDKLFIQLVQTYNQLFEENPINASGVDAKAILSARLSKSRRLENLIAQLPGEKKNGLFGNLIALSLGLTPNFKSNFDLAEDAKLQLSKDTYDDDLDNLLAQIGDQYADLFLAAKNLSDAILLSDILRVNTEITKAPLSASMIKRYDEHHQDLTLLKALVRQQLPEKYKEIFFDQSKNGYAGYIDGGASQEEFYKFIKPILEKMDGTEELLVKLNREDLLRKQRTFDNGSIPHQIHLGELHAILRRQEDFYPFLKDNREKIEKILTFRIPYYVGPLARGNSRFAWMTRKSEETITPWNFEEVVDKGASAQSFIERMTNFDKNLPNEKVLPKHSLLYEYFTVYNELTKVKYVTEGMRKPAFLSGEQKKAIVDLLFKTNRKVTVKQLKEDYFKKIECFDSVEISGVEDRFNASLGTYHDLLKIIKDKDFLDNEENEDILEDIVLTLTLFEDREMIEERLKTYAHLFDDKVMKQLKRRRYTGWGRLSRKLINGIRDKQSGKTILDFLKSDGFANRNFMQLIHDDSLTFKEDIQKAQVSGQGDSLHEHIANLAGSPAIKKGILQTVKVVDELVKVMGRHKPENIVIEMARENQTTQKGQKNSRERMKRIEEGIKELGSQILKEHPVENTQLQNEKLYLYYLQNGRDMYVDQELDINRLSDYDVDHIVPQSFLKDDSIDNKVLTRSDKARGKSDNVPSEEVVKKMKNYWRQLLNAKLITQRKFDNLTKAERGGLSELDKAGFIKRQLVETRQITKHVAQILDSRMNTKYDENDKLIREVKVITLKSKLVSDFRKDFQFYKVREINNYHHAHDAYLNAVVGTALIKKYPKLESEFVYGDYKVYDVRKMIAKSEQEIGKATAKYFFYSNIMNFFKTEITLANGEIRKRPLIETNGETGEIVWDKGRDFATVRKVLSMPQVNIVKKTEVQTGGFSKESILPKRNSDKLIARKKDWDPKKYGGFDSPTVAYSVLVVAKVEKGKSKKLKSVKELLGITIMERSSFEKNPIDFLEAKGYKEVKKDLIIKLPKYSLFELENGRKRMLASAGELQKGNELALPSKYVNFLYLASHYEKLKGSPEDNEQKQLFVEQHKHYLDEIIEQISEFSKRVILADANLDKVLSAYNKHRDKPIREQAENIIHLFTLTNLGAPAAFKYFDTTIDRKRYTSTKEVLDATLIHQSITGLYETRIDLSQLGGDGGGGGPAPEAAAKGGTVSLQDEHRLFDIPVTTSLPDVWLQDFPQAWAETGGLGRAKCQAPIIIDLKPTAVPVSIKQYPMSLEAHMGIRQHIIKFLELGVLRPCRSPWNTPLLPVKKPGTQDYRPVQDLREINKRTVDIHPTVPNPYNLLSTLKPDYSWYTVLDLKDAFFCLPLAPQSQELFAFEWKDPERGISGQLTWTRLPQGFKNSPTLFNEALHRDLTDFRTQHPEVTLLQYVDDLLLAAPTKKACTQGTRHLLQELGEKGYRASAKKAQICQTKVTYLGYILSEGKRWLTPGRIETVARIPPPRNPREVREFLGKAGFCRLFIPGFAELAAPLYALTKPSTPFTWQTEHQLAFEALKKALLSAPALGLPDTSKPFTLFLDERQGIAKGVLTQKLGPWKRPVAYLSKKLDPVAAGWPPCLRIMAATAMLVKDSAKLTLGQPLTVITPHTLEAIVRQPPDRWITNARLTHYQALLLDTDRVQFGPPVTLNPATLLPVPENQPSPHDCRQVLAETHGTREDLKDQELPDADHTWYTDGSSYLDSGTRRAGAAVVDGHNTIWAQSLPPGTSAQKAELIALTKALELSKGKKANIYTDSRYAFATAHTHGSIYERRGWLTSEGKEIKNKAEIIALLKALFLPQEVAIIHCPGHQKGQDPVAVGNRQADRVARQAAMAEVLTLATEPDNTSHITAGKRTADGSEFEKRTADGSEFESPKKKAKVE

SEQ ID NO: 1939 - protein, 2102 aa, synthetic construct
MPAAKRVKLDGGDKKYSIGLDIGTNSVGWAVITDEYKVPSKKFKVLGNTDRHSIKKNLIGALLFDSGETAEATRLKRTARRRYTRRKNRICYLQEIFSNEMAKVDDSFFHRLEESFLVEEDKKHERHPIFGNIVDEVAYHEKYPTIYHLRKKLVDSTDKADLRLIYLALAHMIKFRGHFLIEGDLNPDNSDVDKLFIQLVQTYNQLFEENPINASGVDAKAILSARLSKSRRLENLIAQLPGEKKNGLFGNLIALSLGLTPNFKSNFDLAEDAKLQLSKDTYDDDLDNLLAQIGDQYADLFLAAKNLSDAILLSDILRVNTEITKAPLSASMIKRYDEHHQDLTLLKALVRQQLPEKYKEIFFDQSKNGYAGYIDGGASQEEFYKFIKPILEKMDGTEELLVKLNREDLLRKQRTFDNGSIPHQIHLGELHAILRRQEDFYPFLKDNREKIEKILTFRIPYYVGPLARGNSRFAWMTRKSEETITPWNFEEVVDKGASAQSFIERMTNFDKNLPNEKVLPKHSLLYEYFTVYNELTKVKYVTEGMRKPAFLSGEQKKAIVDLLFKTNRKVTVKQLKEDYFKKIECFDSVEISGVEDRFNASLGTYHDLLKIIKDKDFLDNEENEDILEDIVLTLTLFEDREMIEERLKTYAHLFDDKVMKQLKRRRYTGWGRLSRKLINGIRDKQSGKTILDFLKSDGFANRNFMQLIHDDSLTFKEDIQKAQVSGQGDSLHEHIANLAGSPAIKKGILQTVKVVDELVKVMGRHKPENIVIEMARENQTTQKGQKNSRERMKRIEEGIKELGSQILKEHPVENTQLQNEKLYLYYLQNGRDMYVDQELDINRLSDYDVDHIVPQSFLKDDSIDNKVLTRSDKARGKSDNVPSEEVVKKMKNYWRQLLNAKLITQRKFDNLTKAERGGLSELDKAGFIKRQLVETRQITKHVAQILDSRMNTKYDENDKLIREVKVITLKSKLVSDFRKDFQFYKVREINNYHHAHDAYLNAVVGTALIKKYPKLESEFVYGDYKVYDVRKMIAKSEQEIGKATAKYFFYSNIMNFFKTEITLANGEIRKRPLIETNGETGEIVWDKGRDFATVRKVLSMPQVNIVKKTEVQTGGFSKESILPKRNSDKLIARKKDWDPKKYGGFDSPTVAYSVLVVAKVEKGKSKKLKSVKELLGITIMERSSFEKNPIDFLEAKGYKEVKKDLIIKLPKYSLFELENGRKRMLASAGELQKGNELALPSKYVNFLYLASHYEKLKGSPEDNEQKQLFVEQHKHYLDEIIEQISEFSKRVILADANLDKVLSAYNKHRDKPIREQAENIIHLFTLTNLGAPAAFKYFDTTIDRKRYTSTKEVLDATLIHQSITGLYETRIDLSQLGGDGGPAPGGSEAAAKGGTVSLQDEHRLFDIPVTTSLPDVWLQDFPQAWAETGGLGRAKCQAPIIIDLKPTAVPVSIKQYPMSLEAHMGIRQHIIKFLELGVLRPCRSPWNTPLLPVKKPGTQDYRPVQDLREINKRTVDIHPTVPNPYNLLSTLKPDYSWYTVLDLKDAFFCLPLAPQSQELFAFEWKDPERGISGQLTWTRLPQGFKNSPTLFNEALHRDLTDFRTQHPEVTLLQYVDDLLLAAPTKKACTQGTRHLLQELGEKGYRASAKKAQICQTKVTYLGYILSEGKRWLTPGRIETVARIPPPRNPREVREFLGKAGFCRLFIPGFAELAAPLYALTKPSTPFTWQTEHQLAFEALKKALLSAPALGLPDTSKPFTLFLDERQGIAKGVLTQKLGPWKRPVAYLSKKLDPVAAGWPPCLRIMAATAMLVKDSAKLTLGQPLTVITPHTLEAIVRQPPDRWITNARLTHYQALLLDTDRVQFGPPVTLNPATLLPVPENQPSPHDCRQVLAETHGTREDLKDQELPDADHTWYTDGSSYLDSGTRRAGAAVVDGHNTIWAQSLPPGTSAQKAELIALTKALELSKGKKANIYTDSRYAFATAHTHGSIYERRGWLTSEGKEIKNKAEIIALLKALFLPQEVAIIHCPGHQKGQDPVAVGNRQADRVARQAAMAEVLTLATEPDNTSHITAGKRTADGSEFEKRTADGSEFESPKKKAKVE

SEQ ID NO: 1940 - protein, 2097 aa, synthetic construct
MPAAKRVKLDGGDKKYSIGLDIGTNSVGWAVITDEYKVPSKKFKVLGNTDRHSIKKNLIGALLFDSGETAEATRLKRTARRRYTRRKNRICYLQEIFSNEMAKVDDSFFHRLEESFLVEEDKKHERHPIFGNIVDEVAYHEKYPTIYHLRKKLVDSTDKADLRLIYLALAHMIKFRGHFLIEGDLNPDNSDVDKLFIQLVQTYNQLFEENPINASGVDAKAILSARLSKSRRLENLIAQLPGEKKNGLFGNLIALSLGLTPNFKSNFDLAEDAKLQLSKDTYDDDLDNLLAQIGDQYADLFLAAKNLSDAILLSDILRVNTEITKAPLSASMIKRYDEHHQDLTLLKALVRQQLPEKYKEIFFDQSKNGYAGYIDGGASQEEFYKFIKPILEKMDGTEELLVKLNREDLLRKQRTFDNGSIPHQIHLGELHAILRRQEDFYPFLKDNREKIEKILTFRIPYYVGPLARGNSRFAWMTRKSEETITPWNFEEVVDKGASAQSFIERMTNFDKNLPNEKVLPKHSLLYEYFTVYNELTKVKYVTEGMRKPAFLSGEQKKAIVDLLFKTNRKVTVKQLKEDYFKKIECFDSVEISGVEDRFNASLGTYHDLLKIIKDKDFLDNEENEDILEDIVLTLTLFEDREMIEERLKTYAHLFDDKVMKQLKRRRYTGWGRLSRKLINGIRDKQSGKTILDFLKSDGFANRNFMQLIHDDSLTFKEDIQKAQVSGQGDSLHEHIANLAGSPAIKKGILQTVKVVDELVKVMGRHKPENIVIEMARENQTTQKGQKNSRERMKRIEEGIKELGSQILKEHPVENTQLQNEKLYLYYLQNGRDMYVDQELDINRLSDYDVDHIVPQSFLKDDSIDNKVLTRSDKARGKSDNVPSEEVVKKMKNYWRQLLNAKLITQRKFDNLTKAERGGLSELDKAGFIKRQLVETRQITKHVAQILDSRMNTKYDENDKLIREVKVITLKSKLVSDFRKDFQFYKVREINNYHHAHDAYLNAVVGTALIKKYPKLESEFVYGDYKVYDVRKMIAKSEQEIGKATAKYFFYSNIMNFFKTEITLANGEIRKRPLIETNGETGEIVWDKGRDFATVRKVLSMPQVNIVKKTEVQTGGFSKESILPKRNSDKLIARKKDWDPKKYGGFDSPTVAYSVLVVAKVEKGKSKKLKSVKELLGITIMERSSFEKNPIDFLEAKGYKEVKKDLIIKLPKYSLFELENGRKRMLASAGELQKGNELALPSKYVNFLYLASHYEKLKGSPEDNEQKQLFVEQHKHYLDEIIEQISEFSKRVILADANLDKVLSAYNKHRDKPIREQAENIIHLFTLTNLGAPAAFKYFDTTIDRKRYTSTKEVLDATLIHQSITGLYETRIDLSQLGGDGGGGSGGGGGTVSLQDEHRLFDIPVTTSLPDVWLQDFPQAWAETGGLGRAKCQAPIIIDLKPTAVPVSIKQYPMSLEAHMGIRQHIIKFLELGVLRPCRSPWNTPLLPVKKPGTQDYRPVQDLREINKRTVDIHPTVPNPYNLLSTLKPDYSWYTVLDLKDAFFCLPLAPQSQELFAFEWKDPERGISGQLTWTRLPQGFKNSPTLFNEALHRDLTDFRTQHPEVTLLQYVDDLLLAAPTKKACTQGTRHLLQELGEKGYRASAKKAQICQTKVTYLGYILSEGKRWLTPGRIETVARIPPPRNPREVREFLGKAGFCRLFIPGFAELAAPLYALTKPSTPFTWQTEHQLAFEALKKALLSAPALGLPDTSKPFTLFLDERQGIAKGVLTQKLGPWKRPVAYLSKKLDPVAAGWPPCLRIMAATAMLVKDSAKLTLGQPLTVITPHTLEAIVRQPPDRWITNARLTHYQALLLDTDRVQFGPPVTLNPATLLPVPENQPSPHDCRQVLAETHGTREDLKDQELPDADHTWYTDGSSYLDSGTRRAGAAVVDGHNTIWAQSLPPGTSAQKAELIALTKALELSKGKKANIYTDSRYAFATAHTHGSIYERRGWLTSEGKEIKNKAEIIALLKALFLPQEVAIIHCPGHQKGQDPVAVGNRQADRVARQAAMAEVLTLATEPDNTSHITAGKRTADGSEFEKRTADGSEFESPKKKAKVE

SEQ ID NO: 1941 - protein, 2111 aa, synthetic construct
MPAAKRVKLDGGDKKYSIGLDIGTNSVGWAVITDEYKVPSKKFKVLGNTDRHSIKKNLIGALLFDSGETAEATRLKRTARRRYTRRKNRICYLQEIFSNEMAKVDDSFFHRLEESFLVEEDKKHERHPIFGNIVDEVAYHEKYPTIYHLRKKLVDSTDKADLRLIYLALAHMIKFRGHFLIEGDLNPDNSDVDKLFIQLVQTYNQLFEENPINASGVDAKAILSARLSKSRRLENLIAQLPGEKKNGLFGNLIALSLGLTPNFKSNFDLAEDAKLQLSKDTYDDDLDNLLAQIGDQYADLFLAAKNLSDAILLSDILRVNTEITKAPLSASMIKRYDEHHQDLTLLKALVRQQLPEKYKEIFFDQSKNGYAGYIDGGASQEEFYKFIKPILEKMDGTEELLVKLNREDLLRKQRTFDNGSIPHQIHLGELHAILRRQEDFYPFLKDNREKIEKILTFRIPYYVGPLARGNSRFAWMTRKSEETITPWNFEEVVDKGASAQSFIERMTNFDKNLPNEKVLPKHSLLYEYFTVYNELTKVKYVTEGMRKPAFLSGEQKKAIVDLLFKTNRKVTVKQLKEDYFKKIECFDSVEISGVEDRFNASLGTYHDLLKIIKDKDFLDNEENEDILEDIVLTLTLFEDREMIEERLKTYAHLFDDKVMKQLKRRRYTGWGRLSRKLINGIRDKQSGKTILDFLKSDGFANRNFMQLIHDDSLTFKEDIQKAQVSGQGDSLHEHIANLAGSPAIKKGILQTVKVVDELVKVMGRHKPENIVIEMARENQTTQKGQKNSRERMKRIEEGIKELGSQILKEHPVENTQLQNEKLYLYYLQNGRDMYVDQELDINRLSDYDVDHIVPQSFLKDDSIDNKVLTRSDKARGKSDNVPSEEVVKKMKNYWRQLLNAKLITQRKFDNLTKAERGGLSELDKAGFIKRQLVETRQITKHVAQILDSRMNTKYDENDKLIREVKVITLKSKLVSDFRKDFQFYKVREINNYHHAHDAYLNAVVGTALIKKYPKLESEFVYGDYKVYDVRKMIAKSEQEIGKATAKYFFYSNIMNFFKTEITLANGEIRKRPLIETNGETGEIVWDKGRDFATVRKVLSMPQVNIVKKTEVQTGGFSKESILPKRNSDKLIARKKDWDPKKYGGFDSPTVAYSVLVVAKVEKGKSKKLKSVKELLGITIMERSSFEKNPIDFLEAKGYKEVKKDLIIKLPKYSLFELENGRKRMLASAGELQKGNELALPSKYVNFLYLASHYEKLKGSPEDNEQKQLFVEQHKHYLDEIIEQISEFSKRVILADANLDKVLSAYNKHRDKPIREQAENIIHLFTLTNLGAPAAFKYFDTTIDRKRYTSTKEVLDATLIHQSITGLYETRIDLSQLGGDGGEAAAKEAAAKEAAAKEAAAKGGTVSLQDEHRLFDIPVTTSLPDVWLQDFPQAWAETGGLGRAKCQAPIIIDLKPTAVPVSIKQYPMSLEAHMGIRQHIIKFLELGVLRPCRSPWNTPLLPVKKPGTQDYRPVQDLREINKRTVDIHPTVPNPYNLLSTLKPDYSWYTVLDLKDAFFCLPLAPQSQELFAFEWKDPERGISGQLTWTRLPQGFKNSPTLFNEALHRDLTDFRTQHPEVTLLQYVDDLLLAAPTKKACTQGTRHLLQELGEKGYRASAKKAQICQTKVTYLGYILSEGKRWLTPGRIETVARIPPPRNPREVREFLGKAGFCRLFIPGFAELAAPLYALTKPSTPFTWQTEHQLAFEALKKALLSAPALGLPDTSKPFTLFLDERQGIAKGVLTQKLGPWKRPVAYLSKKLDPVAAGWPPCLRIMAATAMLVKDSAKLTLGQPLTVITPHTLEAIVRQPPDRWITNARLTHYQALLLDTDRVQFGPPVTLNPATLLPVPENQPSPHDCRQVLAETHGTREDLKDQELPDADHTWYTDGSSYLDSGTRRAGAAVVDGHNTIWAQSLPPGTSAQKAELIALTKALELSKGKKANIYTDSRYAFATAHTHGSIYERRGWLTSEGKEIKNKAEIIALLKALFLPQEVAIIHCPGHQKGQDPVAVGNRQADRVARQAAMAEVLTLATEPDNTSHITAGKRTADGSEFEKRTADGSEFESPKKKAKVE

SEQ ID NO: 1942 - protein, 2100 aa, synthetic construct
MPAAKRVKLDGGDKKYSIGLDIGTNSVGWAVITDEYKVPSKKFKVLGNTDRHSIKKNLIGALLFDSGETAEATRLKRTARRRYTRRKNRICYLQEIFSNEMAKVDDSFFHRLEESFLVEEDKKHERHPIFGNIVDEVAYHEKYPTIYHLRKKLVDSTDKADLRLIYLALAHMIKFRGHFLIEGDLNPDNSDVDKLFIQLVQTYNQLFEENPINASGVDAKAILSARLSKSRRLENLIAQLPGEKKNGLFGNLIALSLGLTPNFKSNFDLAEDAKLQLSKDTYDDDLDNLLAQIGDQYADLFLAAKNLSDAILLSDILRVNTEITKAPLSASMIKRYDEHHQDLTLLKALVRQQLPEKYKEIFFDQSKNGYAGYIDGGASQEEFYKFIKPILEKMDGTEELLVKLNREDLLRKQRTFDNGSIPHQIHLGELHAILRRQEDFYPFLKDNREKIEKILTFRIPYYVGPLARGNSRFAWMTRKSEETITPWNFEEVVDKGASAQSFIERMTNFDKNLPNEKVLPKHSLLYEYFTVYNELTKVKYVTEGMRKPAFLSGEQKKAIVDLLFKTNRKVTVKQLKEDYFKKIECFDSVEISGVEDRFNASLGTYHDLLKIIKDKDFLDNEENEDILEDIVLTLTLFEDREMIEERLKTYAHLFDDKVMKQLKRRRYTGWGRLSRKLINGIRDKQSGKTILDFLKSDGFANRNFMQLIHDDSLTFKEDIQKAQVSGQGDSLHEHIANLAGSPAIKKGILQTVKVVDELVKVMGRHKPENIVIEMARENQTTQKGQKNSRERMKRIEEGIKELGSQILKEHPVENTQLQNEKLYLYYLQNGRDMYVDQELDINRLSDYDVDHIVPQSFLKDDSIDNKVLTRSDKARGKSDNVPSEEVVKKMKNYWRQLLNAKLITQRKFDNLTKAERGGLSELDKAGFIKRQLVETRQITKHVAQILDSRMNTKYDENDKLIREVKVITLKSKLVSDFRKDFQFYKVREINNYHHAHDAYLNAVVGTALIKKYPKLESEFVYGDYKVYDVRKMIAKSEQEIGKATAKYFFYSNIMNFFKTEITLANGEIRKRPLIETNGETGEIVWDKGRDFATVRKVLSMPQVNIVKKTEVQTGGFSKESILPKRNSDKLIARKKDWDPKKYGGFDSPTVAYSVLVVAKVEKGKSKKLKSVKELLGITIMERSSFEKNPIDFLEAKGYKEVKKDLIIKLPKYSLFELENGRKRMLASAGELQKGNELALPSKYVNFLYLASHYEKLKGSPEDNEQKQLFVEQHKHYLDEIIEQISEFSKRVILADANLDKVLSAYNKHRDKPIREQAENIIHLFTLTNLGAPAAFKYFDTTIDRKRYTSTKEVLDATLIHQSITGLYETRIDLSQLGGDGGGGSGGGPAPGGTVSLQDEHRLFDIPVTTSLPDVWLQDFPQAWAETGGLGRAKCQAPIIIDLKPTAVPVSIKQYPMSLEAHMGIRQHIIKFLELGVLRPCRSPWNTPLLPVKKPGTQDYRPVQDLREINKRTVDIHPTVPNPYNLLSTLKPDYSWYTVLDLKDAFFCLPLAPQSQELFAFEWKDPERGISGQLTWTRLPQGFKNSPTLFNEALHRDLTDFRTQHPEVTLLQYVDDLLLAAPTKKACTQGTRHLLQELGEKGYRASAKKAQICQTKVTYLGYILSEGKRWLTPGRIETVARIPPPRNPREVREFLGKAGFCRLFIPGFAELAAPLYALTKPSTPFTWQTEHQLAFEALKKALLSAPALGLPDTSKPFTLFLDERQGIAKGVLTQKLGPWKRPVAYLSKKLDPVAAGWPPCLRIMAATAMLVKDSAKLTLGQPLTVITPHTLEAIVRQPPDRWITNARLTHYQALLLDTDRVQFGPPVTLNPATLLPVPENQPSPHDCRQVLAETHGTREDLKDQELPDADHTWYTDGSSYLDSGTRRAGAAVVDGHNTIWAQSLPPGTSAQKAELIALTKALELSKGKKANIYTDSRYAFATAHTHGSIYERRGWLTSEGKEIKNKAEIIALLKALFLPQEVAIIHCPGHQKGQDPVAVGNRQADRVARQAAMAEVLTLATEPDNTSHITAGKRTADGSEFEKRTADGSEFESPKKKAKVE

SEQ ID NO: 1943 - protein, 2102 aa, synthetic construct
MPAAKRVKLDGGDKKYSIGLDIGTNSVGWAVITDEYKVPSKKFKVLGNTDRHSIKKNLIGALLFDSGETAEATRLKRTARRRYTRRKNRICYLQEIFSNEMAKVDDSFFHRLEESFLVEEDKKHERHPIFGNIVDEVAYHEKYPTIYHLRKKLVDSTDKADLRLIYLALAHMIKFRGHFLIEGDLNPDNSDVDKLFIQLVQTYNQLFEENPINASGVDAKAILSARLSKSRRLENLIAQLPGEKKNGLFGNLIALSLGLTPNFKSNFDLAEDAKLQLSKDTYDDDLDNLLAQIGDQYADLFLAAKNLSDAILLSDILRVNTEITKAPLSASMIKRYDEHHQDLTLLKALVRQQLPEKYKEIFFDQSKNGYAGYIDGGASQEEFYKFIKPILEKMDGTEELLVKLNREDLLRKQRTFDNGSIPHQIHLGELHAILRRQEDFYPFLKDNREKIEKILTFRIPYYVGPLARGNSRFAWMTRKSEETITPWNFEEVVDKGASAQSFIERMTNFDKNLPNEKVLPKHSLLYEYFTVYNELTKVKYVTEGMRKPAFLSGEQKKAIVDLLFKTNRKVTVKQLKEDYFKKIECFDSVEISGVEDRFNASLGTYHDLLKIIKDKDFLDNEENEDILEDIVLTLTLFEDREMIEERLKTYAHLFDDKVMKQLKRRRYTGWGRLSRKLINGIRDKQSGKTILDFLKSDGFANRNFMQLIHDDSLTFKEDIQKAQVSGQGDSLHEHIANLAGSPAIKKGILQTVKVVDELVKVMGRHKPENIVIEMARENQTTQKGQKNSRERMKRIEEGIKELGSQILKEHPVENTQLQNEKLYLYYLQNGRDMYVDQELDINRLSDYDVDHIVPQSFLKDDSIDNKVLTRSDKARGKSDNVPSEEVVKKMKNYWRQLLNAKLITQRKFDNLTKAERGGLSELDKAGFIKRQLVETRQITKHVAQILDSRMNTKYDENDKLIREVKVITLKSKLVSDFRKDFQFYKVREINNYHHAHDAYLNAVVGTALIKKYPKLESEFVYGDYKVYDVRKMIAKSEQEIGKATAKYFFYSNIMNFFKTEITLANGEIRKRPLIETNGETGEIVWDKGRDFATVRKVLSMPQVNIVKKTEVQTGGFSKESILPKRNSDKLIARKKDWDPKKYGGFDSPTVAYSVLVVAKVEKGKSKKLKSVKELLGITIMERSSFEKNPIDFLEAKGYKEVKKDLIIKLPKYSLFELENGRKRMLASAGELQKGNELALPSKYVNFLYLASHYEKLKGSPEDNEQKQLFVEQHKHYLDEIIEQISEFSKRVILADANLDKVLSAYNKHRDKPIREQAENIIHLFTLTNLGAPAAFKYFDTTIDRKRYTSTKEVLDATLIHQSITGLYETRIDLSQLGGDGGGGGEAAAKGGSGGTVSLQDEHRLFDIPVTTSLPDVWLQDFPQAWAETGGLGRAKCQAPIIIDLKPTAVPVSIKQYPMSLEAHMGIRQHIIKFLELGVLRPCRSPWNTPLLPVKKPGTQDYRPVQDLREINKRTVDIHPTVPNPYNLLSTLKPDYSWYTVLDLKDAFFCLPLAPQSQELFAFEWKDPERGISGQLTWTRLPQGFKNSPTLFNEALHRDLTDFRTQHPEVTLLQYVDDLLLAAPTKKACTQGTRHLLQELGEKGYRASAKKAQICQTKVTYLGYILSEGKRWLTPGRIETVARIPPPRNPREVREFLGKAGFCRLFIPGFAELAAPLYALTKPSTPFTWQTEHQLAFEALKKALLSAPALGLPDTSKPFTLFLDERQGIAKGVLTQKLGPWKRPVAYLSKKLDPVAAGWPPCLRIMAATAMLVKDSAKLTLGQPLTVITPHTLEAIVRQPPDRWITNARLTHYQALLLDTDRVQFGPPVTLNPATLLPVPENQPSPHDCRQVLAETHGTREDLKDQELPDADHTWYTDGSSYLDSGTRRAGAAVVDGHNTIWAQSLPPGTSAQKAELIALTKALELSKGKKANIYTDSRYAFATAHTHGSIYERRGWLTSEGKEIKNKAEIIALLKALFLPQEVAIIHCPGHQKGQDPVAVGNRQADRVARQAAMAEVLTLATEPDNTSHITAGKRTADGSEFEKRTADGSEFESPKKKAKVE

SEQ ID NO: 1944 - protein, 2116 aa, synthetic construct
MPAAKRVKLDGGDKKYSIGLDIGTNSVGWAVITDEYKVPSKKFKVLGNTDRHSIKKNLIGALLFDSGETAEATRLKRTARRRYTRRKNRICYLQEIFSNEMAKVDDSFFHRLEESFLVEEDKKHERHPIFGNIVDEVAYHEKYPTIYHLRKKLVDSTDKADLRLIYLALAHMIKFRGHFLIEGDLNPDNSDVDKLFIQLVQTYNQLFEENPINASGVDAKAILSARLSKSRRLENLIAQLPGEKKNGLFGNLIALSLGLTPNFKSNFDLAEDAKLQLSKDTYDDDLDNLLAQIGDQYADLFLAAKNLSDAILLSDILRVNTEITKAPLSASMIKRYDEHHQDLTLLKALVRQQLPEKYKEIFFDQSKNGYAGYIDGGASQEEFYKFIKPILEKMDGTEELLVKLNREDLLRKQRTFDNGSIPHQIHLGELHAILRRQEDFYPFLKDNREKIEKILTFRIPYYVGPLARGNSRFAWMTRKSEETITPWNFEEVVDKGASAQSFIERMTNFDKNLPNEKVLPKHSLLYEYFTVYNELTKVKYVTEGMRKPAFLSGEQKKAIVDLLFKTNRKVTVKQLKEDYFKKIECFDSVEISGVEDRFNASLGTYHDLLKIIKDKDFLDNEENEDILEDIVLTLTLFEDREMIEERLKTYAHLFDDKVMKQLKRRRYTGWGRLSRKLINGIRDKQSGKTILDFLKSDGFANRNFMQLIHDDSLTFKEDIQKAQVSGQGDSLHEHIANLAGSPAIKKGILQTVKVVDELVKVMGRHKPENIVIEMARENQTTQKGQKNSRERMKRIEEGIKELGSQILKEHPVENTQLQNEKLYLYYLQNGRDMYVDQELDINRLSDYDVDHIVPQSFLKDDSIDNKVLTRSDKARGKSDNVPSEEVVKKMKNYWRQLLNAKLITQRKFDNLTKAERGGLSELDKAGFIKRQLVETRQITKHVAQILDSRMNTKYDENDKLIREVKVITLKSKLVSDFRKDFQFYKVREINNYHHAHDAYLNAVVGTALIKKYPKLESEFVYGDYKVYDVRKMIAKSEQEIGKATAKYFFYSNIMNFFKTEITLANGEIRKRPLIETNGETGEIVWDKGRDFATVRKVLSMPQVNIVKKTEVQTGGFSKESILPKRNSDKLIARKKDWDPKKYGGFDSPTVAYSVLVVAKVEKGKSKKLKSVKELLGITIMERSSFEKNPIDFLEAKGYKEVKKDLIIKLPKYSLFELENGRKRMLASAGELQKGNELALPSKYVNFLYLASHYEKLKGSPEDNEQKQLFVEQHKHYLDEIIEQISEFSKRVILADANLDKVLSAYNKHRDKPIREQAENIIHLFTLTNLGAPAAFKYFDTTIDRKRYTSTKEVLDATLIHQSITGLYETRIDLSQLGGDGGGGGGSGGGGSGGGGSGGGGSGGGGSGGTVSLQDEHRLFDIPVTTSLPDVWLQDFPQAWAETGGLGRAKCQAPIIIDLKPTAVPVSIKQYPMSLEAHMGIRQHIIKFLELGVLRPCRSPWNTPLLPVKKPGTQDYRPVQDLREINKRTVDIHPTVPNPYNLLSTLKPDYSWYTVLDLKDAFFCLPLAPQSQELFAFEWKDPERGISGQLTWTRLPQGFKNSPTLFNEALHRDLTDFRTQHPEVTLLQYVDDLLLAAPTKKACTQGTRHLLQELGEKGYRASAKKAQICQTKVTYLGYILSEGKRWLTPGRIETVARIPPPRNPREVREFLGKAGFCRLFIPGFAELAAPLYALTKPSTPFTWQTEHQLAFEALKKALLSAPALGLPDTSKPFTLFLDERQGIAKGVLTQKLGPWKRPVAYLSKKLDPVAAGWPPCLRIMAATAMLVKDSAKLTLGQPLTVITPHTLEAIVRQPPDRWITNARLTHYQALLLDTDRVQFGPPVTLNPATLLPVPENQPSPHDCRQVLAETHGTREDLKDQELPDADHTWYTDGSSYLDSGTRRAGAAVVDGHNTIWAQSLPPGTSAQKAELIALTKALELSKGKKANIYTDSRYAFATAHTHGSIYERRGWLTSEGKEIKNKAEIIALLKALFLPQEVAIIHCPGHQKGQDPVAVGNRQADRVARQAAMAEVLTLATEPDNTSHITAGKRTADGSEFEKRTADGSEFESPKKKAKVE

SEQ ID NO: 1945 - protein, 2096 aa, synthetic construct
MPAAKRVKLDGGDKKYSIGLDIGTNSVGWAVITDEYKVPSKKFKVLGNTDRHSIKKNLIGALLFDSGETAEATRLKRTARRRYTRRKNRICYLQEIFSNEMAKVDDSFFHRLEESFLVEEDKKHERHPIFGNIVDEVAYHEKYPTIYHLRKKLVDSTDKADLRLIYLALAHMIKFRGHFLIEGDLNPDNSDVDKLFIQLVQTYNQLFEENPINASGVDAKAILSARLSKSRRLENLIAQLPGEKKNGLFGNLIALSLGLTPNFKSNFDLAEDAKLQLSKDTYDDDLDNLLAQIGDQYADLFLAAKNLSDAILLSDILRVNTEITKAPLSASMIKRYDEHHQDLTLLKALVRQQLPEKYKEIFFDQSKNGYAGYIDGGASQEEFYKFIKPILEKMDGTEELLVKLNREDLLRKQRTFDNGSIPHQIHLGELHAILRRQEDFYPFLKDNREKIEKILTFRIPYYVGPLARGNSRFAWMTRKSEETITPWNFEEVVDKGASAQSFIERMTNFDKNLPNEKVLPKHSLLYEYFTVYNELTKVKYVTEGMRKPAFLSGEQKKAIVDLLFKTNRKVTVKQLKEDYFKKIECFDSVEISGVEDRFNASLGTYHDLLKIIKDKDFLDNEENEDILEDIVLTLTLFEDREMIEERLKTYAHLFDDKVMKQLKRRRYTGWGRLSRKLINGIRDKQSGKTILDFLKSDGFANRNFMQLIHDDSLTFKEDIQKAQVSGQGDSLHEHIANLAGSPAIKKGILQTVKVVDELVKVMGRHKPENIVIEMARENQTTQKGQKNSRERMKRIEEGIKELGSQILKEHPVENTQLQNEKLYLYYLQNGRDMYVDQELDINRLSDYDVDHIVPQSFLKDDSIDNKVLTRSDKARGKSDNVPSEEVVKKMKNYWRQLLNAKLITQRKFDNLTKAERGGLSELDKAGFIKRQLVETRQITKHVAQILDSRMNTKYDENDKLIREVKVITLKSKLVSDFRKDFQFYKVREINNYHHAHDAYLNAVVGTALIKKYPKLESEFVYGDYKVYDVRKMIAKSEQEIGKATAKYFFYSNIMNFFKTEITLANGEIRKRPLIETNGETGEIVWDKGRDFATVRKVLSMPQVNIVKKTEVQTGGFSKESILPKRNSDKLIARKKDWDPKKYGGFDSPTVAYSVLVVAKVEKGKSKKLKSVKELLGITIMERSSFEKNPIDFLEAKGYKEVKKDLIIKLPKYSLFELENGRKRMLASAGELQKGNELALPSKYVNFLYLASHYEKLKGSPEDNEQKQLFVEQHKHYLDEIIEQISEFSKRVILADANLDKVLSAYNKHRDKPIREQAENIIHLFTLTNLGAPAAFKYFDTTIDRKRYTSTKEVLDATLIHQSITGLYETRIDLSQLGGDGGPAPAPGGTVSLQDEHRLFDIPVTTSLPDVWLQDFPQAWAETGGLGRAKCQAPIIIDLKPTAVPVSIKQYPMSLEAHMGIRQHIIKFLELGVLRPCRSPWNTPLLPVKKPGTQDYRPVQDLREINKRTVDIHPTVPNPYNLLSTLKPDYSWYTVLDLKDAFFCLPLAPQSQELFAFEWKDPERGISGQLTWTRLPQGFKNSPTLFNEALHRDLTDFRTQHPEVTLLQYVDDLLLAAPTKKACTQGTRHLLQELGEKGYRASAKKAQICQTKVTYLGYILSEGKRWLTPGRIETVARIPPPRNPREVREFLGKAGFCRLFIPGFAELAAPLYALTKPSTPFTWQTEHQLAFEALKKALLSAPALGLPDTSKPFTLFLDERQGIAKGVLTQKLGPWKRPVAYLSKKLDPVAAGWPPCLRIMAATAMLVKDSAKLTLGQPLTVITPHTLEAIVRQPPDRWITNARLTHYQALLLDTDRVQFGPPVTLNPATLLPVPENQPSPHDCRQVLAETHGTREDLKDQELPDADHTWYTDGSSYLDSGTRRAGAAVVDGHNTIWAQSLPPGTSAQKAELIALTKALELSKGKKANIYTDSRYAFATAHTHGSIYERRGWLTSEGKEIKNKAEIIALLKALFLPQEVAIIHCPGHQKGQDPVAVGNRQADRVARQAAMAEVLTLATEPDNTSHITAGKRTADGSEFEKRTADGSEFESPKKKAKVE

SEQ ID NO: 1946 - protein, 2116 aa, synthetic construct
MPAAKRVKLDGGDKKYSIGLDIGTNSVGWAVITDEYKVPSKKFKVLGNTDRHSIKKNLIGALLFDSGETAEATRLKRTARRRYTRRKNRICYLQEIFSNEMAKVDDSFFHRLEESFLVEEDKKHERHPIFGNIVDEVAYHEKYPTIYHLRKKLVDSTDKADLRLIYLALAHMIKFRGHFLIEGDLNPDNSDVDKLFIQLVQTYNQLFEENPINASGVDAKAILSARLSKSRRLENLIAQLPGEKKNGLFGNLIALSLGLTPNFKSNFDLAEDAKLQLSKDTYDDDLDNLLAQIGDQYADLFLAAKNLSDAILLSDILRVNTEITKAPLSASMIKRYDEHHQDLTLLKALVRQQLPEKYKEIFFDQSKNGYAGYIDGGASQEEFYKFIKPILEKMDGTEELLVKLNREDLLRKQRTFDNGSIPHQIHLGELHAILRRQEDFYPFLKDNREKIEKILTFRIPYYVGPLARGNSRFAWMTRKSEETITPWNFEEVVDKGASAQSFIERMTNFDKNLPNEKVLPKHSLLYEYFTVYNELTKVKYVTEGMRKPAFLSGEQKKAIVDLLFKTNRKVTVKQLKEDYFKKIECFDSVEISGVEDRFNASLGTYHDLLKIIKDKDFLDNEENEDILEDIVLTLTLFEDREMIEERLKTYAHLFDDKVMKQLKRRRYTGWGRLSRKLINGIRDKQSGKTILDFLKSDGFANRNFMQLIHDDSLTFKEDIQKAQVSGQGDSLHEHIANLAGSPAIKKGILQTVKVVDELVKVMGRHKPENIVIEMARENQTTQKGQKNSRERMKRIEEGIKELGSQILKEHPVENTQLQNEKLYLYYLQNGRDMYVDQELDINRLSDYDVDHIVPQSFLKDDSIDNKVLTRSDKARGKSDNVPSEEVVKKMKNYWRQLLNAKLITQRKFDNLTKAERGGLSELDKAGFIKRQLVETRQITKHVAQILDSRMNTKYDENDKLIREVKVITLKSKLVSDFRKDFQFYKVREINNYHHAHDAYLNAVVGTALIKKYPKLESEFVYGDYKVYDVRKMIAKSEQEIGKATAKYFFYSNIMNFFKTEITLANGEIRKRPLIETNGETGEIVWDKGRDFATVRKVLSMPQVNIVKKTEVQTGGFSKESILPKRNSDKLIARKKDWDPKKYGGFDSPTVAYSVLVVAKVEKGKSKKLKSVKELLGITIMERSSFEKNPIDFLEAKGYKEVKKDLIIKLPKYSLFELENGRKRMLASAGELQKGNELALPSKYVNFLYLASHYEKLKGSPEDNEQKQLFVEQHKHYLDEIIEQISEFSKRVILADANLDKVLSAYNKHRDKPIREQAENIIHLFTLTNLGAPAAFKYFDTTIDRKRYTSTKEVLDATLIHQSITGLYETRIDLSQLGGDGGEAAAKEAAAKEAAAKEAAAKEAAAKGGTVSLQDEHRLFDIPVTTSLPDVWLQDFPQAWAETGGLGRAKCQAPIIIDLKPTAVPVSIKQYPMSLEAHMGIRQHIIKFLELGVLRPCRSPWNTPLLPVKKPGTQDYRPVQDLREINKRTVDIHPTVPNPYNLLSTLKPDYSWYTVLDLKDAFFCLPLAPQSQELFAFEWKDPERGISGQLTWTRLPQGFKNSPTLFNEALHRDLTDFRTQHPEVTLLQYVDDLLLAAPTKKACTQGTRHLLQELGEKGYRASAKKAQICQTKVTYLGYILSEGKRWLTPGRIETVARIPPPRNPREVREFLGKAGFCRLFIPGFAELAAPLYALTKPSTPFTWQTEHQLAFEALKKALLSAPALGLPDTSKPFTLFLDERQGIAKGVLTQKLGPWKRPVAYLSKKLDPVAAGWPPCLRIMAATAMLVKDSAKLTLGQPLTVITPHTLEAIVRQPPDRWITNARLTHYQALLLDTDRVQFGPPVTLNPATLLPVPENQPSPHDCRQVLAETHGTREDLKDQELPDADHTWYTDGSSYLDSGTRRAGAAVVDGHNTIWAQSLPPGTSAQKAELIALTKALELSKGKKANIYTDSRYAFATAHTHGSIYERRGWLTSEGKEIKNKAEIIALLKALFLPQEVAIIHCPGHQKGQDPVAVGNRQADRVARQAAMAEVLTLATEPDNTSHITAGKRTADGSEFEKRTADGSEFESPKKKAKVE

SEQ ID NO: 1947 - protein, 2106 aa, synthetic construct
MPAAKRVKLDGGDKKYSIGLDIGTNSVGWAVITDEYKVPSKKFKVLGNTDRHSIKKNLIGALLFDSGETAEATRLKRTARRRYTRRKNRICYLQEIFSNEMAKVDDSFFHRLEESFLVEEDKKHERHPIFGNIVDEVAYHEKYPTIYHLRKKLVDSTDKADLRLIYLALAHMIKFRGHFLIEGDLNPDNSDVDKLFIQLVQTYNQLFEENPINASGVDAKAILSARLSKSRRLENLIAQLPGEKKNGLFGNLIALSLGLTPNFKSNFDLAEDAKLQLSKDTYDDDLDNLLAQIGDQYADLFLAAKNLSDAILLSDILRVNTEITKAPLSASMIKRYDEHHQDLTLLKALVRQQLPEKYKEIFFDQSKNGYAGYIDGGASQEEFYKFIKPILEKMDGTEELLVKLNREDLLRKQRTFDNGSIPHQIHLGELHAILRRQEDFYPFLKDNREKIEKILTFRIPYYVGPLARGNSRFAWMTRKSEETITPWNFEEVVDKGASAQSFIERMTNFDKNLPNEKVLPKHSLLYEYFTVYNELTKVKYVTEGMRKPAFLSGEQKKAIVDLLFKTNRKVTVKQLKEDYFKKIECFDSVEISGVEDRFNASLGTYHDLLKIIKDKDFLDNEENEDILEDIVLTLTLFEDREMIEERLKTYAHLFDDKVMKQLKRRRYTGWGRLSRKLINGIRDKQSGKTILDFLKSDGFANRNFMQLIHDDSLTFKEDIQKAQVSGQGDSLHEHIANLAGSPAIKKGILQTVKVVDELVKVMGRHKPENIVIEMARENQTTQKGQKNSRERMKRIEEGIKELGSQILKEHPVENTQLQNEKLYLYYLQNGRDMYVDQELDINRLSDYDVDHIVPQSFLKDDSIDNKVLTRSDKARGKSDNVPSEEVVKKMKNYWRQLLNAKLITQRKFDNLTKAERGGLSELDKAGFIKRQLVETRQITKHVAQILDSRMNTKYDENDKLIREVKVITLKSKLVSDFRKDFQFYKVREINNYHHAHDAYLNAVVGTALIKKYPKLESEFVYGDYKVYDVRKMIAKSEQEIGKATAKYFFYSNIMNFFKTEITLANGEIRKRPLIETNGETGEIVWDKGRDFATVRKVLSMPQVNIVKKTEVQTGGFSKESILPKRNSDKLIARKKDWDPKKYGGFDSPTVAYSVLVVAKVEKGKSKKLKSVKELLGITIMERSSFEKNPIDFLEAKGYKEVKKDLIIKLPKYSLFELENGRKRMLASAGELQKGNELALPSKYVNFLYLASHYEKLKGSPEDNEQKQLFVEQHKHYLDEIIEQISEFSKRVILADANLDKVLSAYNKHRDKPIREQAENIIHLFTLTNLGAPAAFKYFDTTIDRKRYTSTKEVLDATLIHQSITGLYETRIDLSQLGGDGGEAAAKGGGGSEAAAKGGTVSLQDEHRLFDIPVTTSLPDVWLQDFPQAWAETGGLGRAKCQAPIIIDLKPTAVPVSIKQYPMSLEAHMGIRQHIIKFLELGVLRPCRSPWNTPLLPVKKPGTQDYRPVQDLREINKRTVDIHPTVPNPYNLLSTLKPDYSWYTVLDLKDAFFCLPLAPQSQELFAFEWKDPERGISGQLTWTRLPQGFKNSPTLFNEALHRDLTDFRTQHPEVTLLQYVDDLLLAAPTKKACTQGTRHLLQELGEKGYRASAKKAQICQTKVTYLGYILSEGKRWLTPGRIETVARIPPPRNPREVREFLGKAGFCRLFIPGFAELAAPLYALTKPSTPFTWQTEHQLAFEALKKALLSAPALGLPDTSKPFTLFLDERQGIAKGVLTQKLGPWKRPVAYLSKKLDPVAAGWPPCLRIMAATAMLVKDSAKLTLGQPLTVITPHTLEAIVRQPPDRWITNARLTHYQALLLDTDRVQFGPPVTLNPATLLPVPENQPSPHDCRQVLAETHGTREDLKDQELPDADHTWYTDGSSYLDSGTRRAGAAVVDGHNTIWAQSLPPGTSAQKAELIALTKALELSKGKKANIYTDSRYAFATAHTHGSIYERRGWLTSEGKEIKNKAEIIALLKALFLPQEVAIIHCPGHQKGQDPVAVGNRQADRVARQAAMAEVLTLATEPDNTSHITAGKRTADGSEFEKRTADGSEFESPKKKAKVE

SEQ ID NO: 1948 - protein, 2106 aa, synthetic construct
MPAAKRVKLDGGDKKYSIGLDIGTNSVGWAVITDEYKVPSKKFKVLGNTDRHSIKKNLIGALLFDSGETAEATRLKRTARRRYTRRKNRICYLQEIFSNEMAKVDDSFFHRLEESFLVEEDKKHERHPIFGNIVDEVAYHEKYPTIYHLRKKLVDSTDKADLRLIYLALAHMIKFRGHFLIEGDLNPDNSDVDKLFIQLVQTYNQLFEENPINASGVDAKAILSARLSKSRRLENLIAQLPGEKKNGLFGNLIALSLGLTPNFKSNFDLAEDAKLQLSKDTYDDDLDNLLAQIGDQYADLFLAAKNLSDAILLSDILRVNTEITKAPLSASMIKRYDEHHQDLTLLKALVRQQLPEKYKEIFFDQSKNGYAGYIDGGASQEEFYKFIKPILEKMDGTEELLVKLNREDLLRKQRTFDNGSIPHQIHLGELHAILRRQEDFYPFLKDNREKIEKILTFRIPYYVGPLARGNSRFAWMTRKSEETITPWNFEEVVDKGASAQSFIERMTNFDKNLPNEKVLPKHSLLYEYFTVYNELTKVKYVTEGMRKPAFLSGEQKKAIVDLLFKTNRKVTVKQLKEDYFKKIECFDSVEISGVEDRFNASLGTYHDLLKIIKDKDFLDNEENEDILEDIVLTLTLFEDREMIEERLKTYAHLFDDKVMKQLKRRRYTGWGRLSRKLINGIRDKQSGKTILDFLKSDGFANRNFMQLIHDDSLTFKEDIQKAQVSGQGDSLHEHIANLAGSPAIKKGILQTVKVVDELVKVMGRHKPENIVIEMARENQTTQKGQKNSRERMKRIEEGIKELGSQILKEHPVENTQLQNEKLYLYYLQNGRDMYVDQELDINRLSDYDVDHIVPQSFLKDDSIDNKVLTRSDKARGKSDNVPSEEVVKKMKNYWRQLLNAKLITQRKFDNLTKAERGGLSELDKAGFIKRQLVETRQITKHVAQILDSRMNTKYDENDKLIREVKVITLKSKLVSDFRKDFQFYKVREINNYHHAHDAYLNAVVGTALIKKYPKLESEFVYGDYKVYDVRKMIAKSEQEIGKATAKYFFYSNIMNFFKTEITLANGEIRKRPLIETNGETGEIVWDKGRDFATVRKVLSMPQVNIVKKTEVQTGGFSKESILPKRNSDKLIARKKDWDPKKYGGFDSPTVAYSVLVVAKVEKGKSKKLKSVKELLGITIMERSSFEKNPIDFLEAKGYKEVKKDLIIKLPKYSLFELENGRKRMLASAGELQKGNELALPSKYVNFLYLASHYEKLKGSPEDNEQKQLFVEQHKHYLDEIIEQISEFSKRVILADANLDKVLSAYNKHRDKPIREQAENIIHLFTLTNLGAPAAFKYFDTTIDRKRYTSTKEVLDATLIHQSITGLYETRIDLSQLGGDGGGSSGSSGSSGSSGSSGGTVSLQDEHRLFDIPVTTSLPDVWLQDFPQAWAETGGLGRAKCQAPIIIDLKPTAVPVSIKQYPMSLEAHMGIRQHIIKFLELGVLRPCRSPWNTPLLPVKKPGTQDYRPVQDLREINKRTVDIHPTVPNPYNLLSTLKPDYSWYTVLDLKDAFFCLPLAPQSQELFAFEWKDPERGISGQLTWTRLPQGFKNSPTLFNEALHRDLTDFRTQHPEVTLLQYVDDLLLAAPTKKACTQGTRHLLQELGEKGYRASAKKAQICQTKVTYLGYILSEGKRWLTPGRIETVARIPPPRNPREVREFLGKAGFCRLFIPGFAELAAPLYALTKPSTPFTWQTEHQLAFEALKKALLSAPALGLPDTSKPFTLFLDERQGIAKGVLTQKLGPWKRPVAYLSKKLDPVAAGWPPCLRIMAATAMLVKDSAKLTLGQPLTVITPHTLEAIVRQPPDRWITNARLTHYQALLLDTDRVQFGPPVTLNPATLLPVPENQPSPHDCRQVLAETHGTREDLKDQELPDADHTWYTDGSSYLDSGTRRAGAAVVDGHNTIWAQSLPPGTSAQKAELIALTKALELSKGKKANIYTDSRYAFATAHTHGSIYERRGWLTSEGKEIKNKAEIIALLKALFLPQEVAIIHCPGHQKGQDPVAVGNRQADRVARQAAMAEVLTLATEPDNTSHITAGKRTADGSEFEKRTADGSEFESPKKKAKVE

SEQ ID NO: 1949 - protein, 2106 aa, synthetic construct
MPAAKRVKLDGGDKKYSIGLDIGTNSVGWAVITDEYKVPSKKFKVLGNTDRHSIKKNLIGALLFDSGETAEATRLKRTARRRYTRRKNRICYLQEIFSNEMAKVDDSFFHRLEESFLVEEDKKHERHPIFGNIVDEVAYHEKYPTIYHLRKKLVDSTDKADLRLIYLALAHMIKFRGHFLIEGDLNPDNSDVDKLFIQLVQTYNQLFEENPINASGVDAKAILSARLSKSRRLENLIAQLPGEKKNGLFGNLIALSLGLTPNFKSNFDLAEDAKLQLSKDTYDDDLDNLLAQIGDQYADLFLAAKNLSDAILLSDILRVNTEITKAPLSASMIKRYDEHHQDLTLLKALVRQQLPEKYKEIFFDQSKNGYAGYIDGGASQEEFYKFIKPILEKMDGTEELLVKLNREDLLRKQRTFDNGSIPHQIHLGELHAILRRQEDFYPFLKDNREKIEKILTFRIPYYVGPLARGNSRFAWMTRKSEETITPWNFEEVVDKGASAQSFIERMTNFDKNLPNEKVLPKHSLLYEYFTVYNELTKVKYVTEGMRKPAFLSGEQKKAIVDLLFKTNRKVTVKQLKEDYFKKIECFDSVEISGVEDRFNASLGTYHDLLKIIKDKDFLDNEENEDILEDIVLTLTLFEDREMIEERLKTYAHLFDDKVMKQLKRRRYTGWGRLSRKLINGIRDKQSGKTILDFLKSDGFANRNFMQLIHDDSLTFKEDIQKAQVSGQGDSLHEHIANLAGSPAIKKGILQTVKVVDELVKVMGRHKPENIVIEMARENQTTQKGQKNSRERMKRIEEGIKELGSQILKEHPVENTQLQNEKLYLYYLQNGRDMYVDQELDINRLSDYDVDHIVPQSFLKDDSIDNKVLTRSDKARGKSDNVPSEEVVKKMKNYWRQLLNAKLITQRKFDNLTKAERGGLSELDKAGFIKRQLVETRQITKHVAQILDSRMNTKYDENDKLIREVKVITLKSKLVSDFRKDFQFYKVREINNYHHAHDAYLNAVVGTALIKKYPKLESEFVYGDYKVYDVRKMIAKSEQEIGKATAKYFFYSNIMNFFKTEITLANGEIRKRPLIETNGETGEIVWDKGRDFATVRKVLSMPQVNIVKKTEVQTGGFSKESILPKRNSDKLIARKKDWDPKKYGGFDSPTVAYSVLVVAKVEKGKSKKLKSVKELLGITIMERSSFEKNPIDFLEAKGYKEVKKDLIIKLPKYSLFELENGRKRMLASAGELQKGNELALPSKYVNFLYLASHYEKLKGSPEDNEQKQLFVEQHKHYLDEIIEQISEFSKRVILADANLDKVLSAYNKHRDKPIREQAENIIHLFTLTNLGAPAAFKYFDTTIDRKRYTSTKEVLDATLIHQSITGLYETRIDLSQLGGDGGGGGGSEAAAKGGGGSGGTVSLQDEHRLFDIPVTTSLPDVWLQDFPQAWAETGGLGRAKCQAPIIIDLKPTAVPVSIKQYPMSLEAHMGIRQHIIKFLELGVLRPCRSPWNTPLLPVKKPGTQDYRPVQDLREINKRTVDIHPTVPNPYNLLSTLKPDYSWYTVLDLKDAFFCLPLAPQSQELFAFEWKDPERGISGQLTWTRLPQGFKNSPTLFNEALHRDLTDFRTQHPEVTLLQYVDDLLLAAPTKKACTQGTRHLLQELGEKGYRASAKKAQICQTKVTYLGYILSEGKRWLTPGRIETVARIPPPRNPREVREFLGKAGFCRLFIPGFAELAAPLYALTKPSTPFTWQTEHQLAFEALKKALLSAPALGLPDTSKPFTLFLDERQGIAKGVLTQKLGPWKRPVAYLSKKLDPVAAGWPPCLRIMAATAMLVKDSAKLTLGQPLTVITPHTLEAIVRQPPDRWITNARLTHYQALLLDTDRVQFGPPVTLNPATLLPVPENQPSPHDCRQVLAETHGTREDLKDQELPDADHTWYTDGSSYLDSGTRRAGAAVVDGHNTIWAQSLPPGTSAQKAELIALTKALELSKGKKANIYTDSRYAFATAHTHGSIYERRGWLTSEGKEIKNKAEIIALLKALFLPQEVAIIHCPGHQKGQDPVAVGNRQADRVARQAAMAEVLTLATEPDNTSHITAGKRTADGSEFEKRTADGSEFESPKKKAKVE

SEQ ID NO: 1950 - protein, 2097 aa, synthetic construct
MPAAKRVKLDGGDKKYSIGLDIGTNSVGWAVITDEYKVPSKKFKVLGNTDRHSIKKNLIGALLFDSGETAEATRLKRTARRRYTRRKNRICYLQEIFSNEMAKVDDSFFHRLEESFLVEEDKKHERHPIFGNIVDEVAYHEKYPTIYHLRKKLVDSTDKADLRLIYLALAHMIKFRGHFLIEGDLNPDNSDVDKLFIQLVQTYNQLFEENPINASGVDAKAILSARLSKSRRLENLIAQLPGEKKNGLFGNLIALSLGLTPNFKSNFDLAEDAKLQLSKDTYDDDLDNLLAQIGDQYADLFLAAKNLSDAILLSDILRVNTEITKAPLSASMIKRYDEHHQDLTLLKALVRQQLPEKYKEIFFDQSKNGYAGYIDGGASQEEFYKFIKPILEKMDGTEELLVKLNREDLLRKQRTFDNGSIPHQIHLGELHAILRRQEDFYPFLKDNREKIEKILTFRIPYYVGPLARGNSRFAWMTRKSEETITPWNFEEVVDKGASAQSFIERMTNFDKNLPNEKVLPKHSLLYEYFTVYNELTKVKYVTEGMRKPAFLSGEQKKAIVDLLFKTNRKVTVKQLKEDYFKKIECFDSVEISGVEDRFNASLGTYHDLLKIIKDKDFLDNEENEDILEDIVLTLTLFEDREMIEERLKTYAHLFDDKVMKQLKRRRYTGWGRLSRKLINGIRDKQSGKTILDFLKSDGFANRNFMQLIHDDSLTFKEDIQKAQVSGQGDSLHEHIANLAGSPAIKKGILQTVKVVDELVKVMGRHKPENIVIEMARENQTTQKGQKNSRERMKRIEEGIKELGSQILKEHPVENTQLQNEKLYLYYLQNGRDMYVDQELDINRLSDYDVDHIVPQSFLKDDSIDNKVLTRSDKARGKSDNVPSEEVVKKMKNYWRQLLNAKLITQRKFDNLTKAERGGLSELDKAGFIKRQLVETRQITKHVAQILDSRMNTKYDENDKLIREVKVITLKSKLVSDFRKDFQFYKVREINNYHHAHDAYLNAVVGTALIKKYPKLESEFVYGDYKVYDVRKMIAKSEQEIGKATAKYFFYSNIMNFFKTEITLANGEIRKRPLIETNGETGEIVWDKGRDFATVRKVLSMPQVNIVKKTEVQTGGFSKESILPKRNSDKLIARKKDWDPKKYGGFDSPTVAYSVLVVAKVEKGKSKKLKSVKELLGITIMERSSFEKNPIDFLEAKGYKEVKKDLIIKLPKYSLFELENGRKRMLASAGELQKGNELALPSKYVNFLYLASHYEKLKGSPEDNEQKQLFVEQHKHYLDEIIEQISEFSKRVILADANLDKVLSAYNKHRDKPIREQAENIIHLFTLTNLGAPAAFKYFDTTIDRKRYTSTKEVLDATLIHQSITGLYETRIDLSQLGGDGGGGGGSSGGTVSLQDEHRLFDIPVTTSLPDVWLQDFPQAWAETGGLGRAKCQAPIIIDLKPTAVPVSIKQYPMSLEAHMGIRQHIIKFLELGVLRPCRSPWNTPLLPVKKPGTQDYRPVQDLREINKRTVDIHPTVPNPYNLLSTLKPDYSWYTVLDLKDAFFCLPLAPQSQELFAFEWKDPERGISGQLTWTRLPQGFKNSPTLFNEALHRDLTDFRTQHPEVTLLQYVDDLLLAAPTKKACTQGTRHLLQELGEKGYRASAKKAQICQTKVTYLGYILSEGKRWLTPGRIETVARIPPPRNPREVREFLGKAGFCRLFIPGFAELAAPLYALTKPSTPFTWQTEHQLAFEALKKALLSAPALGLPDTSKPFTLFLDERQGIAKGVLTQKLGPWKRPVAYLSKKLDPVAAGWPPCLRIMAATAMLVKDSAKLTLGQPLTVITPHTLEAIVRQPPDRWITNARLTHYQALLLDTDRVQFGPPVTLNPATLLPVPENQPSPHDCRQVLAETHGTREDLKDQELPDADHTWYTDGSSYLDSGTRRAGAAVVDGHNTIWAQSLPPGTSAQKAELIALTKALELSKGKKANIYTDSRYAFATAHTHGSIYERRGWLTSEGKEIKNKAEIIALLKALFLPQEVAIIHCPGHQKGQDPVAVGNRQADRVARQAAMAEVLTLATEPDNTSHITAGKRTADGSEFEKRTADGSEFESPKKKAKVE

SEQ ID NO: 1951 - protein, 2102 aa, synthetic construct
MPAAKRVKLDGGDKKYSIGLDIGTNSVGWAVITDEYKVPSKKFKVLGNTDRHSIKKNLIGALLFDSGETAEATRLKRTARRRYTRRKNRICYLQEIFSNEMAKVDDSFFHRLEESFLVEEDKKHERHPIFGNIVDEVAYHEKYPTIYHLRKKLVDSTDKADLRLIYLALAHMIKFRGHFLIEGDLNPDNSDVDKLFIQLVQTYNQLFEENPINASGVDAKAILSARLSKSRRLENLIAQLPGEKKNGLFGNLIALSLGLTPNFKSNFDLAEDAKLQLSKDTYDDDLDNLLAQIGDQYADLFLAAKNLSDAILLSDILRVNTEITKAPLSASMIKRYDEHHQDLTLLKALVRQQLPEKYKEIFFDQSKNGYAGYIDGGASQEEFYKFIKPILEKMDGTEELLVKLNREDLLRKQRTFDNGSIPHQIHLGELHAILRRQEDFYPFLKDNREKIEKILTFRIPYYVGPLARGNSRFAWMTRKSEETITPWNFEEVVDKGASAQSFIERMTNFDKNLPNEKVLPKHSLLYEYFTVYNELTKVKYVTEGMRKPAFLSGEQKKAIVDLLFKTNRKVTVKQLKEDYFKKIECFDSVEISGVEDRFNASLGTYHDLLKIIKDKDFLDNEENEDILEDIVLTLTLFEDREMIEERLKTYAHLFDDKVMKQLKRRRYTGWGRLSRKLINGIRDKQSGKTILDFLKSDGFANRNFMQLIHDDSLTFKEDIQKAQVSGQGDSLHEHIANLAGSPAIKKGILQTVKVVDELVKVMGRHKPENIVIEMARENQTTQKGQKNSRERMKRIEEGIKELGSQILKEHPVENTQLQNEKLYLYYLQNGRDMYVDQELDINRLSDYDVDHIVPQSFLKDDSIDNKVLTRSDKARGKSDNVPSEEVVKKMKNYWRQLLNAKLITQRKFDNLTKAERGGLSELDKAGFIKRQLVETRQITKHVAQILDSRMNTKYDENDKLIREVKVITLKSKLVSDFRKDFQFYKVREINNYHHAHDAYLNAVVGTALIKKYPKLESEFVYGDYKVYDVRKMIAKSEQEIGKATAKYFFYSNIMNFFKTEITLANGEIRKRPLIETNGETGEIVWDKGRDFATVRKVLSMPQVNIVKKTEVQTGGFSKESILPKRNSDKLIARKKDWDPKKYGGFDSPTVAYSVLVVAKVEKGKSKKLKSVKELLGITIMERSSFEKNPIDFLEAKGYKEVKKDLIIKLPKYSLFELENGRKRMLASAGELQKGNELALPSKYVNFLYLASHYEKLKGSPEDNEQKQLFVEQHKHYLDEIIEQISEFSKRVILADANLDKVLSAYNKHRDKPIREQAENIIHLFTLTNLGAPAAFKYFDTTIDRKRYTSTKEVLDATLIHQSITGLYETRIDLSQLGGDGGGGSGSSEAAAKGGTVSLQDEHRLFDIPVTTSLPDVWLQDFPQAWAETGGLGRAKCQAPIIIDLKPTAVPVSIKQYPMSLEAHMGIRQHIIKFLELGVLRPCRSPWNTPLLPVKKPGTQDYRPVQDLREINKRTVDIHPTVPNPYNLLSTLKPDYSWYTVLDLKDAFFCLPLAPQSQELFAFEWKDPERGISGQLTWTRLPQGFKNSPTLFNEALHRDLTDFRTQHPEVTLLQYVDDLLLAAPTKKACTQGTRHLLQELGEKGYRASAKKAQICQTKVTYLGYILSEGKRWLTPGRIETVARIPPPRNPREVREFLGKAGFCRLFIPGFAELAAPLYALTKPSTPFTWQTEHQLAFEALKKALLSAPALGLPDTSKPFTLFLDERQGIAKGVLTQKLGPWKRPVAYLSKKLDPVAAGWPPCLRIMAATAMLVKDSAKLTLGQPLTVITPHTLEAIVRQPPDRWITNARLTHYQALLLDTDRVQFGPPVTLNPATLLPVPENQPSPHDCRQVLAETHGTREDLKDQELPDADHTWYTDGSSYLDSGTRRAGAAVVDGHNTIWAQSLPPGTSAQKAELIALTKALELSKGKKANIYTDSRYAFATAHTHGSIYERRGWLTSEGKEIKNKAEIIALLKALFLPQEVAIIHCPGHQKGQDPVAVGNRQADRVARQAAMAEVLTLATEPDNTSHITAGKRTADGSEFEKRTADGSEFESPKKKAKVE

SEQ ID NO: 1952 - protein, 2102 aa, synthetic construct
MPAAKRVKLDGGDKKYSIGLDIGTNSVGWAVITDEYKVPSKKFKVLGNTDRHSIKKNLIGALLFDSGETAEATRLKRTARRRYTRRKNRICYLQEIFSNEMAKVDDSFFHRLEESFLVEEDKKHERHPIFGNIVDEVAYHEKYPTIYHLRKKLVDSTDKADLRLIYLALAHMIKFRGHFLIEGDLNPDNSDVDKLFIQLVQTYNQLFEENPINASGVDAKAILSARLSKSRRLENLIAQLPGEKKNGLFGNLIALSLGLTPNFKSNFDLAEDAKLQLSKDTYDDDLDNLLAQIGDQYADLFLAAKNLSDAILLSDILRVNTEITKAPLSASMIKRYDEHHQDLTLLKALVRQQLPEKYKEIFFDQSKNGYAGYIDGGASQEEFYKFIKPILEKMDGTEELLVKLNREDLLRKQRTFDNGSIPHQIHLGELHAILRRQEDFYPFLKDNREKIEKILTFRIPYYVGPLARGNSRFAWMTRKSEETITPWNFEEVVDKGASAQSFIERMTNFDKNLPNEKVLPKHSLLYEYFTVYNELTKVKYVTEGMRKPAFLSGEQKKAIVDLLFKTNRKVTVKQLKEDYFKKIECFDSVEISGVEDRFNASLGTYHDLLKIIKDKDFLDNEENEDILEDIVLTLTLFEDREMIEERLKTYAHLFDDKVMKQLKRRRYTGWGRLSRKLINGIRDKQSGKTILDFLKSDGFANRNFMQLIHDDSLTFKEDIQKAQVSGQGDSLHEHIANLAGSPAIKKGILQTVKVVDELVKVMGRHKPENIVIEMARENQTTQKGQKNSRERMKRIEEGIKELGSQILKEHPVENTQLQNEKLYLYYLQNGRDMYVDQELDINRLSDYDVDHIVPQSFLKDDSIDNKVLTRSDKARGKSDNVPSEEVVKKMKNYWRQLLNAKLITQRKFDNLTKAERGGLSELDKAGFIKRQLVETRQITKHVAQILDSRMNTKYDENDKLIREVKVITLKSKLVSDFRKDFQFYKVREINNYHHAHDAYLNAVVGTALIKKYPKLESEFVYGDYKVYDVRKMIAKSEQEIGKATAKYFFYSNIMNFFKTEITLANGEIRKRPLIETNGETGEIVWDKGRDFATVRKVLSMPQVNIVKKTEVQTGGFSKESILPKRNSDKLIARKKDWDPKKYGGFDSPTVAYSVLVVAKVEKGKSKKLKSVKELLGITIMERSSFEKNPIDFLEAKGYKEVKKDLIIKLPKYSLFELENGRKRMLASAGELQKGNELALPSKYVNFLYLASHYEKLKGSPEDNEQKQLFVEQHKHYLDEIIEQISEFSKRVILADANLDKVLSAYNKHRDKPIREQAENIIHLFTLTNLGAPAAFKYFDTTIDRKRYTSTKEVLDATLIHQSITGLYETRIDLSQLGGDGGGSSGGGEAAAKGGTVSLQDEHRLFDIPVTTSLPDVWLQDFPQAWAETGGLGRAKCQAPIIIDLKPTAVPVSIKQYPMSLEAHMGIRQHIIKFLELGVLRPCRSPWNTPLLPVKKPGTQDYRPVQDLREINKRTVDIHPTVPNPYNLLSTLKPDYSWYTVLDLKDAFFCLPLAPQSQELFAFEWKDPERGISGQLTWTRLPQGFKNSPTLFNEALHRDLTDFRTQHPEVTLLQYVDDLLLAAPTKKACTQGTRHLLQELGEKGYRASAKKAQICQTKVTYLGYILSEGKRWLTPGRIETVARIPPPRNPREVREFLGKAGFCRLFIPGFAELAAPLYALTKPSTPFTWQTEHQLAFEALKKALLSAPALGLPDTSKPFTLFLDERQGIAKGVLTQKLGPWKRPVAYLSKKLDPVAAGWPPCLRIMAATAMLVKDSAKLTLGQPLTVITPHTLEAIVRQPPDRWITNARLTHYQALLLDTDRVQFGPPVTLNPATLLPVPENQPSPHDCRQVLAETHGTREDLKDQELPDADHTWYTDGSSYLDSGTRRAGAAVVDGHNTIWAQSLPPGTSAQKAELIALTKALELSKGKKANIYTDSRYAFATAHTHGSIYERRGWLTSEGKEIKNKAEIIALLKALFLPQEVAIIHCPGHQKGQDPVAVGNRQADRVARQAAMAEVLTLATEPDNTSHITAGKRTADGSEFEKRTADGSEFESPKKKAKVE

SEQ ID NO: 1953 - protein, 2098 aa, synthetic construct
MPAAKRVKLDGGDKKYSIGLDIGTNSVGWAVITDEYKVPSKKFKVLGNTDRHSIKKNLIGALLFDSGETAEATRLKRTARRRYTRRKNRICYLQEIFSNEMAKVDDSFFHRLEESFLVEEDKKHERHPIFGNIVDEVAYHEKYPTIYHLRKKLVDSTDKADLRLIYLALAHMIKFRGHFLIEGDLNPDNSDVDKLFIQLVQTYNQLFEENPINASGVDAKAILSARLSKSRRLENLIAQLPGEKKNGLFGNLIALSLGLTPNFKSNFDLAEDAKLQLSKDTYDDDLDNLLAQIGDQYADLFLAAKNLSDAILLSDILRVNTEITKAPLSASMIKRYDEHHQDLTLLKALVRQQLPEKYKEIFFDQSKNGYAGYIDGGASQEEFYKFIKPILEKMDGTEELLVKLNREDLLRKQRTFDNGSIPHQIHLGELHAILRRQEDFYPFLKDNREKIEKILTFRIPYYVGPLARGNSRFAWMTRKSEETITPWNFEEVVDKGASAQSFIERMTNFDKNLPNEKVLPKHSLLYEYFTVYNELTKVKYVTEGMRKPAFLSGEQKKAIVDLLFKTNRKVTVKQLKEDYFKKIECFDSVEISGVEDRFNASLGTYHDLLKIIKDKDFLDNEENEDILEDIVLTLTLFEDREMIEERLKTYAHLFDDKVMKQLKRRRYTGWGRLSRKLINGIRDKQSGKTILDFLKSDGFANRNFMQLIHDDSLTFKEDIQKAQVSGQGDSLHEHIANLAGSPAIKKGILQTVKVVDELVKVMGRHKPENIVIEMARENQTTQKGQKNSRERMKRIEEGIKELGSQILKEHPVENTQLQNEKLYLYYLQNGRDMYVDQELDINRLSDYDVDHIVPQSFLKDDSIDNKVLTRSDKARGKSDNVPSEEVVKKMKNYWRQLLNAKLITQRKFDNLTKAERGGLSELDKAGFIKRQLVETRQITKHVAQILDSRMNTKYDENDKLIREVKVITLKSKLVSDFRKDFQFYKVREINNYHHAHDAYLNAVVGTALIKKYPKLESEFVYGDYKVYDVRKMIAKSEQEIGKATAKYFFYSNIMNFFKTEITLANGEIRKRPLIETNGETGEIVWDKGRDFATVRKVLSMPQVNIVKKTEVQTGGFSKESILPKRNSDKLIARKKDWDPKKYGGFDSPTVAYSVLVVAKVEKGKSKKLKSVKELLGITIMERSSFEKNPIDFLEAKGYKEVKKDLIIKLPKYSLFELENGRKRMLASAGELQKGNELALPSKYVNFLYLASHYEKLKGSPEDNEQKQLFVEQHKHYLDEIIEQISEFSKRVILADANLDKVLSAYNKHRDKPIREQAENIIHLFTLTNLGAPAAFKYFDTTIDRKRYTSTKEVLDATLIHQSITGLYETRIDLSQLGGDGGPAPAPAPGGTVSLQDEHRLFDIPVTTSLPDVWLQDFPQAWAETGGLGRAKCQAPIIIDLKPTAVPVSIKQYPMSLEAHMGIRQHIIKFLELGVLRPCRSPWNTPLLPVKKPGTQDYRPVQDLREINKRTVDIHPTVPNPYNLLSTLKPDYSWYTVLDLKDAFFCLPLAPQSQELFAFEWKDPERGISGQLTWTRLPQGFKNSPTLFNEALHRDLTDFRTQHPEVTLLQYVDDLLLAAPTKKACTQGTRHLLQELGEKGYRASAKKAQICQTKVTYLGYILSEGKRWLTPGRIETVARIPPPRNPREVREFLGKAGFCRLFIPGFAELAAPLYALTKPSTPFTWQTEHQLAFEALKKALLSAPALGLPDTSKPFTLFLDERQGIAKGVLTQKLGPWKRPVAYLSKKLDPVAAGWPPCLRIMAATAMLVKDSAKLTLGQPLTVITPHTLEAIVRQPPDRWITNARLTHYQALLLDTDRVQFGPPVTLNPATLLPVPENQPSPHDCRQVLAETHGTREDLKDQELPDADHTWYTDGSSYLDSGTRRAGAAVVDGHNTIWAQSLPPGTSAQKAELIALTKALELSKGKKANIYTDSRYAFATAHTHGSIYERRGWLTSEGKEIKNKAEIIALLKALFLPQEVAIIHCPGHQKGQDPVAVGNRQADRVARQAAMAEVLTLATEPDNTSHITAGKRTADGSEFEKRTADGSEFESPKKKAKVE

SEQ ID NO: 1954 - protein, 2102 aa, synthetic construct
MPAAKRVKLDGGDKKYSIGLDIGTNSVGWAVITDEYKVPSKKFKVLGNTDRHSIKKNLIGALLFDSGETAEATRLKRTARRRYTRRKNRICYLQEIFSNEMAKVDDSFFHRLEESFLVEEDKKHERHPIFGNIVDEVAYHEKYPTIYHLRKKLVDSTDKADLRLIYLALAHMIKFRGHFLIEGDLNPDNSDVDKLFIQLVQTYNQLFEENPINASGVDAKAILSARLSKSRRLENLIAQLPGEKKNGLFGNLIALSLGLTPNFKSNFDLAEDAKLQLSKDTYDDDLDNLLAQIGDQYADLFLAAKNLSDAILLSDILRVNTEITKAPLSASMIKRYDEHHQDLTLLKALVRQQLPEKYKEIFFDQSKNGYAGYIDGGASQEEFYKFIKPILEKMDGTEELLVKLNREDLLRKQRTFDNGSIPHQIHLGELHAILRRQEDFYPFLKDNREKIEKILTFRIPYYVGPLARGNSRFAWMTRKSEETITPWNFEEVVDKGASAQSFIERMTNFDKNLPNEKVLPKHSLLYEYFTVYNELTKVKYVTEGMRKPAFLSGEQKKAIVDLLFKTNRKVTVKQLKEDYFKKIECFDSVEISGVEDRFNASLGTYHDLLKIIKDKDFLDNEENEDILEDIVLTLTLFEDREMIEERLKTYAHLFDDKVMKQLKRRRYTGWGRLSRKLINGIRDKQSGKTILDFLKSDGFANRNFMQLIHDDSLTFKEDIQKAQVSGQGDSLHEHIANLAGSPAIKKGILQTVKVVDELVKVMGRHKPENIVIEMARENQTTQKGQKNSRERMKRIEEGIKELGSQILKEHPVENTQLQNEKLYLYYLQNGRDMYVDQELDINRLSDYDVDHIVPQSFLKDDSIDNKVLTRSDKARGKSDNVPSEEVVKKMKNYWRQLLNAKLITQRKFDNLTKAERGGLSELDKAGFIKRQLVETRQITKHVAQILDSRMNTKYDENDKLIREVKVITLKSKLVSDFRKDFQFYKVREINNYHHAHDAYLNAVVGTALIKKYPKLESEFVYGDYKVYDVRKMIAKSEQEIGKATAKYFFYSNIMNFFKTEITLANGEIRKRPLIETNGETGEIVWDKGRDFATVRKVLSMPQVNIVKKTEVQTGGFSKESILPKRNSDKLIARKKDWDPKKYGGFDSPTVAYSVLVVAKVEKGKSKKLKSVKELLGITIMERSSFEKNPIDFLEAKGYKEVKKDLIIKLPKYSLFELENGRKRMLASAGELQKGNELALPSKYVNFLYLASHYEKLKGSPEDNEQKQLFVEQHKHYLDEIIEQISEFSKRVILADANLDKVLSAYNKHRDKPIREQAENIIHLFTLTNLGAPAAFKYFDTTIDRKRYTSTKEVLDATLIHQSITGLYETRIDLSQLGGDGGGGSPAPEAAAKGGTVSLQDEHRLFDIPVTTSLPDVWLQDFPQAWAETGGLGRAKCQAPIIIDLKPTAVPVSIKQYPMSLEAHMGIRQHIIKFLELGVLRPCRSPWNTPLLPVKKPGTQDYRPVQDLREINKRTVDIHPTVPNPYNLLSTLKPDYSWYTVLDLKDAFFCLPLAPQSQELFAFEWKDPERGISGQLTWTRLPQGFKNSPTLFNEALHRDLTDFRTQHPEVTLLQYVDDLLLAAPTKKACTQGTRHLLQELGEKGYRASAKKAQICQTKVTYLGYILSEGKRWLTPGRIETVARIPPPRNPREVREFLGKAGFCRLFIPGFAELAAPLYALTKPSTPFTWQTEHQLAFEALKKALLSAPALGLPDTSKPFTLFLDERQGIAKGVLTQKLGPWKRPVAYLSKKLDPVAAGWPPCLRIMAATAMLVKDSAKLTLGQPLTVITPHTLEAIVRQPPDRWITNARLTHYQALLLDTDRVQFGPPVTLNPATLLPVPENQPSPHDCRQVLAETHGTREDLKDQELPDADHTWYTDGSSYLDSGTRRAGAAVVDGHNTIWAQSLPPGTSAQKAELIALTKALELSKGKKANIYTDSRYAFATAHTHGSIYERRGWLTSEGKEIKNKAEIIALLKALFLPQEVAIIHCPGHQKGQDPVAVGNRQADRVARQAAMAEVLTLATEPDNTSHITAGKRTADGSEFEKRTADGSEFESPKKKAKVE

SEQ ID NO: 1955 - protein, 2103 aa, synthetic construct
MPAAKRVKLDGGDKKYSIGLDIGTNSVGWAVITDEYKVPSKKFKVLGNTDRHSIKKNLIGALLFDSGETAEATRLKRTARRRYTRRKNRICYLQEIFSNEMAKVDDSFFHRLEESFLVEEDKKHERHPIFGNIVDEVAYHEKYPTIYHLRKKLVDSTDKADLRLIYLALAHMIKFRGHFLIEGDLNPDNSDVDKLFIQLVQTYNQLFEENPINASGVDAKAILSARLSKSRRLENLIAQLPGEKKNGLFGNLIALSLGLTPNFKSNFDLAEDAKLQLSKDTYDDDLDNLLAQIGDQYADLFLAAKNLSDAILLSDILRVNTEITKAPLSASMIKRYDEHHQDLTLLKALVRQQLPEKYKEIFFDQSKNGYAGYIDGGASQEEFYKFIKPILEKMDGTEELLVKLNREDLLRKQRTFDNGSIPHQIHLGELHAILRRQEDFYPFLKDNREKIEKILTFRIPYYVGPLARGNSRFAWMTRKSEETITPWNFEEVVDKGASAQSFIERMTNFDKNLPNEKVLPKHSLLYEYFTVYNELTKVKYVTEGMRKPAFLSGEQKKAIVDLLFKTNRKVTVKQLKEDYFKKIECFDSVEISGVEDRFNASLGTYHDLLKIIKDKDFLDNEENEDILEDIVLTLTLFEDREMIEERLKTYAHLFDDKVMKQLKRRRYTGWGRLSRKLINGIRDKQSGKTILDFLKSDGFANRNFMQLIHDDSLTFKEDIQKAQVSGQGDSLHEHIANLAGSPAIKKGILQTVKVVDELVKVMGRHKPENIVIEMARENQTTQKGQKNSRERMKRIEEGIKELGSQILKEHPVENTQLQNEKLYLYYLQNGRDMYVDQELDINRLSDYDVDHIVPQSFLKDDSIDNKVLTRSDKARGKSDNVPSEEVVKKMKNYWRQLLNAKLITQRKFDNLTKAERGGLSELDKAGFIKRQLVETRQITKHVAQILDSRMNTKYDENDKLIREVKVITLKSKLVSDFRKDFQFYKVREINNYHHAHDAYLNAVVGTALIKKYPKLESEFVYGDYKVYDVRKMIAKSEQEIGKATAKYFFYSNIMNFFKTEITLANGEIRKRPLIETNGETGEIVWDKGRDFATVRKVLSMPQVNIVKKTEVQTGGFSKESILPKRNSDKLIARKKDWDPKKYGGFDSPTVAYSVLVVAKVEKGKSKKLKSVKELLGITIMERSSFEKNPIDFLEAKGYKEVKKDLIIKLPKYSLFELENGRKRMLASAGELQKGNELALPSKYVNFLYLASHYEKLKGSPEDNEQKQLFVEQHKHYLDEIIEQISEFSKRVILADANLDKVLSAYNKHRDKPIREQAENIIHLFTLTNLGAPAAFKYFDTTIDRKRYTSTKEVLDATLIHQSITGLYETRIDLSQLGGDGGGGSGGSGGSGGSGGTVSLQDEHRLFDIPVTTSLPDVWLQDFPQAWAETGGLGRAKCQAPIIIDLKPTAVPVSIKQYPMSLEAHMGIRQHIIKFLELGVLRPCRSPWNTPLLPVKKPGTQDYRPVQDLREINKRTVDIHPTVPNPYNLLSTLKPDYSWYTVLDLKDAFFCLPLAPQSQELFAFEWKDPERGISGQLTWTRLPQGFKNSPTLFNEALHRDLTDFRTQHPEVTLLQYVDDLLLAAPTKKACTQGTRHLLQELGEKGYRASAKKAQICQTKVTYLGYILSEGKRWLTPGRIETVARIPPPRNPREVREFLGKAGFCRLFIPGFAELAAPLYALTKPSTPFTWQTEHQLAFEALKKALLSAPALGLPDTSKPFTLFLDERQGIAKGVLTQKLGPWKRPVAYLSKKLDPVAAGWPPCLRIMAATAMLVKDSAKLTLGQPLTVITPHTLEAIVRQPPDRWITNARLTHYQALLLDTDRVQFGPPVTLNPATLLPVPENQPSPHDCRQVLAETHGTREDLKDQELPDADHTWYTDGSSYLDSGTRRAGAAVVDGHNTIWAQSLPPGTSAQKAELIALTKALELSKGKKANIYTDSRYAFATAHTHGSIYERRGWLTSEGKEIKNKAEIIALLKALFLPQEVAIIHCPGHQKGQDPVAVGNRQADRVARQAAMAEVLTLATEPDNTSHITAGKRTADGSEFEKRTADGSEFESPKKKAKVE

SEQ ID NO: 1956 - protein, 2097 aa, synthetic construct
MPAAKRVKLDGGDKKYSIGLDIGTNSVGWAVITDEYKVPSKKFKVLGNTDRHSIKKNLIGALLFDSGETAEATRLKRTARRRYTRRKNRICYLQEIFSNEMAKVDDSFFHRLEESFLVEEDKKHERHPIFGNIVDEVAYHEKYPTIYHLRKKLVDSTDKADLRLIYLALAHMIKFRGHFLIEGDLNPDNSDVDKLFIQLVQTYNQLFEENPINASGVDAKAILSARLSKSRRLENLIAQLPGEKKNGLFGNLIALSLGLTPNFKSNFDLAEDAKLQLSKDTYDDDLDNLLAQIGDQYADLFLAAKNLSDAILLSDILRVNTEITKAPLSASMIKRYDEHHQDLTLLKALVRQQLPEKYKEIFFDQSKNGYAGYIDGGASQEEFYKFIKPILEKMDGTEELLVKLNREDLLRKQRTFDNGSIPHQIHLGELHAILRRQEDFYPFLKDNREKIEKILTFRIPYYVGPLARGNSRFAWMTRKSEETITPWNFEEVVDKGASAQSFIERMTNFDKNLPNEKVLPKHSLLYEYFTVYNELTKVKYVTEGMRKPAFLSGEQKKAIVDLLFKTNRKVTVKQLKEDYFKKIECFDSVEISGVEDRFNASLGTYHDLLKIIKDKDFLDNEENEDILEDIVLTLTLFEDREMIEERLKTYAHLFDDKVMKQLKRRRYTGWGRLSRKLINGIRDKQSGKTILDFLKSDGFANRNFMQLIHDDSLTFKEDIQKAQVSGQGDSLHEHIANLAGSPAIKKGILQTVKVVDELVKVMGRHKPENIVIEMARENQTTQKGQKNSRERMKRIEEGIKELGSQILKEHPVENTQLQNEKLYLYYLQNGRDMYVDQELDINRLSDYDVDHIVPQSFLKDDSIDNKVLTRSDKARGKSDNVPSEEVVKKMKNYWRQLLNAKLITQRKFDNLTKAERGGLSELDKAGFIKRQLVETRQITKHVAQILDSRMNTKYDENDKLIREVKVITLKSKLVSDFRKDFQFYKVREINNYHHAHDAYLNAVVGTALIKKYPKLESEFVYGDYKVYDVRKMIAKSEQEIGKATAKYFFYSNIMNFFKTEITLANGEIRKRPLIETNGETGEIVWDKGRDFATVRKVLSMPQVNIVKKTEVQTGGFSKESILPKRNSDKLIARKKDWDPKKYGGFDSPTVAYSVLVVAKVEKGKSKKLKSVKELLGITIMERSSFEKNPIDFLEAKGYKEVKKDLIIKLPKYSLFELENGRKRMLASAGELQKGNELALPSKYVNFLYLASHYEKLKGSPEDNEQKQLFVEQHKHYLDEIIEQISEFSKRVILADANLDKVLSAYNKHRDKPIREQAENIIHLFTLTNLGAPAAFKYFDTTIDRKRYTSTKEVLDATLIHQSITGLYETRIDLSQLGGDGGGGGGGGGGTVSLQDEHRLFDIPVTTSLPDVWLQDFPQAWAETGGLGRAKCQAPIIIDLKPTAVPVSIKQYPMSLEAHMGIRQHIIKFLELGVLRPCRSPWNTPLLPVKKPGTQDYRPVQDLREINKRTVDIHPTVPNPYNLLSTLKPDYSWYTVLDLKDAFFCLPLAPQSQELFAFEWKDPERGISGQLTWTRLPQGFKNSPTLFNEALHRDLTDFRTQHPEVTLLQYVDDLLLAAPTKKACTQGTRHLLQELGEKGYRASAKKAQICQTKVTYLGYILSEGKRWLTPGRIETVARIPPPRNPREVREFLGKAGFCRLFIPGFAELAAPLYALTKPSTPFTWQTEHQLAFEALKKALLSAPALGLPDTSKPFTLFLDERQGIAKGVLTQKLGPWKRPVAYLSKKLDPVAAGWPPCLRIMAATAMLVKDSAKLTLGQPLTVITPHTLEAIVRQPPDRWITNARLTHYQALLLDTDRVQFGPPVTLNPATLLPVPENQPSPHDCRQVLAETHGTREDLKDQELPDADHTWYTDGSSYLDSGTRRAGAAVVDGHNTIWAQSLPPGTSAQKAELIALTKALELSKGKKANIYTDSRYAFATAHTHGSIYERRGWLTSEGKEIKNKAEIIALLKALFLPQEVAIIHCPGHQKGQDPVAVGNRQADRVARQAAMAEVLTLATEPDNTSHITAGKRTADGSEFEKRTADGSEFESPKKKAKVE

SEQ ID NO: 1957 - protein, 2109 aa, synthetic construct
MPAAKRVKLDGGDKKYSIGLDIGTNSVGWAVITDEYKVPSKKFKVLGNTDRHSIKKNLIGALLFDSGETAEATRLKRTARRRYTRRKNRICYLQEIFSNEMAKVDDSFFHRLEESFLVEEDKKHERHPIFGNIVDEVAYHEKYPTIYHLRKKLVDSTDKADLRLIYLALAHMIKFRGHFLIEGDLNPDNSDVDKLFIQLVQTYNQLFEENPINASGVDAKAILSARLSKSRRLENLIAQLPGEKKNGLFGNLIALSLGLTPNFKSNFDLAEDAKLQLSKDTYDDDLDNLLAQIGDQYADLFLAAKNLSDAILLSDILRVNTEITKAPLSASMIKRYDEHHQDLTLLKALVRQQLPEKYKEIFFDQSKNGYAGYIDGGASQEEFYKFIKPILEKMDGTEELLVKLNREDLLRKQRTFDNGSIPHQIHLGELHAILRRQEDFYPFLKDNREKIEKILTFRIPYYVGPLARGNSRFAWMTRKSEETITPWNFEEVVDKGASAQSFIERMTNFDKNLPNEKVLPKHSLLYEYFTVYNELTKVKYVTEGMRKPAFLSGEQKKAIVDLLFKTNRKVTVKQLKEDYFKKIECFDSVEISGVEDRFNASLGTYHDLLKIIKDKDFLDNEENEDILEDIVLTLTLFEDREMIEERLKTYAHLFDDKVMKQLKRRRYTGWGRLSRKLINGIRDKQSGKTILDFLKSDGFANRNFMQLIHDDSLTFKEDIQKAQVSGQGDSLHEHIANLAGSPAIKKGILQTVKVVDELVKVMGRHKPENIVIEMARENQTTQKGQKNSRERMKRIEEGIKELGSQILKEHPVENTQLQNEKLYLYYLQNGRDMYVDQELDINRLSDYDVDHIVPQSFLKDDSIDNKVLTRSDKARGKSDNVPSEEVVKKMKNYWRQLLNAKLITQRKFDNLTKAERGGLSELDKAGFIKRQLVETRQITKHVAQILDSRMNTKYDENDKLIREVKVITLKSKLVSDFRKDFQFYKVREINNYHHAHDAYLNAVVGTALIKKYPKLESEFVYGDYKVYDVRKMIAKSEQEIGKATAKYFFYSNIMNFFKTEITLANGEIRKRPLIETNGETGEIVWDKGRDFATVRKVLSMPQVNIVKKTEVQTGGFSKESILPKRNSDKLIARKKDWDPKKYGGFDSPTVAYSVLVVAKVEKGKSKKLKSVKELLGITIMERSSFEKNPIDFLEAKGYKEVKKDLIIKLPKYSLFELENGRKRMLASAGELQKGNELALPSKYVNFLYLASHYEKLKGSPEDNEQKQLFVEQHKHYLDEIIEQISEFSKRVILADANLDKVLSAYNKHRDKPIREQAENIIHLFTLTNLGAPAAFKYFDTTIDRKRYTSTKEVLDATLIHQSITGLYETRIDLSQLGGDGGGGSGGSGGSGGSGGSGGSGGTVSLQDEHRLFDIPVTTSLPDVWLQDFPQAWAETGGLGRAKCQAPIIIDLKPTAVPVSIKQYPMSLEAHMGIRQHIIKFLELGVLRPCRSPWNTPLLPVKKPGTQDYRPVQDLREINKRTVDIHPTVPNPYNLLSTLKPDYSWYTVLDLKDAFFCLPLAPQSQELFAFEWKDPERGISGQLTWTRLPQGFKNSPTLFNEALHRDLTDFRTQHPEVTLLQYVDDLLLAAPTKKACTQGTRHLLQELGEKGYRASAKKAQICQTKVTYLGYILSEGKRWLTPGRIETVARIPPPRNPREVREFLGKAGFCRLFIPGFAELAAPLYALTKPSTPFTWQTEHQLAFEALKKALLSAPALGLPDTSKPFTLFLDERQGIAKGVLTQKLGPWKRPVAYLSKKLDPVAAGWPPCLRIMAATAMLVKDSAKLTLGQPLTVITPHTLEAIVRQPPDRWITNARLTHYQALLLDTDRVQFGPPVTLNPATLLPVPENQPSPHDCRQVLAETHGTREDLKDQELPDADHTWYTDGSSYLDSGTRRAGAAVVDGHNTIWAQSLPPGTSAQKAELIALTKALELSKGKKANIYTDSRYAFATAHTHGSIYERRGWLTSEGKEIKNKAEIIALLKALFLPQEVAIIHCPGHQKGQDPVAVGNRQADRVARQAAMAEVLTLATEPDNTSHITAGKRTADGSEFEKRTADGSEFESPKKKAKVE

SEQ ID NO: 1958 - protein, 2100 aa, synthetic construct
MPAAKRVKLDGGDKKYSIGLDIGTNSVGWAVITDEYKVPSKKFKVLGNTDRHSIKKNLIGALLFDSGETAEATRLKRTARRRYTRRKNRICYLQEIFSNEMAKVDDSFFHRLEESFLVEEDKKHERHPIFGNIVDEVAYHEKYPTIYHLRKKLVDSTDKADLRLIYLALAHMIKFRGHFLIEGDLNPDNSDVDKLFIQLVQTYNQLFEENPINASGVDAKAILSARLSKSRRLENLIAQLPGEKKNGLFGNLIALSLGLTPNFKSNFDLAEDAKLQLSKDTYDDDLDNLLAQIGDQYADLFLAAKNLSDAILLSDILRVNTEITKAPLSASMIKRYDEHHQDLTLLKALVRQQLPEKYKEIFFDQSKNGYAGYIDGGASQEEFYKFIKPILEKMDGTEELLVKLNREDLLRKQRTFDNGSIPHQIHLGELHAILRRQEDFYPFLKDNREKIEKILTFRIPYYVGPLARGNSRFAWMTRKSEETITPWNFEEVVDKGASAQSFIERMTNFDKNLPNEKVLPKHSLLYEYFTVYNELTKVKYVTEGMRKPAFLSGEQKKAIVDLLFKTNRKVTVKQLKEDYFKKIECFDSVEISGVEDRFNASLGTYHDLLKIIKDKDFLDNEENEDILEDIVLTLTLFEDREMIEERLKTYAHLFDDKVMKQLKRRRYTGWGRLSRKLINGIRDKQSGKTILDFLKSDGFANRNFMQLIHDDSLTFKEDIQKAQVSGQGDSLHEHIANLAGSPAIKKGILQTVKVVDELVKVMGRHKPENIVIEMARENQTTQKGQKNSRERMKRIEEGIKELGSQILKEHPVENTQLQNEKLYLYYLQNGRDMYVDQELDINRLSDYDVDHIVPQSFLKDDSIDNKVLTRSDKARGKSDNVPSEEVVKKMKNYWRQLLNAKLITQRKFDNLTKAERGGLSELDKAGFIKRQLVETRQITKHVAQILDSRMNTKYDENDKLIREVKVITLKSKLVSDFRKDFQFYKVREINNYHHAHDAYLNAVVGTALIKKYPKLESEFVYGDYKVYDVRKMIAKSEQEIGKATAKYFFYSNIMNFFKTEITLANGEIRKRPLIETNGETGEIVWDKGRDFATVRKVLSMPQVNIVKKTEVQTGGFSKESILPKRNSDKLIARKKDWDPKKYGGFDSPTVAYSVLVVAKVEKGKSKKLKSVKELLGITIMERSSFEKNPIDFLEAKGYKEVKKDLIIKLPKYSLFELENGRKRMLASAGELQKGNELALPSKYVNFLYLASHYEKLKGSPEDNEQKQLFVEQHKHYLDEIIEQISEFSKRVILADANLDKVLSAYNKHRDKPIREQAENIIHLFTLTNLGAPAAFKYFDTTIDRKRYTSTKEVLDATLIHQSITGLYETRIDLSQLGGDGGGGSGSSPAPGGTVSLQDEHRLFDIPVTTSLPDVWLQDFPQAWAETGGLGRAKCQAPIIIDLKPTAVPVSIKQYPMSLEAHMGIRQHIIKFLELGVLRPCRSPWNTPLLPVKKPGTQDYRPVQDLREINKRTVDIHPTVPNPYNLLSTLKPDYSWYTVLDLKDAFFCLPLAPQSQELFAFEWKDPERGISGQLTWTRLPQGFKNSPTLFNEALHRDLTDFRTQHPEVTLLQYVDDLLLAAPTKKACTQGTRHLLQELGEKGYRASAKKAQICQTKVTYLGYILSEGKRWLTPGRIETVARIPPPRNPREVREFLGKAGFCRLFIPGFAELAAPLYALTKPSTPFTWQTEHQLAFEALKKALLSAPALGLPDTSKPFTLFLDERQGIAKGVLTQKLGPWKRPVAYLSKKLDPVAAGWPPCLRIMAATAMLVKDSAKLTLGQPLTVITPHTLEAIVRQPPDRWITNARLTHYQALLLDTDRVQFGPPVTLNPATLLPVPENQPSPHDCRQVLAETHGTREDLKDQELPDADHTWYTDGSSYLDSGTRRAGAAVVDGHNTIWAQSLPPGTSAQKAELIALTKALELSKGKKANIYTDSRYAFATAHTHGSIYERRGWLTSEGKEIKNKAEIIALLKALFLPQEVAIIHCPGHQKGQDPVAVGNRQADRVARQAAMAEVLTLATEPDNTSHITAGKRTADGSEFEKRTADGSEFESPKKKAKVE

SEQ ID NO: 1959 - protein, 2102 aa, synthetic construct
MPAAKRVKLDGGDKKYSIGLDIGTNSVGWAVITDEYKVPSKKFKVLGNTDRHSIKKNLIGALLFDSGETAEATRLKRTARRRYTRRKNRICYLQEIFSNEMAKVDDSFFHRLEESFLVEEDKKHERHPIFGNIVDEVAYHEKYPTIYHLRKKLVDSTDKADLRLIYLALAHMIKFRGHFLIEGDLNPDNSDVDKLFIQLVQTYNQLFEENPINASGVDAKAILSARLSKSRRLENLIAQLPGEKKNGLFGNLIALSLGLTPNFKSNFDLAEDAKLQLSKDTYDDDLDNLLAQIGDQYADLFLAAKNLSDAILLSDILRVNTEITKAPLSASMIKRYDEHHQDLTLLKALVRQQLPEKYKEIFFDQSKNGYAGYIDGGASQEEFYKFIKPILEKMDGTEELLVKLNREDLLRKQRTFDNGSIPHQIHLGELHAILRRQEDFYPFLKDNREKIEKILTFRIPYYVGPLARGNSRFAWMTRKSEETITPWNFEEVVDKGASAQSFIERMTNFDKNLPNEKVLPKHSLLYEYFTVYNELTKVKYVTEGMRKPAFLSGEQKKAIVDLLFKTNRKVTVKQLKEDYFKKIECFDSVEISGVEDRFNASLGTYHDLLKIIKDKDFLDNEENEDILEDIVLTLTLFEDREMIEERLKTYAHLFDDKVMKQLKRRRYTGWGRLSRKLINGIRDKQSGKTILDFLKSDGFANRNFMQLIHDDSLTFKEDIQKAQVSGQGDSLHEHIANLAGSPAIKKGILQTVKVVDELVKVMGRHKPENIVIEMARENQTTQKGQKNSRERMKRIEEGIKELGSQILKEHPVENTQLQNEKLYLYYLQNGRDMYVDQELDINRLSDYDVDHIVPQSFLKDDSIDNKVLTRSDKARGKSDNVPSEEVVKKMKNYWRQLLNAKLITQRKFDNLTKAERGGLSELDKAGFIKRQLVETRQITKHVAQILDSRMNTKYDENDKLIREVKVITLKSKLVSDFRKDFQFYKVREINNYHHAHDAYLNAVVGTALIKKYPKLESEFVYGDYKVYDVRKMIAKSEQEIGKATAKYFFYSNIMNFFKTEITLANGEIRKRPLIETNGETGEIVWDKGRDFATVRKVLSMPQVNIVKKTEVQTGGFSKESILPKRNSDKLIARKKDWDPKKYGGFDSPTVAYSVLVVAKVEKGKSKKLKSVKELLGITIMERSSFEKNPIDFLEAKGYKEVKKDLIIKLPKYSLFELENGRKRMLASAGELQKGNELALPSKYVNFLYLASHYEKLKGSPEDNEQKQLFVEQHKHYLDEIIEQISEFSKRVILADANLDKVLSAYNKHRDKPIREQAENIIHLFTLTNLGAPAAFKYFDTTIDRKRYTSTKEVLDATLIHQSITGLYETRIDLSQLGGDGGGSSEAAAKGGSGGTVSLQDEHRLFDIPVTTSLPDVWLQDFPQAWAETGGLGRAKCQAPIIIDLKPTAVPVSIKQYPMSLEAHMGIRQHIIKFLELGVLRPCRSPWNTPLLPVKKPGTQDYRPVQDLREINKRTVDIHPTVPNPYNLLSTLKPDYSWYTVLDLKDAFFCLPLAPQSQELFAFEWKDPERGISGQLTWTRLPQGFKNSPTLFNEALHRDLTDFRTQHPEVTLLQYVDDLLLAAPTKKACTQGTRHLLQELGEKGYRASAKKAQICQTKVTYLGYILSEGKRWLTPGRIETVARIPPPRNPREVREFLGKAGFCRLFIPGFAELAAPLYALTKPSTPFTWQTEHQLAFEALKKALLSAPALGLPDTSKPFTLFLDERQGIAKGVLTQKLGPWKRPVAYLSKKLDPVAAGWPPCLRIMAATAMLVKDSAKLTLGQPLTVITPHTLEAIVRQPPDRWITNARLTHYQALLLDTDRVQFGPPVTLNPATLLPVPENQPSPHDCRQVLAETHGTREDLKDQELPDADHTWYTDGSSYLDSGTRRAGAAVVDGHNTIWAQSLPPGTSAQKAELIALTKALELSKGKKANIYTDSRYAFATAHTHGSIYERRGWLTSEGKEIKNKAEIIALLKALFLPQEVAIIHCPGHQKGQDPVAVGNRQADRVARQAAMAEVLTLATEPDNTSHITAGKRTADGSEFEKRTADGSEFESPKKKAKVE

SEQ ID NO: 1960 - protein, 2099 aa, synthetic construct
MPAAKRVKLDGGDKKYSIGLDIGTNSVGWAVITDEYKVPSKKFKVLGNTDRHSIKKNLIGALLFDSGETAEATRLKRTARRRYTRRKNRICYLQEIFSNEMAKVDDSFFHRLEESFLVEEDKKHERHPIFGNIVDEVAYHEKYPTIYHLRKKLVDSTDKADLRLIYLALAHMIKFRGHFLIEGDLNPDNSDVDKLFIQLVQTYNQLFEENPINASGVDAKAILSARLSKSRRLENLIAQLPGEKKNGLFGNLIALSLGLTPNFKSNFDLAEDAKLQLSKDTYDDDLDNLLAQIGDQYADLFLAAKNLSDAILLSDILRVNTEITKAPLSASMIKRYDEHHQDLTLLKALVRQQLPEKYKEIFFDQSKNGYAGYIDGGASQEEFYKFIKPILEKMDGTEELLVKLNREDLLRKQRTFDNGSIPHQIHLGELHAILRRQEDFYPFLKDNREKIEKILTFRIPYYVGPLARGNSRFAWMTRKSEETITPWNFEEVVDKGASAQSFIERMTNFDKNLPNEKVLPKHSLLYEYFTVYNELTKVKYVTEGMRKPAFLSGEQKKAIVDLLFKTNRKVTVKQLKEDYFKKIECFDSVEISGVEDRFNASLGTYHDLLKIIKDKDFLDNEENEDILEDIVLTLTLFEDREMIEERLKTYAHLFDDKVMKQLKRRRYTGWGRLSRKLINGIRDKQSGKTILDFLKSDGFANRNFMQLIHDDSLTFKEDIQKAQVSGQGDSLHEHIANLAGSPAIKKGILQTVKVVDELVKVMGRHKPENIVIEMARENQTTQKGQKNSRERMKRIEEGIKELGSQILKEHPVENTQLQNEKLYLYYLQNGRDMYVDQELDINRLSDYDVDHIVPQSFLKDDSIDNKVLTRSDKARGKSDNVPSEEVVKKMKNYWRQLLNAKLITQRKFDNLTKAERGGLSELDKAGFIKRQLVETRQITKHVAQILDSRMNTKYDENDKLIREVKVITLKSKLVSDFRKDFQFYKVREINNYHHAHDAYLNAVVGTALIKKYPKLESEFVYGDYKVYDVRKMIAKSEQEIGKATAKYFFYSNIMNFFKTEITLANGEIRKRPLIETNGETGEIVWDKGRDFATVRKVLSMPQVNIVKKTEVQTGGFSKESILPKRNSDKLIARKKDWDPKKYGGFDSPTVAYSVLVVAKVEKGKSKKLKSVKELLGITIMERSSFEKNPIDFLEAKGYKEVKKDLIIKLPKYSLFELENGRKRMLASAGELQKGNELALPSKYVNFLYLASHYEKLKGSPEDNEQKQLFVEQHKHYLDEIIEQISEFSKRVILADANLDKVLSAYNKHRDKPIREQAENIIHLFTLTNLGAPAAFKYFDTTIDRKRYTSTKEVLDATLIHQSITGLYETRIDLSQLGGDGGEAAAKPAPGGTVSLQDEHRLFDIPVTTSLPDVWLQDFPQAWAETGGLGRAKCQAPIIIDLKPTAVPVSIKQYPMSLEAHMGIRQHIIKFLELGVLRPCRSPWNTPLLPVKKPGTQDYRPVQDLREINKRTVDIHPTVPNPYNLLSTLKPDYSWYTVLDLKDAFFCLPLAPQSQELFAFEWKDPERGISGQLTWTRLPQGFKNSPTLFNEALHRDLTDFRTQHPEVTLLQYVDDLLLAAPTKKACTQGTRHLLQELGEKGYRASAKKAQICQTKVTYLGYILSEGKRWLTPGRIETVARIPPPRNPREVREFLGKAGFCRLFIPGFAELAAPLYALTKPSTPFTWQTEHQLAFEALKKALLSAPALGLPDTSKPFTLFLDERQGIAKGVLTQKLGPWKRPVAYLSKKLDPVAAGWPPCLRIMAATAMLVKDSAKLTLGQPLTVITPHTLEAIVRQPPDRWITNARLTHYQALLLDTDRVQFGPPVTLNPATLLPVPENQPSPHDCRQVLAETHGTREDLKDQELPDADHTWYTDGSSYLDSGTRRAGAAVVDGHNTIWAQSLPPGTSAQKAELIALTKALELSKGKKANIYTDSRYAFATAHTHGSIYERRGWLTSEGKEIKNKAEIIALLKALFLPQEVAIIHCPGHQKGQDPVAVGNRQADRVARQAAMAEVLTLATEPDNTSHITAGKRTADGSEFEKRTADGSEFESPKKKAKVE

SEQ ID NO: 1961 - protein, 2100 aa, synthetic construct
MPAAKRVKLDGGDKKYSIGLDIGTNSVGWAVITDEYKVPSKKFKVLGNTDRHSIKKNLIGALLFDSGETAEATRLKRTARRRYTRRKNRICYLQEIFSNEMAKVDDSFFHRLEESFLVEEDKKHERHPIFGNIVDEVAYHEKYPTIYHLRKKLVDSTDKADLRLIYLALAHMIKFRGHFLIEGDLNPDNSDVDKLFIQLVQTYNQLFEENPINASGVDAKAILSARLSKSRRLENLIAQLPGEKKNGLFGNLIALSLGLTPNFKSNFDLAEDAKLQLSKDTYDDDLDNLLAQIGDQYADLFLAAKNLSDAILLSDILRVNTEITKAPLSASMIKRYDEHHQDLTLLKALVRQQLPEKYKEIFFDQSKNGYAGYIDGGASQEEFYKFIKPILEKMDGTEELLVKLNREDLLRKQRTFDNGSIPHQIHLGELHAILRRQEDFYPFLKDNREKIEKILTFRIPYYVGPLARGNSRFAWMTRKSEETITPWNFEEVVDKGASAQSFIERMTNFDKNLPNEKVLPKHSLLYEYFTVYNELTKVKYVTEGMRKPAFLSGEQKKAIVDLLFKTNRKVTVKQLKEDYFKKIECFDSVEISGVEDRFNASLGTYHDLLKIIKDKDFLDNEENEDILEDIVLTLTLFEDREMIEERLKTYAHLFDDKVMKQLKRRRYTGWGRLSRKLINGIRDKQSGKTILDFLKSDGFANRNFMQLIHDDSLTFKEDIQKAQVSGQGDSLHEHIANLAGSPAIKKGILQTVKVVDELVKVMGRHKPENIVIEMARENQTTQKGQKNSRERMKRIEEGIKELGSQILKEHPVENTQLQNEKLYLYYLQNGRDMYVDQELDINRLSDYDVDHIVPQSFLKDDSIDNKVLTRSDKARGKSDNVPSEEVVKKMKNYWRQLLNAKLITQRKFDNLTKAERGGLSELDKAGFIKRQLVETRQITKHVAQILDSRMNTKYDENDKLIREVKVITLKSKLVSDFRKDFQFYKVREINNYHHAHDAYLNAVVGTALIKKYPKLESEFVYGDYKVYDVRKMIAKSEQEIGKATAKYFFYSNIMNFFKTEITLANGEIRKRPLIETNGETGEIVWDKGRDFATVRKVLSMPQVNIVKKTEVQTGGFSKESILPKRNSDKLIARKKDWDPKKYGGFDSPTVAYSVLVVAKVEKGKSKKLKSVKELLGITIMERSSFEKNPIDFLEAKGYKEVKKDLIIKLPKYSLFELENGRKRMLASAGELQKGNELALPSKYVNFLYLASHYEKLKGSPEDNEQKQLFVEQHKHYLDEIIEQISEFSKRVILADANLDKVLSAYNKHRDKPIREQAENIIHLFTLTNLGAPAAFKYFDTTIDRKRYTSTKEVLDATLIHQSITGLYETRIDLSQLGGDGGPAPGSSGGSGGTVSLQDEHRLFDIPVTTSLPDVWLQDFPQAWAETGGLGRAKCQAPIIIDLKPTAVPVSIKQYPMSLEAHMGIRQHIIKFLELGVLRPCRSPWNTPLLPVKKPGTQDYRPVQDLREINKRTVDIHPTVPNPYNLLSTLKPDYSWYTVLDLKDAFFCLPLAPQSQELFAFEWKDPERGISGQLTWTRLPQGFKNSPTLFNEALHRDLTDFRTQHPEVTLLQYVDDLLLAAPTKKACTQGTRHLLQELGEKGYRASAKKAQICQTKVTYLGYILSEGKRWLTPGRIETVARIPPPRNPREVREFLGKAGFCRLFIPGFAELAAPLYALTKPSTPFTWQTEHQLAFEALKKALLSAPALGLPDTSKPFTLFLDERQGIAKGVLTQKLGPWKRPVAYLSKKLDPVAAGWPPCLRIMAATAMLVKDSAKLTLGQPLTVITPHTLEAIVRQPPDRWITNARLTHYQALLLDTDRVQFGPPVTLNPATLLPVPENQPSPHDCRQVLAETHGTREDLKDQELPDADHTWYTDGSSYLDSGTRRAGAAVVDGHNTIWAQSLPPGTSAQKAELIALTKALELSKGKKANIYTDSRYAFATAHTHGSIYERRGWLTSEGKEIKNKAEIIALLKALFLPQEVAIIHCPGHQKGQDPVAVGNRQADRVARQAAMAEVLTLATEPDNTSHITAGKRTADGSEFEKRTADGSEFESPKKKAKVE

SEQ ID NO: 1962 - protein, 2100 aa, synthetic construct
MPAAKRVKLDGGDKKYSIGLDIGTNSVGWAVITDEYKVPSKKFKVLGNTDRHSIKKNLIGALLFDSGETAEATRLKRTARRRYTRRKNRICYLQEIFSNEMAKVDDSFFHRLEESFLVEEDKKHERHPIFGNIVDEVAYHEKYPTIYHLRKKLVDSTDKADLRLIYLALAHMIKFRGHFLIEGDLNPDNSDVDKLFIQLVQTYNQLFEENPINASGVDAKAILSARLSKSRRLENLIAQLPGEKKNGLFGNLIALSLGLTPNFKSNFDLAEDAKLQLSKDTYDDDLDNLLAQIGDQYADLFLAAKNLSDAILLSDILRVNTEITKAPLSASMIKRYDEHHQDLTLLKALVRQQLPEKYKEIFFDQSKNGYAGYIDGGASQEEFYKFIKPILEKMDGTEELLVKLNREDLLRKQRTFDNGSIPHQIHLGELHAILRRQEDFYPFLKDNREKIEKILTFRIPYYVGPLARGNSRFAWMTRKSEETITPWNFEEVVDKGASAQSFIERMTNFDKNLPNEKVLPKHSLLYEYFTVYNELTKVKYVTEGMRKPAFLSGEQKKAIVDLLFKTNRKVTVKQLKEDYFKKIECFDSVEISGVEDRFNASLGTYHDLLKIIKDKDFLDNEENEDILEDIVLTLTLFEDREMIEERLKTYAHLFDDKVMKQLKRRRYTGWGRLSRKLINGIRDKQSGKTILDFLKSDGFANRNFMQLIHDDSLTFKEDIQKAQVSGQGDSLHEHIANLAGSPAIKKGILQTVKVVDELVKVMGRHKPENIVIEMARENQTTQKGQKNSRERMKRIEEGIKELGSQILKEHPVENTQLQNEKLYLYYLQNGRDMYVDQELDINRLSDYDVDHIVPQSFLKDDSIDNKVLTRSDKARGKSDNVPSEEVVKKMKNYWRQLLNAKLITQRKFDNLTKAERGGLSELDKAGFIKRQLVETRQITKHVAQILDSRMNTKYDENDKLIREVKVITLKSKLVSDFRKDFQFYKVREINNYHHAHDAYLNAVVGTALIKKYPKLESEFVYGDYKVYDVRKMIAKSEQEIGKATAKYFFYSNIMNFFKTEITLANGEIRKRPLIETNGETGEIVWDKGRDFATVRKVLSMPQVNIVKKTEVQTGGFSKESILPKRNSDKLIARKKDWDPKKYGGFDSPTVAYSVLVVAKVEKGKSKKLKSVKELLGITIMERSSFEKNPIDFLEAKGYKEVKKDLIIKLPKYSLFELENGRKRMLASAGELQKGNELALPSKYVNFLYLASHYEKLKGSPEDNEQKQLFVEQHKHYLDEIIEQISEFSKRVILADANLDKVLSAYNKHRDKPIREQAENIIHLFTLTNLGAPAAFKYFDTTIDRKRYTSTKEVLDATLIHQSITGLYETRIDLSQLGGDGGGSSPAPGGGGGTVSLQDEHRLFDIPVTTSLPDVWLQDFPQAWAETGGLGRAKCQAPIIIDLKPTAVPVSIKQYPMSLEAHMGIRQHIIKFLELGVLRPCRSPWNTPLLPVKKPGTQDYRPVQDLREINKRTVDIHPTVPNPYNLLSTLKPDYSWYTVLDLKDAFFCLPLAPQSQELFAFEWKDPERGISGQLTWTRLPQGFKNSPTLFNEALHRDLTDFRTQHPEVTLLQYVDDLLLAAPTKKACTQGTRHLLQELGEKGYRASAKKAQICQTKVTYLGYILSEGKRWLTPGRIETVARIPPPRNPREVREFLGKAGFCRLFIPGFAELAAPLYALTKPSTPFTWQTEHQLAFEALKKALLSAPALGLPDTSKPFTLFLDERQGIAKGVLTQKLGPWKRPVAYLSKKLDPVAAGWPPCLRIMAATAMLVKDSAKLTLGQPLTVITPHTLEAIVRQPPDRWITNARLTHYQALLLDTDRVQFGPPVTLNPATLLPVPENQPSPHDCRQVLAETHGTREDLKDQELPDADHTWYTDGSSYLDSGTRRAGAAVVDGHNTIWAQSLPPGTSAQKAELIALTKALELSKGKKANIYTDSRYAFATAHTHGSIYERRGWLTSEGKEIKNKAEIIALLKALFLPQEVAIIHCPGHQKGQDPVAVGNRQADRVARQAAMAEVLTLATEPDNTSHITAGKRTADGSEFEKRTADGSEFESPKKKAKVE

SEQ ID NO: 1963 - protein, 2101 aa, synthetic construct
MPAAKRVKLDGGDKKYSIGLDIGTNSVGWAVITDEYKVPSKKFKVLGNTDRHSIKKNLIGALLFDSGETAEATRLKRTARRRYTRRKNRICYLQEIFSNEMAKVDDSFFHRLEESFLVEEDKKHERHPIFGNIVDEVAYHEKYPTIYHLRKKLVDSTDKADLRLIYLALAHMIKFRGHFLIEGDLNPDNSDVDKLFIQLVQTYNQLFEENPINASGVDAKAILSARLSKSRRLENLIAQLPGEKKNGLFGNLIALSLGLTPNFKSNFDLAEDAKLQLSKDTYDDDLDNLLAQIGDQYADLFLAAKNLSDAILLSDILRVNTEITKAPLSASMIKRYDEHHQDLTLLKALVRQQLPEKYKEIFFDQSKNGYAGYIDGGASQEEFYKFIKPILEKMDGTEELLVKLNREDLLRKQRTFDNGSIPHQIHLGELHAILRRQEDFYPFLKDNREKIEKILTFRIPYYVGPLARGNSRFAWMTRKSEETITPWNFEEVVDKGASAQSFIERMTNFDKNLPNEKVLPKHSLLYEYFTVYNELTKVKYVTEGMRKPAFLSGEQKKAIVDLLFKTNRKVTVKQLKEDYFKKIECFDSVEISGVEDRFNASLGTYHDLLKIIKDKDFLDNEENEDILEDIVLTLTLFEDREMIEERLKTYAHLFDDKVMKQLKRRRYTGWGRLSRKLINGIRDKQSGKTILDFLKSDGFANRNFMQLIHDDSLTFKEDIQKAQVSGQGDSLHEHIANLAGSPAIKKGILQTVKVVDELVKVMGRHKPENIVIEMARENQTTQKGQKNSRERMKRIEEGIKELGSQILKEHPVENTQLQNEKLYLYYLQNGRDMYVDQELDINRLSDYDVDHIVPQSFLKDDSIDNKVLTRSDKARGKSDNVPSEEVVKKMKNYWRQLLNAKLITQRKFDNLTKAERGGLSELDKAGFIKRQLVETRQITKHVAQILDSRMNTKYDENDKLIREVKVITLKSKLVSDFRKDFQFYKVREINNYHHAHDAYLNAVVGTALIKKYPKLESEFVYGDYKVYDVRKMIAKSEQEIGKATAKYFFYSNIMNFFKTEITLANGEIRKRPLIETNGETGEIVWDKGRDFATVRKVLSMPQVNIVKKTEVQTGGFSKESILPKRNSDKLIARKKDWDPKKYGGFDSPTVAYSVLVVAKVEKGKSKKLKSVKELLGITIMERSSFEKNPIDFLEAKGYKEVKKDLIIKLPKYSLFELENGRKRMLASAGELQKGNELALPSKYVNFLYLASHYEKLKGSPEDNEQKQLFVEQHKHYLDEIIEQISEFSKRVILADANLDKVLSAYNKHRDKPIREQAENIIHLFTLTNLGAPAAFKYFDTTIDRKRYTSTKEVLDATLIHQSITGLYETRIDLSQLGGDGGEAAAKEAAAKGGTVSLQDEHRLFDIPVTTSLPDVWLQDFPQAWAETGGLGRAKCQAPIIIDLKPTAVPVSIKQYPMSLEAHMGIRQHIIKFLELGVLRPCRSPWNTPLLPVKKPGTQDYRPVQDLREINKRTVDIHPTVPNPYNLLSTLKPDYSWYTVLDLKDAFFCLPLAPQSQELFAFEWKDPERGISGQLTWTRLPQGFKNSPTLFNEALHRDLTDFRTQHPEVTLLQYVDDLLLAAPTKKACTQGTRHLLQELGEKGYRASAKKAQICQTKVTYLGYILSEGKRWLTPGRIETVARIPPPRNPREVREFLGKAGFCRLFIPGFAELAAPLYALTKPSTPFTWQTEHQLAFEALKKALLSAPALGLPDTSKPFTLFLDERQGIAKGVLTQKLGPWKRPVAYLSKKLDPVAAGWPPCLRIMAATAMLVKDSAKLTLGQPLTVITPHTLEAIVRQPPDRWITNARLTHYQALLLDTDRVQFGPPVTLNPATLLPVPENQPSPHDCRQVLAETHGTREDLKDQELPDADHTWYTDGSSYLDSGTRRAGAAVVDGHNTIWAQSLPPGTSAQKAELIALTKALELSKGKKANIYTDSRYAFATAHTHGSIYERRGWLTSEGKEIKNKAEIIALLKALFLPQEVAIIHCPGHQKGQDPVAVGNRQADRVARQAAMAEVLTLATEPDNTSHITAGKRTADGSEFEKRTADGSEFESPKKKAKVE

SEQ ID NO: 1964 - protein, 2100 aa, synthetic construct
MPAAKRVKLDGGDKKYSIGLDIGTNSVGWAVITDEYKVPSKKFKVLGNTDRHSIKKNLIGALLFDSGETAEATRLKRTARRRYTRRKNRICYLQEIFSNEMAKVDDSFFHRLEESFLVEEDKKHERHPIFGNIVDEVAYHEKYPTIYHLRKKLVDSTDKADLRLIYLALAHMIKFRGHFLIEGDLNPDNSDVDKLFIQLVQTYNQLFEENPINASGVDAKAILSARLSKSRRLENLIAQLPGEKKNGLFGNLIALSLGLTPNFKSNFDLAEDAKLQLSKDTYDDDLDNLLAQIGDQYADLFLAAKNLSDAILLSDILRVNTEITKAPLSASMIKRYDEHHQDLTLLKALVRQQLPEKYKEIFFDQSKNGYAGYIDGGASQEEFYKFIKPILEKMDGTEELLVKLNREDLLRKQRTFDNGSIPHQIHLGELHAILRRQEDFYPFLKDNREKIEKILTFRIPYYVGPLARGNSRFAWMTRKSEETITPWNFEEVVDKGASAQSFIERMTNFDKNLPNEKVLPKHSLLYEYFTVYNELTKVKYVTEGMRKPAFLSGEQKKAIVDLLFKTNRKVTVKQLKEDYFKKIECFDSVEISGVEDRFNASLGTYHDLLKIIKDKDFLDNEENEDILEDIVLTLTLFEDREMIEERLKTYAHLFDDKVMKQLKRRRYTGWGRLSRKLINGIRDKQSGKTILDFLKSDGFANRNFMQLIHDDSLTFKEDIQKAQVSGQGDSLHEHIANLAGSPAIKKGILQTVKVVDELVKVMGRHKPENIVIEMARENQTTQKGQKNSRERMKRIEEGIKELGSQILKEHPVENTQLQNEKLYLYYLQNGRDMYVDQELDINRLSDYDVDHIVPQSFLKDDSIDNKVLTRSDKARGKSDNVPSEEVVKKMKNYWRQLLNAKLITQRKFDNLTKAERGGLSELDKAGFIKRQLVETRQITKHVAQILDSRMNTKYDENDKLIREVKVITLKSKLVSDFRKDFQFYKVREINNYHHAHDAYLNAVVGTALIKKYPKLESEFVYGDYKVYDVRKMIAKSEQEIGKATAKYFFYSNIMNFFKTEITLANGEIRKRPLIETNGETGEIVWDKGRDFATVRKVLSMPQVNIVKKTEVQTGGFSKESILPKRNSDKLIARKKDWDPKKYGGFDSPTVAYSVLVVAKVEKGKSKKLKSVKELLGITIMERSSFEKNPIDFLEAKGYKEVKKDLIIKLPKYSLFELENGRKRMLASAGELQKGNELALPSKYVNFLYLASHYEKLKGSPEDNEQKQLFVEQHKHYLDEIIEQISEFSKRVILADANLDKVLSAYNKHRDKPIREQAENIIHLFTLTNLGAPAAFKYFDTTIDRKRYTSTKEVLDATLIHQSITGLYETRIDLSQLGGDGGGGSPAPGSSGGTVSLQDEHRLFDIPVTTSLPDVWLQDFPQAWAETGGLGRAKCQAPIIIDLKPTAVPVSIKQYPMSLEAHMGIRQHIIKFLELGVLRPCRSPWNTPLLPVKKPGTQDYRPVQDLREINKRTVDIHPTVPNPYNLLSTLKPDYSWYTVLDLKDAFFCLPLAPQSQELFAFEWKDPERGISGQLTWTRLPQGFKNSPTLFNEALHRDLTDFRTQHPEVTLLQYVDDLLLAAPTKKACTQGTRHLLQELGEKGYRASAKKAQICQTKVTYLGYILSEGKRWLTPGRIETVARIPPPRNPREVREFLGKAGFCRLFIPGFAELAAPLYALTKPSTPFTWQTEHQLAFEALKKALLSAPALGLPDTSKPFTLFLDERQGIAKGVLTQKLGPWKRPVAYLSKKLDPVAAGWPPCLRIMAATAMLVKDSAKLTLGQPLTVITPHTLEAIVRQPPDRWITNARLTHYQALLLDTDRVQFGPPVTLNPATLLPVPENQPSPHDCRQVLAETHGTREDLKDQELPDADHTWYTDGSSYLDSGTRRAGAAVVDGHNTIWAQSLPPGTSAQKAELIALTKALELSKGKKANIYTDSRYAFATAHTHGSIYERRGWLTSEGKEIKNKAEIIALLKALFLPQEVAIIHCPGHQKGQDPVAVGNRQADRVARQAAMAEVLTLATEPDNTSHITAGKRTADGSEFEKRTADGSEFESPKKKAKVE

SEQ ID NO: 1965 - protein, 2099 aa, synthetic construct
MPAAKRVKLDGGDKKYSIGLDIGTNSVGWAVITDEYKVPSKKFKVLGNTDRHSIKKNLIGALLFDSGETAEATRLKRTARRRYTRRKNRICYLQEIFSNEMAKVDDSFFHRLEESFLVEEDKKHERHPIFGNIVDEVAYHEKYPTIYHLRKKLVDSTDKADLRLIYLALAHMIKFRGHFLIEGDLNPDNSDVDKLFIQLVQTYNQLFEENPINASGVDAKAILSARLSKSRRLENLIAQLPGEKKNGLFGNLIALSLGLTPNFKSNFDLAEDAKLQLSKDTYDDDLDNLLAQIGDQYADLFLAAKNLSDAILLSDILRVNTEITKAPLSASMIKRYDEHHQDLTLLKALVRQQLPEKYKEIFFDQSKNGYAGYIDGGASQEEFYKFIKPILEKMDGTEELLVKLNREDLLRKQRTFDNGSIPHQIHLGELHAILRRQEDFYPFLKDNREKIEKILTFRIPYYVGPLARGNSRFAWMTRKSEETITPWNFEEVVDKGASAQSFIERMTNFDKNLPNEKVLPKHSLLYEYFTVYNELTKVKYVTEGMRKPAFLSGEQKKAIVDLLFKTNRKVTVKQLKEDYFKKIECFDSVEISGVEDRFNASLGTYHDLLKIIKDKDFLDNEENEDILEDIVLTLTLFEDREMIEERLKTYAHLFDDKVMKQLKRRRYTGWGRLSRKLINGIRDKQSGKTILDFLKSDGFANRNFMQLIHDDSLTFKEDIQKAQVSGQGDSLHEHIANLAGSPAIKKGILQTVKVVDELVKVMGRHKPENIVIEMARENQTTQKGQKNSRERMKRIEEGIKELGSQILKEHPVENTQLQNEKLYLYYLQNGRDMYVDQELDINRLSDYDVDHIVPQSFLKDDSIDNKVLTRSDKARGKSDNVPSEEVVKKMKNYWRQLLNAKLITQRKFDNLTKAERGGLSELDKAGFIKRQLVETRQITKHVAQILDSRMNTKYDENDKLIREVKVITLKSKLVSDFRKDFQFYKVREINNYHHAHDAYLNAVVGTALIKKYPKLESEFVYGDYKVYDVRKMIAKSEQEIGKATAKYFFYSNIMNFFKTEITLANGEIRKRPLIETNGETGEIVWDKGRDFATVRKVLSMPQVNIVKKTEVQTGGFSKESILPKRNSDKLIARKKDWDPKKYGGFDSPTVAYSVLVVAKVEKGKSKKLKSVKELLGITIMERSSFEKNPIDFLEAKGYKEVKKDLIIKLPKYSLFELENGRKRMLASAGELQKGNELALPSKYVNFLYLASHYEKLKGSPEDNEQKQLFVEQHKHYLDEIIEQISEFSKRVILADANLDKVLSAYNKHRDKPIREQAENIIHLFTLTNLGAPAAFKYFDTTIDRKRYTSTKEVLDATLIHQSITGLYETRIDLSQLGGDGGGSSEAAAKGGTVSLQDEHRLFDIPVTTSLPDVWLQDFPQAWAETGGLGRAKCQAPIIIDLKPTAVPVSIKQYPMSLEAHMGIRQHIIKFLELGVLRPCRSPWNTPLLPVKKPGTQDYRPVQDLREINKRTVDIHPTVPNPYNLLSTLKPDYSWYTVLDLKDAFFCLPLAPQSQELFAFEWKDPERGISGQLTWTRLPQGFKNSPTLFNEALHRDLTDFRTQHPEVTLLQYVDDLLLAAPTKKACTQGTRHLLQELGEKGYRASAKKAQICQTKVTYLGYILSEGKRWLTPGRIETVARIPPPRNPREVREFLGKAGFCRLFIPGFAELAAPLYALTKPSTPFTWQTEHQLAFEALKKALLSAPALGLPDTSKPFTLFLDERQGIAKGVLTQKLGPWKRPVAYLSKKLDPVAAGWPPCLRIMAATAMLVKDSAKLTLGQPLTVITPHTLEAIVRQPPDRWITNARLTHYQALLLDTDRVQFGPPVTLNPATLLPVPENQPSPHDCRQVLAETHGTREDLKDQELPDADHTWYTDGSSYLDSGTRRAGAAVVDGHNTIWAQSLPPGTSAQKAELIALTKALELSKGKKANIYTDSRYAFATAHTHGSIYERRGWLTSEGKEIKNKAEIIALLKALFLPQEVAIIHCPGHQKGQDPVAVGNRQADRVARQAAMAEVLTLATEPDNTSHITAGKRTADGSEFEKRTADGSEFESPKKKAKVE

SEQ ID NO: 1966 - protein, 2111 aa, synthetic construct
MPAAKRVKLDGGDKKYSIGLDIGTNSVGWAVITDEYKVPSKKFKVLGNTDRHSIKKNLIGALLFDSGETAEATRLKRTARRRYTRRKNRICYLQEIFSNEMAKVDDSFFHRLEESFLVEEDKKHERHPIFGNIVDEVAYHEKYPTIYHLRKKLVDSTDKADLRLIYLALAHMIKFRGHFLIEGDLNPDNSDVDKLFIQLVQTYNQLFEENPINASGVDAKAILSARLSKSRRLENLIAQLPGEKKNGLFGNLIALSLGLTPNFKSNFDLAEDAKLQLSKDTYDDDLDNLLAQIGDQYADLFLAAKNLSDAILLSDILRVNTEITKAPLSASMIKRYDEHHQDLTLLKALVRQQLPEKYKEIFFDQSKNGYAGYIDGGASQEEFYKFIKPILEKMDGTEELLVKLNREDLLRKQRTFDNGSIPHQIHLGELHAILRRQEDFYPFLKDNREKIEKILTFRIPYYVGPLARGNSRFAWMTRKSEETITPWNFEEVVDKGASAQSFIERMTNFDKNLPNEKVLPKHSLLYEYFTVYNELTKVKYVTEGMRKPAFLSGEQKKAIVDLLFKTNRKVTVKQLKEDYFKKIECFDSVEISGVEDRFNASLGTYHDLLKIIKDKDFLDNEENEDILEDIVLTLTLFEDREMIEERLKTYAHLFDDKVMKQLKRRRYTGWGRLSRKLINGIRDKQSGKTILDFLKSDGFANRNFMQLIHDDSLTFKEDIQKAQVSGQGDSLHEHIANLAGSPAIKKGILQTVKVVDELVKVMGRHKPENIVIEMARENQTTQKGQKNSRERMKRIEEGIKELGSQILKEHPVENTQLQNEKLYLYYLQNGRDMYVDQELDINRLSDYDVDHIVPQSFLKDDSIDNKVLTRSDKARGKSDNVPSEEVVKKMKNYWRQLLNAKLITQRKFDNLTKAERGGLSELDKAGFIKRQLVETRQITKHVAQILDSRMNTKYDENDKLIREVKVITLKSKLVSDFRKDFQFYKVREINNYHHAHDAYLNAVVGTALIKKYPKLESEFVYGDYKVYDVRKMIAKSEQEIGKATAKYFFYSNIMNFFKTEITLANGEIRKRPLIETNGETGEIVWDKGRDFATVRKVLSMPQVNIVKKTEVQTGGFSKESILPKRNSDKLIARKKDWDPKKYGGFDSPTVAYSVLVVAKVEKGKSKKLKSVKELLGITIMERSSFEKNPIDFLEAKGYKEVKKDLIIKLPKYSLFELENGRKRMLASAGELQKGNELALPSKYVNFLYLASHYEKLKGSPEDNEQKQLFVEQHKHYLDEIIEQISEFSKRVILADANLDKVLSAYNKHRDKPIREQAENIIHLFTLTNLGAPAAFKYFDTTIDRKRYTSTKEVLDATLIHQSITGLYETRIDLSQLGGDGGGGGGSGGGGSGGGGSGGGGSGGTVSLQDEHRLFDIPVTTSLPDVWLQDFPQAWAETGGLGRAKCQAPIIIDLKPTAVPVSIKQYPMSLEAHMGIRQHIIKFLELGVLRPCRSPWNTPLLPVKKPGTQDYRPVQDLREINKRTVDIHPTVPNPYNLLSTLKPDYSWYTVLDLKDAFFCLPLAPQSQELFAFEWKDPERGISGQLTWTRLPQGFKNSPTLFNEALHRDLTDFRTQHPEVTLLQYVDDLLLAAPTKKACTQGTRHLLQELGEKGYRASAKKAQICQTKVTYLGYILSEGKRWLTPGRIETVARIPPPRNPREVREFLGKAGFCRLFIPGFAELAAPLYALTKPSTPFTWQTEHQLAFEALKKALLSAPALGLPDTSKPFTLFLDERQGIAKGVLTQKLGPWKRPVAYLSKKLDPVAAGWPPCLRIMAATAMLVKDSAKLTLGQPLTVITPHTLEAIVRQPPDRWITNARLTHYQALLLDTDRVQFGPPVTLNPATLLPVPENQPSPHDCRQVLAETHGTREDLKDQELPDADHTWYTDGSSYLDSGTRRAGAAVVDGHNTIWAQSLPPGTSAQKAELIALTKALELSKGKKANIYTDSRYAFATAHTHGSIYERRGWLTSEGKEIKNKAEIIALLKALFLPQEVAIIHCPGHQKGQDPVAVGNRQADRVARQAAMAEVLTLATEPDNTSHITAGKRTADGSEFEKRTADGSEFESPKKKAKVE

SEQ ID NO: 1967 - protein, 2137 aa, synthetic construct
MPAAKRVKLDGGDKKYSIGLDIGTNSVGWAVITDEYKVPSKKFKVLGNTDRHSIKKNLIGALLFDSGETAEATRLKRTARRRYTRRKNRICYLQEIFSNEMAKVDDSFFHRLEESFLVEEDKKHERHPIFGNIVDEVAYHEKYPTIYHLRKKLVDSTDKADLRLIYLALAHMIKFRGHFLIEGDLNPDNSDVDKLFIQLVQTYNQLFEENPINASGVDAKAILSARLSKSRRLENLIAQLPGEKKNGLFGNLIALSLGLTPNFKSNFDLAEDAKLQLSKDTYDDDLDNLLAQIGDQYADLFLAAKNLSDAILLSDILRVNTEITKAPLSASMIKRYDEHHQDLTLLKALVRQQLPEKYKEIFFDQSKNGYAGYIDGGASQEEFYKFIKPILEKMDGTEELLVKLNREDLLRKQRTFDNGSIPHQIHLGELHAILRRQEDFYPFLKDNREKIEKILTFRIPYYVGPLARGNSRFAWMTRKSEETITPWNFEEVVDKGASAQSFIERMTNFDKNLPNEKVLPKHSLLYEYFTVYNELTKVKYVTEGMRKPAFLSGEQKKAIVDLLFKTNRKVTVKQLKEDYFKKIECFDSVEISGVEDRFNASLGTYHDLLKIIKDKDFLDNEENEDILEDIVLTLTLFEDREMIEERLKTYAHLFDDKVMKQLKRRRYTGWGRLSRKLINGIRDKQSGKTILDFLKSDGFANRNFMQLIHDDSLTFKEDIQKAQVSGQGDSLHEHIANLAGSPAIKKGILQTVKVVDELVKVMGRHKPENIVIEMARENQTTQKGQKNSRERMKRIEEGIKELGSQILKEHPVENTQLQNEKLYLYYLQNGRDMYVDQELDINRLSDYDVDHIVPQSFLKDDSIDNKVLTRSDKARGKSDNVPSEEVVKKMKNYWRQLLNAKLITQRKFDNLTKAERGGLSELDKAGFIKRQLVETRQITKHVAQILDSRMNTKYDENDKLIREVKVITLKSKLVSDFRKDFQFYKVREINNYHHAHDAYLNAVVGTALIKKYPKLESEFVYGDYKVYDVRKMIAKSEQEIGKATAKYFFYSNIMNFFKTEITLANGEIRKRPLIETNGETGEIVWDKGRDFATVRKVLSMPQVNIVKKTEVQTGGFSKESILPKRNSDKLIARKKDWDPKKYGGFDSPTVAYSVLVVAKVEKGKSKKLKSVKELLGITIMERSSFEKNPIDFLEAKGYKEVKKDLIIKLPKYSLFELENGRKRMLASAGELQKGNELALPSKYVNFLYLASHYEKLKGSPEDNEQKQLFVEQHKHYLDEIIEQISEFSKRVILADANLDKVLSAYNKHRDKPIREQAENIIHLFTLTNLGAPAAFKYFDTTIDRKRYTSTKEVLDATLIHQSITGLYETRIDLSQLGGDGGAEAAAKEAAAKEAAAKEAAAKALEAEAAAKEAAAKEAAAKEAAAKAGGTVSLQDEHRLFDIPVTTSLPDVWLQDFPQAWAETGGLGRAKCQAPIIIDLKPTAVPVSIKQYPMSLEAHMGIRQHIIKFLELGVLRPCRSPWNTPLLPVKKPGTQDYRPVQDLREINKRTVDIHPTVPNPYNLLSTLKPDYSWYTVLDLKDAFFCLPLAPQSQELFAFEWKDPERGISGQLTWTRLPQGFKNSPTLFNEALHRDLTDFRTQHPEVTLLQYVDDLLLAAPTKKACTQGTRHLLQELGEKGYRASAKKAQICQTKVTYLGYILSEGKRWLTPGRIETVARIPPPRNPREVREFLGKAGFCRLFIPGFAELAAPLYALTKPSTPFTWQTEHQLAFEALKKALLSAPALGLPDTSKPFTLFLDERQGIAKGVLTQKLGPWKRPVAYLSKKLDPVAAGWPPCLRIMAATAMLVKDSAKLTLGQPLTVITPHTLEAIVRQPPDRWITNARLTHYQALLLDTDRVQFGPPVTLNPATLLPVPENQPSPHDCRQVLAETHGTREDLKDQELPDADHTWYTDGSSYLDSGTRRAGAAVVDGHNTIWAQSLPPGTSAQKAELIALTKALELSKGKKANIYTDSRYAFATAHTHGSIYERRGWLTSEGKEIKNKAEIIALLKALFLPQEVAIIHCPGHQKGQDPVAVGNRQADRVARQAAMAEVLTLATEPDNTSHITAGKRTADGSEFEKRTADGSEFESPKKKAKVE

SEQ ID NO: 1968 - protein, 2102 aa, synthetic construct
MPAAKRVKLDGGDKKYSIGLDIGTNSVGWAVITDEYKVPSKKFKVLGNTDRHSIKKNLIGALLFDSGETAEATRLKRTARRRYTRRKNRICYLQEIFSNEMAKVDDSFFHRLEESFLVEEDKKHERHPIFGNIVDEVAYHEKYPTIYHLRKKLVDSTDKADLRLIYLALAHMIKFRGHFLIEGDLNPDNSDVDKLFIQLVQTYNQLFEENPINASGVDAKAILSARLSKSRRLENLIAQLPGEKKNGLFGNLIALSLGLTPNFKSNFDLAEDAKLQLSKDTYDDDLDNLLAQIGDQYADLFLAAKNLSDAILLSDILRVNTEITKAPLSASMIKRYDEHHQDLTLLKALVRQQLPEKYKEIFFDQSKNGYAGYIDGGASQEEFYKFIKPILEKMDGTEELLVKLNREDLLRKQRTFDNGSIPHQIHLGELHAILRRQEDFYPFLKDNREKIEKILTFRIPYYVGPLARGNSRFAWMTRKSEETITPWNFEEVVDKGASAQSFIERMTNFDKNLPNEKVLPKHSLLYEYFTVYNELTKVKYVTEGMRKPAFLSGEQKKAIVDLLFKTNRKVTVKQLKEDYFKKIECFDSVEISGVEDRFNASLGTYHDLLKIIKDKDFLDNEENEDILEDIVLTLTLFEDREMIEERLKTYAHLFDDKVMKQLKRRRYTGWGRLSRKLINGIRDKQSGKTILDFLKSDGFANRNFMQLIHDDSLTFKEDIQKAQVSGQGDSLHEHIANLAGSPAIKKGILQTVKVVDELVKVMGRHKPENIVIEMARENQTTQKGQKNSRERMKRIEEGIKELGSQILKEHPVENTQLQNEKLYLYYLQNGRDMYVDQELDINRLSDYDVDHIVPQSFLKDDSIDNKVLTRSDKARGKSDNVPSEEVVKKMKNYWRQLLNAKLITQRKFDNLTKAERGGLSELDKAGFIKRQLVETRQITKHVAQILDSRMNTKYDENDKLIREVKVITLKSKLVSDFRKDFQFYKVREINNYHHAHDAYLNAVVGTALIKKYPKLESEFVYGDYKVYDVRKMIAKSEQEIGKATAKYFFYSNIMNFFKTEITLANGEIRKRPLIETNGETGEIVWDKGRDFATVRKVLSMPQVNIVKKTEVQTGGFSKESILPKRNSDKLIARKKDWDPKKYGGFDSPTVAYSVLVVAKVEKGKSKKLKSVKELLGITIMERSSFEKNPIDFLEAKGYKEVKKDLIIKLPKYSLFELENGRKRMLASAGELQKGNELALPSKYVNFLYLASHYEKLKGSPEDNEQKQLFVEQHKHYLDEIIEQISEFSKRVILADANLDKVLSAYNKHRDKPIREQAENIIHLFTLTNLGAPAAFKYFDTTIDRKRYTSTKEVLDATLIHQSITGLYETRIDLSQLGGDGGPAPGSSEAAAKGGTVSLQDEHRLFDIPVTTSLPDVWLQDFPQAWAETGGLGRAKCQAPIIIDLKPTAVPVSIKQYPMSLEAHMGIRQHIIKFLELGVLRPCRSPWNTPLLPVKKPGTQDYRPVQDLREINKRTVDIHPTVPNPYNLLSTLKPDYSWYTVLDLKDAFFCLPLAPQSQELFAFEWKDPERGISGQLTWTRLPQGFKNSPTLFNEALHRDLTDFRTQHPEVTLLQYVDDLLLAAPTKKACTQGTRHLLQELGEKGYRASAKKAQICQTKVTYLGYILSEGKRWLTPGRIETVARIPPPRNPREVREFLGKAGFCRLFIPGFAELAAPLYALTKPSTPFTWQTEHQLAFEALKKALLSAPALGLPDTSKPFTLFLDERQGIAKGVLTQKLGPWKRPVAYLSKKLDPVAAGWPPCLRIMAATAMLVKDSAKLTLGQPLTVITPHTLEAIVRQPPDRWITNARLTHYQALLLDTDRVQFGPPVTLNPATLLPVPENQPSPHDCRQVLAETHGTREDLKDQELPDADHTWYTDGSSYLDSGTRRAGAAVVDGHNTIWAQSLPPGTSAQKAELIALTKALELSKGKKANIYTDSRYAFATAHTHGSIYERRGWLTSEGKEIKNKAEIIALLKALFLPQEVAIIHCPGHQKGQDPVAVGNRQADRVARQAAMAEVLTLATEPDNTSHITAGKRTADGSEFEKRTADGSEFESPKKKAKVE

SEQ ID NO: 1969 - protein, 2102 aa, synthetic construct
MPAAKRVKLDGGDKKYSIGLDIGTNSVGWAVITDEYKVPSKKFKVLGNTDRHSIKKNLIGALLFDSGETAEATRLKRTARRRYTRRKNRICYLQEIFSNEMAKVDDSFFHRLEESFLVEEDKKHERHPIFGNIVDEVAYHEKYPTIYHLRKKLVDSTDKADLRLIYLALAHMIKFRGHFLIEGDLNPDNSDVDKLFIQLVQTYNQLFEENPINASGVDAKAILSARLSKSRRLENLIAQLPGEKKNGLFGNLIALSLGLTPNFKSNFDLAEDAKLQLSKDTYDDDLDNLLAQIGDQYADLFLAAKNLSDAILLSDILRVNTEITKAPLSASMIKRYDEHHQDLTLLKALVRQQLPEKYKEIFFDQSKNGYAGYIDGGASQEEFYKFIKPILEKMDGTEELLVKLNREDLLRKQRTFDNGSIPHQIHLGELHAILRRQEDFYPFLKDNREKIEKILTFRIPYYVGPLARGNSRFAWMTRKSEETITPWNFEEVVDKGASAQSFIERMTNFDKNLPNEKVLPKHSLLYEYFTVYNELTKVKYVTEGMRKPAFLSGEQKKAIVDLLFKTNRKVTVKQLKEDYFKKIECFDSVEISGVEDRFNASLGTYHDLLKIIKDKDFLDNEENEDILEDIVLTLTLFEDREMIEERLKTYAHLFDDKVMKQLKRRRYTGWGRLSRKLINGIRDKQSGKTILDFLKSDGFANRNFMQLIHDDSLTFKEDIQKAQVSGQGDSLHEHIANLAGSPAIKKGILQTVKVVDELVKVMGRHKPENIVIEMARENQTTQKGQKNSRERMKRIEEGIKELGSQILKEHPVENTQLQNEKLYLYYLQNGRDMYVDQELDINRLSDYDVDHIVPQSFLKDDSIDNKVLTRSDKARGKSDNVPSEEVVKKMKNYWRQLLNAKLITQRKFDNLTKAERGGLSELDKAGFIKRQLVETRQITKHVAQILDSRMNTKYDENDKLIREVKVITLKSKLVSDFRKDFQFYKVREINNYHHAHDAYLNAVVGTALIKKYPKLESEFVYGDYKVYDVRKMIAKSEQEIGKATAKYFFYSNIMNFFKTEITLANGEIRKRPLIETNGETGEIVWDKGRDFATVRKVLSMPQVNIVKKTEVQTGGFSKESILPKRNSDKLIARKKDWDPKKYGGFDSPTVAYSVLVVAKVEKGKSKKLKSVKELLGITIMERSSFEKNPIDFLEAKGYKEVKKDLIIKLPKYSLFELENGRKRMLASAGELQKGNELALPSKYVNFLYLASHYEKLKGSPEDNEQKQLFVEQHKHYLDEIIEQISEFSKRVILADANLDKVLSAYNKHRDKPIREQAENIIHLFTLTNLGAPAAFKYFDTTIDRKRYTSTKEVLDATLIHQSITGLYETRIDLSQLGGDGGGGGEAAAKPAPGGTVSLQDEHRLFDIPVTTSLPDVWLQDFPQAWAETGGLGRAKCQAPIIIDLKPTAVPVSIKQYPMSLEAHMGIRQHIIKFLELGVLRPCRSPWNTPLLPVKKPGTQDYRPVQDLREINKRTVDIHPTVPNPYNLLSTLKPDYSWYTVLDLKDAFFCLPLAPQSQELFAFEWKDPERGISGQLTWTRLPQGFKNSPTLFNEALHRDLTDFRTQHPEVTLLQYVDDLLLAAPTKKACTQGTRHLLQELGEKGYRASAKKAQICQTKVTYLGYILSEGKRWLTPGRIETVARIPPPRNPREVREFLGKAGFCRLFIPGFAELAAPLYALTKPSTPFTWQTEHQLAFEALKKALLSAPALGLPDTSKPFTLFLDERQGIAKGVLTQKLGPWKRPVAYLSKKLDPVAAGWPPCLRIMAATAMLVKDSAKLTLGQPLTVITPHTLEAIVRQPPDRWITNARLTHYQALLLDTDRVQFGPPVTLNPATLLPVPENQPSPHDCRQVLAETHGTREDLKDQELPDADHTWYTDGSSYLDSGTRRAGAAVVDGHNTIWAQSLPPGTSAQKAELIALTKALELSKGKKANIYTDSRYAFATAHTHGSIYERRGWLTSEGKEIKNKAEIIALLKALFLPQEVAIIHCPGHQKGQDPVAVGNRQADRVARQAAMAEVLTLATEPDNTSHITAGKRTADGSEFEKRTADGSEFESPKKKAKVE

SEQ ID NO: 1970 - protein, 2097 aa, synthetic construct
MPAAKRVKLDGGDKKYSIGLDIGTNSVGWAVITDEYKVPSKKFKVLGNTDRHSIKKNLIGALLFDSGETAEATRLKRTARRRYTRRKNRICYLQEIFSNEMAKVDDSFFHRLEESFLVEEDKKHERHPIFGNIVDEVAYHEKYPTIYHLRKKLVDSTDKADLRLIYLALAHMIKFRGHFLIEGDLNPDNSDVDKLFIQLVQTYNQLFEENPINASGVDAKAILSARLSKSRRLENLIAQLPGEKKNGLFGNLIALSLGLTPNFKSNFDLAEDAKLQLSKDTYDDDLDNLLAQIGDQYADLFLAAKNLSDAILLSDILRVNTEITKAPLSASMIKRYDEHHQDLTLLKALVRQQLPEKYKEIFFDQSKNGYAGYIDGGASQEEFYKFIKPILEKMDGTEELLVKLNREDLLRKQRTFDNGSIPHQIHLGELHAILRRQEDFYPFLKDNREKIEKILTFRIPYYVGPLARGNSRFAWMTRKSEETITPWNFEEVVDKGASAQSFIERMTNFDKNLPNEKVLPKHSLLYEYFTVYNELTKVKYVTEGMRKPAFLSGEQKKAIVDLLFKTNRKVTVKQLKEDYFKKIECFDSVEISGVEDRFNASLGTYHDLLKIIKDKDFLDNEENEDILEDIVLTLTLFEDREMIEERLKTYAHLFDDKVMKQLKRRRYTGWGRLSRKLINGIRDKQSGKTILDFLKSDGFANRNFMQLIHDDSLTFKEDIQKAQVSGQGDSLHEHIANLAGSPAIKKGILQTVKVVDELVKVMGRHKPENIVIEMARENQTTQKGQKNSRERMKRIEEGIKELGSQILKEHPVENTQLQNEKLYLYYLQNGRDMYVDQELDINRLSDYDVDHIVPQSFLKDDSIDNKVLTRSDKARGKSDNVPSEEVVKKMKNYWRQLLNAKLITQRKFDNLTKAERGGLSELDKAGFIKRQLVETRQITKHVAQILDSRMNTKYDENDKLIREVKVITLKSKLVSDFRKDFQFYKVREINNYHHAHDAYLNAVVGTALIKKYPKLESEFVYGDYKVYDVRKMIAKSEQEIGKATAKYFFYSNIMNFFKTEITLANGEIRKRPLIETNGETGEIVWDKGRDFATVRKVLSMPQVNIVKKTEVQTGGFSKESILPKRNSDKLIARKKDWDPKKYGGFDSPTVAYSVLVVAKVEKGKSKKLKSVKELLGITIMERSSFEKNPIDFLEAKGYKEVKKDLIIKLPKYSLFELENGRKRMLASAGELQKGNELALPSKYVNFLYLASHYEKLKGSPEDNEQKQLFVEQHKHYLDEIIEQISEFSKRVILADANLDKVLSAYNKHRDKPIREQAENIIHLFTLTNLGAPAAFKYFDTTIDRKRYTSTKEVLDATLIHQSITGLYETRIDLSQLGGDGGGSSGSSGGTVSLQDEHRLFDIPVTTSLPDVWLQDFPQAWAETGGLGRAKCQAPIIIDLKPTAVPVSIKQYPMSLEAHMGIRQHIIKFLELGVLRPCRSPWNTPLLPVKKPGTQDYRPVQDLREINKRTVDIHPTVPNPYNLLSTLKPDYSWYTVLDLKDAFFCLPLAPQSQELFAFEWKDPERGISGQLTWTRLPQGFKNSPTLFNEALHRDLTDFRTQHPEVTLLQYVDDLLLAAPTKKACTQGTRHLLQELGEKGYRASAKKAQICQTKVTYLGYILSEGKRWLTPGRIETVARIPPPRNPREVREFLGKAGFCRLFIPGFAELAAPLYALTKPSTPFTWQTEHQLAFEALKKALLSAPALGLPDTSKPFTLFLDERQGIAKGVLTQKLGPWKRPVAYLSKKLDPVAAGWPPCLRIMAATAMLVKDSAKLTLGQPLTVITPHTLEAIVRQPPDRWITNARLTHYQALLLDTDRVQFGPPVTLNPATLLPVPENQPSPHDCRQVLAETHGTREDLKDQELPDADHTWYTDGSSYLDSGTRRAGAAVVDGHNTIWAQSLPPGTSAQKAELIALTKALELSKGKKANIYTDSRYAFATAHTHGSIYERRGWLTSEGKEIKNKAEIIALLKALFLPQEVAIIHCPGHQKGQDPVAVGNRQADRVARQAAMAEVLTLATEPDNTSHITAGKRTADGSEFEKRTADGSEFESPKKKAKVE

SEQ ID NO: 1971 - protein, 2099 aa, synthetic construct
MPAAKRVKLDGGDKKYSIGLDIGTNSVGWAVITDEYKVPSKKFKVLGNTDRHSIKKNLIGALLFDSGETAEATRLKRTARRRYTRRKNRICYLQEIFSNEMAKVDDSFFHRLEESFLVEEDKKHERHPIFGNIVDEVAYHEKYPTIYHLRKKLVDSTDKADLRLIYLALAHMIKFRGHFLIEGDLNPDNSDVDKLFIQLVQTYNQLFEENPINASGVDAKAILSARLSKSRRLENLIAQLPGEKKNGLFGNLIALSLGLTPNFKSNFDLAEDAKLQLSKDTYDDDLDNLLAQIGDQYADLFLAAKNLSDAILLSDILRVNTEITKAPLSASMIKRYDEHHQDLTLLKALVRQQLPEKYKEIFFDQSKNGYAGYIDGGASQEEFYKFIKPILEKMDGTEELLVKLNREDLLRKQRTFDNGSIPHQIHLGELHAILRRQEDFYPFLKDNREKIEKILTFRIPYYVGPLARGNSRFAWMTRKSEETITPWNFEEVVDKGASAQSFIERMTNFDKNLPNEKVLPKHSLLYEYFTVYNELTKVKYVTEGMRKPAFLSGEQKKAIVDLLFKTNRKVTVKQLKEDYFKKIECFDSVEISGVEDRFNASLGTYHDLLKIIKDKDFLDNEENEDILEDIVLTLTLFEDREMIEERLKTYAHLFDDKVMKQLKRRRYTGWGRLSRKLINGIRDKQSGKTILDFLKSDGFANRNFMQLIHDDSLTFKEDIQKAQVSGQGDSLHEHIANLAGSPAIKKGILQTVKVVDELVKVMGRHKPENIVIEMARENQTTQKGQKNSRERMKRIEEGIKELGSQILKEHPVENTQLQNEKLYLYYLQNGRDMYVDQELDINRLSDYDVDHIVPQSFLKDDSIDNKVLTRSDKARGKSDNVPSEEVVKKMKNYWRQLLNAKLITQRKFDNLTKAERGGLSELDKAGFIKRQLVETRQITKHVAQILDSRMNTKYDENDKLIREVKVITLKSKLVSDFRKDFQFYKVREINNYHHAHDAYLNAVVGTALIKKYPKLESEFVYGDYKVYDVRKMIAKSEQEIGKATAKYFFYSNIMNFFKTEITLANGEIRKRPLIETNGETGEIVWDKGRDFATVRKVLSMPQVNIVKKTEVQTGGFSKESILPKRNSDKLIARKKDWDPKKYGGFDSPTVAYSVLVVAKVEKGKSKKLKSVKELLGITIMERSSFEKNPIDFLEAKGYKEVKKDLIIKLPKYSLFELENGRKRMLASAGELQKGNELALPSKYVNFLYLASHYEKLKGSPEDNEQKQLFVEQHKHYLDEIIEQISEFSKRVILADANLDKVLSAYNKHRDKPIREQAENIIHLFTLTNLGAPAAFKYFDTTIDRKRYTSTKEVLDATLIHQSITGLYETRIDLSQLGGDGGEAAAKGSSGGTVSLQDEHRLFDIPVTTSLPDVWLQDFPQAWAETGGLGRAKCQAPIIIDLKPTAVPVSIKQYPMSLEAHMGIRQHIIKFLELGVLRPCRSPWNTPLLPVKKPGTQDYRPVQDLREINKRTVDIHPTVPNPYNLLSTLKPDYSWYTVLDLKDAFFCLPLAPQSQELFAFEWKDPERGISGQLTWTRLPQGFKNSPTLFNEALHRDLTDFRTQHPEVTLLQYVDDLLLAAPTKKACTQGTRHLLQELGEKGYRASAKKAQICQTKVTYLGYILSEGKRWLTPGRIETVARIPPPRNPREVREFLGKAGFCRLFIPGFAELAAPLYALTKPSTPFTWQTEHQLAFEALKKALLSAPALGLPDTSKPFTLFLDERQGIAKGVLTQKLGPWKRPVAYLSKKLDPVAAGWPPCLRIMAATAMLVKDSAKLTLGQPLTVITPHTLEAIVRQPPDRWITNARLTHYQALLLDTDRVQFGPPVTLNPATLLPVPENQPSPHDCRQVLAETHGTREDLKDQELPDADHTWYTDGSSYLDSGTRRAGAAVVDGHNTIWAQSLPPGTSAQKAELIALTKALELSKGKKANIYTDSRYAFATAHTHGSIYERRGWLTSEGKEIKNKAEIIALLKALFLPQEVAIIHCPGHQKGQDPVAVGNRQADRVARQAAMAEVLTLATEPDNTSHITAGKRTADGSEFEKRTADGSEFESPKKKAKVE

SEQ ID NO: 1972 - protein, 2102 aa, synthetic construct
MPAAKRVKLDGGDKKYSIGLDIGTNSVGWAVITDEYKVPSKKFKVLGNTDRHSIKKNLIGALLFDSGETAEATRLKRTARRRYTRRKNRICYLQEIFSNEMAKVDDSFFHRLEESFLVEEDKKHERHPIFGNIVDEVAYHEKYPTIYHLRKKLVDSTDKADLRLIYLALAHMIKFRGHFLIEGDLNPDNSDVDKLFIQLVQTYNQLFEENPINASGVDAKAILSARLSKSRRLENLIAQLPGEKKNGLFGNLIALSLGLTPNFKSNFDLAEDAKLQLSKDTYDDDLDNLLAQIGDQYADLFLAAKNLSDAILLSDILRVNTEITKAPLSASMIKRYDEHHQDLTLLKALVRQQLPEKYKEIFFDQSKNGYAGYIDGGASQEEFYKFIKPILEKMDGTEELLVKLNREDLLRKQRTFDNGSIPHQIHLGELHAILRRQEDFYPFLKDNREKIEKILTFRIPYYVGPLARGNSRFAWMTRKSEETITPWNFEEVVDKGASAQSFIERMTNFDKNLPNEKVLPKHSLLYEYFTVYNELTKVKYVTEGMRKPAFLSGEQKKAIVDLLFKTNRKVTVKQLKEDYFKKIECFDSVEISGVEDRFNASLGTYHDLLKIIKDKDFLDNEENEDILEDIVLTLTLFEDREMIEERLKTYAHLFDDKVMKQLKRRRYTGWGRLSRKLINGIRDKQSGKTILDFLKSDGFANRNFMQLIHDDSLTFKEDIQKAQVSGQGDSLHEHIANLAGSPAIKKGILQTVKVVDELVKVMGRHKPENIVIEMARENQTTQKGQKNSRERMKRIEEGIKELGSQILKEHPVENTQLQNEKLYLYYLQNGRDMYVDQELDINRLSDYDVDHIVPQSFLKDDSIDNKVLTRSDKARGKSDNVPSEEVVKKMKNYWRQLLNAKLITQRKFDNLTKAERGGLSELDKAGFIKRQLVETRQITKHVAQILDSRMNTKYDENDKLIREVKVITLKSKLVSDFRKDFQFYKVREINNYHHAHDAYLNAVVGTALIKKYPKLESEFVYGDYKVYDVRKMIAKSEQEIGKATAKYFFYSNIMNFFKTEITLANGEIRKRPLIETNGETGEIVWDKGRDFATVRKVLSMPQVNIVKKTEVQTGGFSKESILPKRNSDKLIARKKDWDPKKYGGFDSPTVAYSVLVVAKVEKGKSKKLKSVKELLGITIMERSSFEKNPIDFLEAKGYKEVKKDLIIKLPKYSLFELENGRKRMLASAGELQKGNELALPSKYVNFLYLASHYEKLKGSPEDNEQKQLFVEQHKHYLDEIIEQISEFSKRVILADANLDKVLSAYNKHRDKPIREQAENIIHLFTLTNLGAPAAFKYFDTTIDRKRYTSTKEVLDATLIHQSITGLYETRIDLSQLGGDGGGSSEAAAKGGGGGTVSLQDEHRLFDIPVTTSLPDVWLQDFPQAWAETGGLGRAKCQAPIIIDLKPTAVPVSIKQYPMSLEAHMGIRQHIIKFLELGVLRPCRSPWNTPLLPVKKPGTQDYRPVQDLREINKRTVDIHPTVPNPYNLLSTLKPDYSWYTVLDLKDAFFCLPLAPQSQELFAFEWKDPERGISGQLTWTRLPQGFKNSPTLFNEALHRDLTDFRTQHPEVTLLQYVDDLLLAAPTKKACTQGTRHLLQELGEKGYRASAKKAQICQTKVTYLGYILSEGKRWLTPGRIETVARIPPPRNPREVREFLGKAGFCRLFIPGFAELAAPLYALTKPSTPFTWQTEHQLAFEALKKALLSAPALGLPDTSKPFTLFLDERQGIAKGVLTQKLGPWKRPVAYLSKKLDPVAAGWPPCLRIMAATAMLVKDSAKLTLGQPLTVITPHTLEAIVRQPPDRWITNARLTHYQALLLDTDRVQFGPPVTLNPATLLPVPENQPSPHDCRQVLAETHGTREDLKDQELPDADHTWYTDGSSYLDSGTRRAGAAVVDGHNTIWAQSLPPGTSAQKAELIALTKALELSKGKKANIYTDSRYAFATAHTHGSIYERRGWLTSEGKEIKNKAEIIALLKALFLPQEVAIIHCPGHQKGQDPVAVGNRQADRVARQAAMAEVLTLATEPDNTSHITAGKRTADGSEFEKRTADGSEFESPKKKAKVE

SEQ ID NO: 1973 - protein, 2102 aa, synthetic construct
MPAAKRVKLDGGDKKYSIGLDIGTNSVGWAVITDEYKVPSKKFKVLGNTDRHSIKKNLIGALLFDSGETAEATRLKRTARRRYTRRKNRICYLQEIFSNEMAKVDDSFFHRLEESFLVEEDKKHERHPIFGNIVDEVAYHEKYPTIYHLRKKLVDSTDKADLRLIYLALAHMIKFRGHFLIEGDLNPDNSDVDKLFIQLVQTYNQLFEENPINASGVDAKAILSARLSKSRRLENLIAQLPGEKKNGLFGNLIALSLGLTPNFKSNFDLAEDAKLQLSKDTYDDDLDNLLAQIGDQYADLFLAAKNLSDAILLSDILRVNTEITKAPLSASMIKRYDEHHQDLTLLKALVRQQLPEKYKEIFFDQSKNGYAGYIDGGASQEEFYKFIKPILEKMDGTEELLVKLNREDLLRKQRTFDNGSIPHQIHLGELHAILRRQEDFYPFLKDNREKIEKILTFRIPYYVGPLARGNSRFAWMTRKSEETITPWNFEEVVDKGASAQSFIERMTNFDKNLPNEKVLPKHSLLYEYFTVYNELTKVKYVTEGMRKPAFLSGEQKKAIVDLLFKTNRKVTVKQLKEDYFKKIECFDSVEISGVEDRFNASLGTYHDLLKIIKDKDFLDNEENEDILEDIVLTLTLFEDREMIEERLKTYAHLFDDKVMKQLKRRRYTGWGRLSRKLINGIRDKQSGKTILDFLKSDGFANRNFMQLIHDDSLTFKEDIQKAQVSGQGDSLHEHIANLAGSPAIKKGILQTVKVVDELVKVMGRHKPENIVIEMARENQTTQKGQKNSRERMKRIEEGIKELGSQILKEHPVENTQLQNEKLYLYYLQNGRDMYVDQELDINRLSDYDVDHIVPQSFLKDDSIDNKVLTRSDKARGKSDNVPSEEVVKKMKNYWRQLLNAKLITQRKFDNLTKAERGGLSELDKAGFIKRQLVETRQITKHVAQILDSRMNTKYDENDKLIREVKVITLKSKLVSDFRKDFQFYKVREINNYHHAHDAYLNAVVGTALIKKYPKLESEFVYGDYKVYDVRKMIAKSEQEIGKATAKYFFYSNIMNFFKTEITLANGEIRKRPLIETNGETGEIVWDKGRDFATVRKVLSMPQVNIVKKTEVQTGGFSKESILPKRNSDKLIARKKDWDPKKYGGFDSPTVAYSVLVVAKVEKGKSKKLKSVKELLGITIMERSSFEKNPIDFLEAKGYKEVKKDLIIKLPKYSLFELENGRKRMLASAGELQKGNELALPSKYVNFLYLASHYEKLKGSPEDNEQKQLFVEQHKHYLDEIIEQISEFSKRVILADANLDKVLSAYNKHRDKPIREQAENIIHLFTLTNLGAPAAFKYFDTTIDRKRYTSTKEVLDATLIHQSITGLYETRIDLSQLGGDGGPAPEAAAKGGGGGTVSLQDEHRLFDIPVTTSLPDVWLQDFPQAWAETGGLGRAKCQAPIIIDLKPTAVPVSIKQYPMSLEAHMGIRQHIIKFLELGVLRPCRSPWNTPLLPVKKPGTQDYRPVQDLREINKRTVDIHPTVPNPYNLLSTLKPDYSWYTVLDLKDAFFCLPLAPQSQELFAFEWKDPERGISGQLTWTRLPQGFKNSPTLFNEALHRDLTDFRTQHPEVTLLQYVDDLLLAAPTKKACTQGTRHLLQELGEKGYRASAKKAQICQTKVTYLGYILSEGKRWLTPGRIETVARIPPPRNPREVREFLGKAGFCRLFIPGFAELAAPLYALTKPSTPFTWQTEHQLAFEALKKALLSAPALGLPDTSKPFTLFLDERQGIAKGVLTQKLGPWKRPVAYLSKKLDPVAAGWPPCLRIMAATAMLVKDSAKLTLGQPLTVITPHTLEAIVRQPPDRWITNARLTHYQALLLDTDRVQFGPPVTLNPATLLPVPENQPSPHDCRQVLAETHGTREDLKDQELPDADHTWYTDGSSYLDSGTRRAGAAVVDGHNTIWAQSLPPGTSAQKAELIALTKALELSKGKKANIYTDSRYAFATAHTHGSIYERRGWLTSEGKEIKNKAEIIALLKALFLPQEVAIIHCPGHQKGQDPVAVGNRQADRVARQAAMAEVLTLATEPDNTSHITAGKRTADGSEFEKRTADGSEFESPKKKAKVE

SEQ ID NO: 1974 - protein, 2100 aa, synthetic construct
MPAAKRVKLDGGDKKYSIGLDIGTNSVGWAVITDEYKVPSKKFKVLGNTDRHSIKKNLIGALLFDSGETAEATRLKRTARRRYTRRKNRICYLQEIFSNEMAKVDDSFFHRLEESFLVEEDKKHERHPIFGNIVDEVAYHEKYPTIYHLRKKLVDSTDKADLRLIYLALAHMIKFRGHFLIEGDLNPDNSDVDKLFIQLVQTYNQLFEENPINASGVDAKAILSARLSKSRRLENLIAQLPGEKKNGLFGNLIALSLGLTPNFKSNFDLAEDAKLQLSKDTYDDDLDNLLAQIGDQYADLFLAAKNLSDAILLSDILRVNTEITKAPLSASMIKRYDEHHQDLTLLKALVRQQLPEKYKEIFFDQSKNGYAGYIDGGASQEEFYKFIKPILEKMDGTEELLVKLNREDLLRKQRTFDNGSIPHQIHLGELHAILRRQEDFYPFLKDNREKIEKILTFRIPYYVGPLARGNSRFAWMTRKSEETITPWNFEEVVDKGASAQSFIERMTNFDKNLPNEKVLPKHSLLYEYFTVYNELTKVKYVTEGMRKPAFLSGEQKKAIVDLLFKTNRKVTVKQLKEDYFKKIECFDSVEISGVEDRFNASLGTYHDLLKIIKDKDFLDNEENEDILEDIVLTLTLFEDREMIEERLKTYAHLFDDKVMKQLKRRRYTGWGRLSRKLINGIRDKQSGKTILDFLKSDGFANRNFMQLIHDDSLTFKEDIQKAQVSGQGDSLHEHIANLAGSPAIKKGILQTVKVVDELVKVMGRHKPENIVIEMARENQTTQKGQKNSRERMKRIEEGIKELGSQILKEHPVENTQLQNEKLYLYYLQNGRDMYVDQELDINRLSDYDVDHIVPQSFLKDDSIDNKVLTRSDKARGKSDNVPSEEVVKKMKNYWRQLLNAKLITQRKFDNLTKAERGGLSELDKAGFIKRQLVETRQITKHVAQILDSRMNTKYDENDKLIREVKVITLKSKLVSDFRKDFQFYKVREINNYHHAHDAYLNAVVGTALIKKYPKLESEFVYGDYKVYDVRKMIAKSEQEIGKATAKYFFYSNIMNFFKTEITLANGEIRKRPLIETNGETGEIVWDKGRDFATVRKVLSMPQVNIVKKTEVQTGGFSKESILPKRNSDKLIARKKDWDPKKYGGFDSPTVAYSVLVVAKVEKGKSKKLKSVKELLGITIMERSSFEKNPIDFLEAKGYKEVKKDLIIKLPKYSLFELENGRKRMLASAGELQKGNELALPSKYVNFLYLASHYEKLKGSPEDNEQKQLFVEQHKHYLDEIIEQISEFSKRVILADANLDKVLSAYNKHRDKPIREQAENIIHLFTLTNLGAPAAFKYFDTTIDRKRYTSTKEVLDATLIHQSITGLYETRIDLSQLGGDGGGGSGSSGGGGGTVSLQDEHRLFDIPVTTSLPDVWLQDFPQAWAETGGLGRAKCQAPIIIDLKPTAVPVSIKQYPMSLEAHMGIRQHIIKFLELGVLRPCRSPWNTPLLPVKKPGTQDYRPVQDLREINKRTVDIHPTVPNPYNLLSTLKPDYSWYTVLDLKDAFFCLPLAPQSQELFAFEWKDPERGISGQLTWTRLPQGFKNSPTLFNEALHRDLTDFRTQHPEVTLLQYVDDLLLAAPTKKACTQGTRHLLQELGEKGYRASAKKAQICQTKVTYLGYILSEGKRWLTPGRIETVARIPPPRNPREVREFLGKAGFCRLFIPGFAELAAPLYALTKPSTPFTWQTEHQLAFEALKKALLSAPALGLPDTSKPFTLFLDERQGIAKGVLTQKLGPWKRPVAYLSKKLDPVAAGWPPCLRIMAATAMLVKDSAKLTLGQPLTVITPHTLEAIVRQPPDRWITNARLTHYQALLLDTDRVQFGPPVTLNPATLLPVPENQPSPHDCRQVLAETHGTREDLKDQELPDADHTWYTDGSSYLDSGTRRAGAAVVDGHNTIWAQSLPPGTSAQKAELIALTKALELSKGKKANIYTDSRYAFATAHTHGSIYERRGWLTSEGKEIKNKAEIIALLKALFLPQEVAIIHCPGHQKGQDPVAVGNRQADRVARQAAMAEVLTLATEPDNTSHITAGKRTADGSEFEKRTADGSEFESPKKKAKVE

SEQ ID NO: 1975 - protein, 2102 aa, synthetic construct
MPAAKRVKLDGGDKKYSIGLDIGTNSVGWAVITDEYKVPSKKFKVLGNTDRHSIKKNLIGALLFDSGETAEATRLKRTARRRYTRRKNRICYLQEIFSNEMAKVDDSFFHRLEESFLVEEDKKHERHPIFGNIVDEVAYHEKYPTIYHLRKKLVDSTDKADLRLIYLALAHMIKFRGHFLIEGDLNPDNSDVDKLFIQLVQTYNQLFEENPINASGVDAKAILSARLSKSRRLENLIAQLPGEKKNGLFGNLIALSLGLTPNFKSNFDLAEDAKLQLSKDTYDDDLDNLLAQIGDQYADLFLAAKNLSDAILLSDILRVNTEITKAPLSASMIKRYDEHHQDLTLLKALVRQQLPEKYKEIFFDQSKNGYAGYIDGGASQEEFYKFIKPILEKMDGTEELLVKLNREDLLRKQRTFDNGSIPHQIHLGELHAILRRQEDFYPFLKDNREKIEKILTFRIPYYVGPLARGNSRFAWMTRKSEETITPWNFEEVVDKGASAQSFIERMTNFDKNLPNEKVLPKHSLLYEYFTVYNELTKVKYVTEGMRKPAFLSGEQKKAIVDLLFKTNRKVTVKQLKEDYFKKIECFDSVEISGVEDRFNASLGTYHDLLKIIKDKDFLDNEENEDILEDIVLTLTLFEDREMIEERLKTYAHLFDDKVMKQLKRRRYTGWGRLSRKLINGIRDKQSGKTILDFLKSDGFANRNFMQLIHDDSLTFKEDIQKAQVSGQGDSLHEHIANLAGSPAIKKGILQTVKVVDELVKVMGRHKPENIVIEMARENQTTQKGQKNSRERMKRIEEGIKELGSQILKEHPVENTQLQNEKLYLYYLQNGRDMYVDQELDINRLSDYDVDHIVPQSFLKDDSIDNKVLTRSDKARGKSDNVPSEEVVKKMKNYWRQLLNAKLITQRKFDNLTKAERGGLSELDKAGFIKRQLVETRQITKHVAQILDSRMNTKYDENDKLIREVKVITLKSKLVSDFRKDFQFYKVREINNYHHAHDAYLNAVVGTALIKKYPKLESEFVYGDYKVYDVRKMIAKSEQEIGKATAKYFFYSNIMNFFKTEITLANGEIRKRPLIETNGETGEIVWDKGRDFATVRKVLSMPQVNIVKKTEVQTGGFSKESILPKRNSDKLIARKKDWDPKKYGGFDSPTVAYSVLVVAKVEKGKSKKLKSVKELLGITIMERSSFEKNPIDFLEAKGYKEVKKDLIIKLPKYSLFELENGRKRMLASAGELQKGNELALPSKYVNFLYLASHYEKLKGSPEDNEQKQLFVEQHKHYLDEIIEQISEFSKRVILADANLDKVLSAYNKHRDKPIREQAENIIHLFTLTNLGAPAAFKYFDTTIDRKRYTSTKEVLDATLIHQSITGLYETRIDLSQLGGDGGGGGGSSEAAAKGGTVSLQDEHRLFDIPVTTSLPDVWLQDFPQAWAETGGLGRAKCQAPIIIDLKPTAVPVSIKQYPMSLEAHMGIRQHIIKFLELGVLRPCRSPWNTPLLPVKKPGTQDYRPVQDLREINKRTVDIHPTVPNPYNLLSTLKPDYSWYTVLDLKDAFFCLPLAPQSQELFAFEWKDPERGISGQLTWTRLPQGFKNSPTLFNEALHRDLTDFRTQHPEVTLLQYVDDLLLAAPTKKACTQGTRHLLQELGEKGYRASAKKAQICQTKVTYLGYILSEGKRWLTPGRIETVARIPPPRNPREVREFLGKAGFCRLFIPGFAELAAPLYALTKPSTPFTWQTEHQLAFEALKKALLSAPALGLPDTSKPFTLFLDERQGIAKGVLTQKLGPWKRPVAYLSKKLDPVAAGWPPCLRIMAATAMLVKDSAKLTLGQPLTVITPHTLEAIVRQPPDRWITNARLTHYQALLLDTDRVQFGPPVTLNPATLLPVPENQPSPHDCRQVLAETHGTREDLKDQELPDADHTWYTDGSSYLDSGTRRAGAAVVDGHNTIWAQSLPPGTSAQKAELIALTKALELSKGKKANIYTDSRYAFATAHTHGSIYERRGWLTSEGKEIKNKAEIIALLKALFLPQEVAIIHCPGHQKGQDPVAVGNRQADRVARQAAMAEVLTLATEPDNTSHITAGKRTADGSEFEKRTADGSEFESPKKKAKVE

SEQ ID NO: 1976 - protein, 2100 aa, synthetic construct
MPAAKRVKLDGGDKKYSIGLDIGTNSVGWAVITDEYKVPSKKFKVLGNTDRHSIKKNLIGALLFDSGETAEATRLKRTARRRYTRRKNRICYLQEIFSNEMAKVDDSFFHRLEESFLVEEDKKHERHPIFGNIVDEVAYHEKYPTIYHLRKKLVDSTDKADLRLIYLALAHMIKFRGHFLIEGDLNPDNSDVDKLFIQLVQTYNQLFEENPINASGVDAKAILSARLSKSRRLENLIAQLPGEKKNGLFGNLIALSLGLTPNFKSNFDLAEDAKLQLSKDTYDDDLDNLLAQIGDQYADLFLAAKNLSDAILLSDILRVNTEITKAPLSASMIKRYDEHHQDLTLLKALVRQQLPEKYKEIFFDQSKNGYAGYIDGGASQEEFYKFIKPILEKMDGTEELLVKLNREDLLRKQRTFDNGSIPHQIHLGELHAILRRQEDFYPFLKDNREKIEKILTFRIPYYVGPLARGNSRFAWMTRKSEETITPWNFEEVVDKGASAQSFIERMTNFDKNLPNEKVLPKHSLLYEYFTVYNELTKVKYVTEGMRKPAFLSGEQKKAIVDLLFKTNRKVTVKQLKEDYFKKIECFDSVEISGVEDRFNASLGTYHDLLKIIKDKDFLDNEENEDILEDIVLTLTLFEDREMIEERLKTYAHLFDDKVMKQLKRRRYTGWGRLSRKLINGIRDKQSGKTILDFLKSDGFANRNFMQLIHDDSLTFKEDIQKAQVSGQGDSLHEHIANLAGSPAIKKGILQTVKVVDELVKVMGRHKPENIVIEMARENQTTQKGQKNSRERMKRIEEGIKELGSQILKEHPVENTQLQNEKLYLYYLQNGRDMYVDQELDINRLSDYDVDHIVPQSFLKDDSIDNKVLTRSDKARGKSDNVPSEEVVKKMKNYWRQLLNAKLITQRKFDNLTKAERGGLSELDKAGFIKRQLVETRQITKHVAQILDSRMNTKYDENDKLIREVKVITLKSKLVSDFRKDFQFYKVREINNYHHAHDAYLNAVVGTALIKKYPKLESEFVYGDYKVYDVRKMIAKSEQEIGKATAKYFFYSNIMNFFKTEITLANGEIRKRPLIETNGETGEIVWDKGRDFATVRKVLSMPQVNIVKKTEVQTGGFSKESILPKRNSDKLIARKKDWDPKKYGGFDSPTVAYSVLVVAKVEKGKSKKLKSVKELLGITIMERSSFEKNPIDFLEAKGYKEVKKDLIIKLPKYSLFELENGRKRMLASAGELQKGNELALPSKYVNFLYLASHYEKLKGSPEDNEQKQLFVEQHKHYLDEIIEQISEFSKRVILADANLDKVLSAYNKHRDKPIREQAENIIHLFTLTNLGAPAAFKYFDTTIDRKRYTSTKEVLDATLIHQSITGLYETRIDLSQLGGDGGGGSPAPGGGGGTVSLQDEHRLFDIPVTTSLPDVWLQDFPQAWAETGGLGRAKCQAPIIIDLKPTAVPVSIKQYPMSLEAHMGIRQHIIKFLELGVLRPCRSPWNTPLLPVKKPGTQDYRPVQDLREINKRTVDIHPTVPNPYNLLSTLKPDYSWYTVLDLKDAFFCLPLAPQSQELFAFEWKDPERGISGQLTWTRLPQGFKNSPTLFNEALHRDLTDFRTQHPEVTLLQYVDDLLLAAPTKKACTQGTRHLLQELGEKGYRASAKKAQICQTKVTYLGYILSEGKRWLTPGRIETVARIPPPRNPREVREFLGKAGFCRLFIPGFAELAAPLYALTKPSTPFTWQTEHQLAFEALKKALLSAPALGLPDTSKPFTLFLDERQGIAKGVLTQKLGPWKRPVAYLSKKLDPVAAGWPPCLRIMAATAMLVKDSAKLTLGQPLTVITPHTLEAIVRQPPDRWITNARLTHYQALLLDTDRVQFGPPVTLNPATLLPVPENQPSPHDCRQVLAETHGTREDLKDQELPDADHTWYTDGSSYLDSGTRRAGAAVVDGHNTIWAQSLPPGTSAQKAELIALTKALELSKGKKANIYTDSRYAFATAHTHGSIYERRGWLTSEGKEIKNKAEIIALLKALFLPQEVAIIHCPGHQKGQDPVAVGNRQADRVARQAAMAEVLTLATEPDNTSHITAGKRTADGSEFEKRTADGSEFESPKKKAKVE

SEQ ID NO: 1977 - protein, 2102 aa, synthetic construct
MPAAKRVKLDGGDKKYSIGLDIGTNSVGWAVITDEYKVPSKKFKVLGNTDRHSIKKNLIGALLFDSGETAEATRLKRTARRRYTRRKNRICYLQEIFSNEMAKVDDSFFHRLEESFLVEEDKKHERHPIFGNIVDEVAYHEKYPTIYHLRKKLVDSTDKADLRLIYLALAHMIKFRGHFLIEGDLNPDNSDVDKLFIQLVQTYNQLFEENPINASGVDAKAILSARLSKSRRLENLIAQLPGEKKNGLFGNLIALSLGLTPNFKSNFDLAEDAKLQLSKDTYDDDLDNLLAQIGDQYADLFLAAKNLSDAILLSDILRVNTEITKAPLSASMIKRYDEHHQDLTLLKALVRQQLPEKYKEIFFDQSKNGYAGYIDGGASQEEFYKFIKPILEKMDGTEELLVKLNREDLLRKQRTFDNGSIPHQIHLGELHAILRRQEDFYPFLKDNREKIEKILTFRIPYYVGPLARGNSRFAWMTRKSEETITPWNFEEVVDKGASAQSFIERMTNFDKNLPNEKVLPKHSLLYEYFTVYNELTKVKYVTEGMRKPAFLSGEQKKAIVDLLFKTNRKVTVKQLKEDYFKKIECFDSVEISGVEDRFNASLGTYHDLLKIIKDKDFLDNEENEDILEDIVLTLTLFEDREMIEERLKTYAHLFDDKVMKQLKRRRYTGWGRLSRKLINGIRDKQSGKTILDFLKSDGFANRNFMQLIHDDSLTFKEDIQKAQVSGQGDSLHEHIANLAGSPAIKKGILQTVKVVDELVKVMGRHKPENIVIEMARENQTTQKGQKNSRERMKRIEEGIKELGSQILKEHPVENTQLQNEKLYLYYLQNGRDMYVDQELDINRLSDYDVDHIVPQSFLKDDSIDNKVLTRSDKARGKSDNVPSEEVVKKMKNYWRQLLNAKLITQRKFDNLTKAERGGLSELDKAGFIKRQLVETRQITKHVAQILDSRMNTKYDENDKLIREVKVITLKSKLVSDFRKDFQFYKVREINNYHHAHDAYLNAVVGTALIKKYPKLESEFVYGDYKVYDVRKMIAKSEQEIGKATAKYFFYSNIMNFFKTEITLANGEIRKRPLIETNGETGEIVWDKGRDFATVRKVLSMPQVNIVKKTEVQTGGFSKESILPKRNSDKLIARKKDWDPKKYGGFDSPTVAYSVLVVAKVEKGKSKKLKSVKELLGITIMERSSFEKNPIDFLEAKGYKEVKKDLIIKLPKYSLFELENGRKRMLASAGELQKGNELALPSKYVNFLYLASHYEKLKGSPEDNEQKQLFVEQHKHYLDEIIEQISEFSKRVILADANLDKVLSAYNKHRDKPIREQAENIIHLFTLTNLGAPAAFKYFDTTIDRKRYTSTKEVLDATLIHQSITGLYETRIDLSQLGGDGGPAPGGGEAAAKGGTVSLQDEHRLFDIPVTTSLPDVWLQDFPQAWAETGGLGRAKCQAPIIIDLKPTAVPVSIKQYPMSLEAHMGIRQHIIKFLELGVLRPCRSPWNTPLLPVKKPGTQDYRPVQDLREINKRTVDIHPTVPNPYNLLSTLKPDYSWYTVLDLKDAFFCLPLAPQSQELFAFEWKDPERGISGQLTWTRLPQGFKNSPTLFNEALHRDLTDFRTQHPEVTLLQYVDDLLLAAPTKKACTQGTRHLLQELGEKGYRASAKKAQICQTKVTYLGYILSEGKRWLTPGRIETVARIPPPRNPREVREFLGKAGFCRLFIPGFAELAAPLYALTKPSTPFTWQTEHQLAFEALKKALLSAPALGLPDTSKPFTLFLDERQGIAKGVLTQKLGPWKRPVAYLSKKLDPVAAGWPPCLRIMAATAMLVKDSAKLTLGQPLTVITPHTLEAIVRQPPDRWITNARLTHYQALLLDTDRVQFGPPVTLNPATLLPVPENQPSPHDCRQVLAETHGTREDLKDQELPDADHTWYTDGSSYLDSGTRRAGAAVVDGHNTIWAQSLPPGTSAQKAELIALTKALELSKGKKANIYTDSRYAFATAHTHGSIYERRGWLTSEGKEIKNKAEIIALLKALFLPQEVAIIHCPGHQKGQDPVAVGNRQADRVARQAAMAEVLTLATEPDNTSHITAGKRTADGSEFEKRTADGSEFESPKKKAKVE

SEQ ID NO: 1978 - protein, 2100 aa, synthetic construct
MPAAKRVKLDGGDKKYSIGLDIGTNSVGWAVITDEYKVPSKKFKVLGNTDRHSIKKNLIGALLFDSGETAEATRLKRTARRRYTRRKNRICYLQEIFSNEMAKVDDSFFHRLEESFLVEEDKKHERHPIFGNIVDEVAYHEKYPTIYHLRKKLVDSTDKADLRLIYLALAHMIKFRGHFLIEGDLNPDNSDVDKLFIQLVQTYNQLFEENPINASGVDAKAILSARLSKSRRLENLIAQLPGEKKNGLFGNLIALSLGLTPNFKSNFDLAEDAKLQLSKDTYDDDLDNLLAQIGDQYADLFLAAKNLSDAILLSDILRVNTEITKAPLSASMIKRYDEHHQDLTLLKALVRQQLPEKYKEIFFDQSKNGYAGYIDGGASQEEFYKFIKPILEKMDGTEELLVKLNREDLLRKQRTFDNGSIPHQIHLGELHAILRRQEDFYPFLKDNREKIEKILTFRIPYYVGPLARGNSRFAWMTRKSEETITPWNFEEVVDKGASAQSFIERMTNFDKNLPNEKVLPKHSLLYEYFTVYNELTKVKYVTEGMRKPAFLSGEQKKAIVDLLFKTNRKVTVKQLKEDYFKKIECFDSVEISGVEDRFNASLGTYHDLLKIIKDKDFLDNEENEDILEDIVLTLTLFEDREMIEERLKTYAHLFDDKVMKQLKRRRYTGWGRLSRKLINGIRDKQSGKTILDFLKSDGFANRNFMQLIHDDSLTFKEDIQKAQVSGQGDSLHEHIANLAGSPAIKKGILQTVKVVDELVKVMGRHKPENIVIEMARENQTTQKGQKNSRERMKRIEEGIKELGSQILKEHPVENTQLQNEKLYLYYLQNGRDMYVDQELDINRLSDYDVDHIVPQSFLKDDSIDNKVLTRSDKARGKSDNVPSEEVVKKMKNYWRQLLNAKLITQRKFDNLTKAERGGLSELDKAGFIKRQLVETRQITKHVAQILDSRMNTKYDENDKLIREVKVITLKSKLVSDFRKDFQFYKVREINNYHHAHDAYLNAVVGTALIKKYPKLESEFVYGDYKVYDVRKMIAKSEQEIGKATAKYFFYSNIMNFFKTEITLANGEIRKRPLIETNGETGEIVWDKGRDFATVRKVLSMPQVNIVKKTEVQTGGFSKESILPKRNSDKLIARKKDWDPKKYGGFDSPTVAYSVLVVAKVEKGKSKKLKSVKELLGITIMERSSFEKNPIDFLEAKGYKEVKKDLIIKLPKYSLFELENGRKRMLASAGELQKGNELALPSKYVNFLYLASHYEKLKGSPEDNEQKQLFVEQHKHYLDEIIEQISEFSKRVILADANLDKVLSAYNKHRDKPIREQAENIIHLFTLTNLGAPAAFKYFDTTIDRKRYTSTKEVLDATLIHQSITGLYETRIDLSQLGGDGGPAPAPAPAPGGTVSLQDEHRLFDIPVTTSLPDVWLQDFPQAWAETGGLGRAKCQAPIIIDLKPTAVPVSIKQYPMSLEAHMGIRQHIIKFLELGVLRPCRSPWNTPLLPVKKPGTQDYRPVQDLREINKRTVDIHPTVPNPYNLLSTLKPDYSWYTVLDLKDAFFCLPLAPQSQELFAFEWKDPERGISGQLTWTRLPQGFKNSPTLFNEALHRDLTDFRTQHPEVTLLQYVDDLLLAAPTKKACTQGTRHLLQELGEKGYRASAKKAQICQTKVTYLGYILSEGKRWLTPGRIETVARIPPPRNPREVREFLGKAGFCRLFIPGFAELAAPLYALTKPSTPFTWQTEHQLAFEALKKALLSAPALGLPDTSKPFTLFLDERQGIAKGVLTQKLGPWKRPVAYLSKKLDPVAAGWPPCLRIMAATAMLVKDSAKLTLGQPLTVITPHTLEAIVRQPPDRWITNARLTHYQALLLDTDRVQFGPPVTLNPATLLPVPENQPSPHDCRQVLAETHGTREDLKDQELPDADHTWYTDGSSYLDSGTRRAGAAVVDGHNTIWAQSLPPGTSAQKAELIALTKALELSKGKKANIYTDSRYAFATAHTHGSIYERRGWLTSEGKEIKNKAEIIALLKALFLPQEVAIIHCPGHQKGQDPVAVGNRQADRVARQAAMAEVLTLATEPDNTSHITAGKRTADGSEFEKRTADGSEFESPKKKAKVE

SEQ ID NO: 1979 - protein, 2099 aa, synthetic construct
MPAAKRVKLDGGDKKYSIGLDIGTNSVGWAVITDEYKVPSKKFKVLGNTDRHSIKKNLIGALLFDSGETAEATRLKRTARRRYTRRKNRICYLQEIFSNEMAKVDDSFFHRLEESFLVEEDKKHERHPIFGNIVDEVAYHEKYPTIYHLRKKLVDSTDKADLRLIYLALAHMIKFRGHFLIEGDLNPDNSDVDKLFIQLVQTYNQLFEENPINASGVDAKAILSARLSKSRRLENLIAQLPGEKKNGLFGNLIALSLGLTPNFKSNFDLAEDAKLQLSKDTYDDDLDNLLAQIGDQYADLFLAAKNLSDAILLSDILRVNTEITKAPLSASMIKRYDEHHQDLTLLKALVRQQLPEKYKEIFFDQSKNGYAGYIDGGASQEEFYKFIKPILEKMDGTEELLVKLNREDLLRKQRTFDNGSIPHQIHLGELHAILRRQEDFYPFLKDNREKIEKILTFRIPYYVGPLARGNSRFAWMTRKSEETITPWNFEEVVDKGASAQSFIERMTNFDKNLPNEKVLPKHSLLYEYFTVYNELTKVKYVTEGMRKPAFLSGEQKKAIVDLLFKTNRKVTVKQLKEDYFKKIECFDSVEISGVEDRFNASLGTYHDLLKIIKDKDFLDNEENEDILEDIVLTLTLFEDREMIEERLKTYAHLFDDKVMKQLKRRRYTGWGRLSRKLINGIRDKQSGKTILDFLKSDGFANRNFMQLIHDDSLTFKEDIQKAQVSGQGDSLHEHIANLAGSPAIKKGILQTVKVVDELVKVMGRHKPENIVIEMARENQTTQKGQKNSRERMKRIEEGIKELGSQILKEHPVENTQLQNEKLYLYYLQNGRDMYVDQELDINRLSDYDVDHIVPQSFLKDDSIDNKVLTRSDKARGKSDNVPSEEVVKKMKNYWRQLLNAKLITQRKFDNLTKAERGGLSELDKAGFIKRQLVETRQITKHVAQILDSRMNTKYDENDKLIREVKVITLKSKLVSDFRKDFQFYKVREINNYHHAHDAYLNAVVGTALIKKYPKLESEFVYGDYKVYDVRKMIAKSEQEIGKATAKYFFYSNIMNFFKTEITLANGEIRKRPLIETNGETGEIVWDKGRDFATVRKVLSMPQVNIVKKTEVQTGGFSKESILPKRNSDKLIARKKDWDPKKYGGFDSPTVAYSVLVVAKVEKGKSKKLKSVKELLGITIMERSSFEKNPIDFLEAKGYKEVKKDLIIKLPKYSLFELENGRKRMLASAGELQKGNELALPSKYVNFLYLASHYEKLKGSPEDNEQKQLFVEQHKHYLDEIIEQISEFSKRVILADANLDKVLSAYNKHRDKPIREQAENIIHLFTLTNLGAPAAFKYFDTTIDRKRYTSTKEVLDATLIHQSITGLYETRIDLSQLGGDGGGGGGGGGGGGTVSLQDEHRLFDIPVTTSLPDVWLQDFPQAWAETGGLGRAKCQAPIIIDLKPTAVPVSIKQYPMSLEAHMGIRQHIIKFLELGVLRPCRSPWNTPLLPVKKPGTQDYRPVQDLREINKRTVDIHPTVPNPYNLLSTLKPDYSWYTVLDLKDAFFCLPLAPQSQELFAFEWKDPERGISGQLTWTRLPQGFKNSPTLFNEALHRDLTDFRTQHPEVTLLQYVDDLLLAAPTKKACTQGTRHLLQELGEKGYRASAKKAQICQTKVTYLGYILSEGKRWLTPGRIETVARIPPPRNPREVREFLGKAGFCRLFIPGFAELAAPLYALTKPSTPFTWQTEHQLAFEALKKALLSAPALGLPDTSKPFTLFLDERQGIAKGVLTQKLGPWKRPVAYLSKKLDPVAAGWPPCLRIMAATAMLVKDSAKLTLGQPLTVITPHTLEAIVRQPPDRWITNARLTHYQALLLDTDRVQFGPPVTLNPATLLPVPENQPSPHDCRQVLAETHGTREDLKDQELPDADHTWYTDGSSYLDSGTRRAGAAVVDGHNTIWAQSLPPGTSAQKAELIALTKALELSKGKKANIYTDSRYAFATAHTHGSIYERRGWLTSEGKEIKNKAEIIALLKALFLPQEVAIIHCPGHQKGQDPVAVGNRQADRVARQAAMAEVLTLATEPDNTSHITAGKRTADGSEFEKRTADGSEFESPKKKAKVE

SEQ ID NO: 1980 - protein, 2107 aa, synthetic construct
MPAAKRVKLDGGDKKYSIGLDIGTNSVGWAVITDEYKVPSKKFKVLGNTDRHSIKKNLIGALLFDSGETAEATRLKRTARRRYTRRKNRICYLQEIFSNEMAKVDDSFFHRLEESFLVEEDKKHERHPIFGNIVDEVAYHEKYPTIYHLRKKLVDSTDKADLRLIYLALAHMIKFRGHFLIEGDLNPDNSDVDKLFIQLVQTYNQLFEENPINASGVDAKAILSARLSKSRRLENLIAQLPGEKKNGLFGNLIALSLGLTPNFKSNFDLAEDAKLQLSKDTYDDDLDNLLAQIGDQYADLFLAAKNLSDAILLSDILRVNTEITKAPLSASMIKRYDEHHQDLTLLKALVRQQLPEKYKEIFFDQSKNGYAGYIDGGASQEEFYKFIKPILEKMDGTEELLVKLNREDLLRKQRTFDNGSIPHQIHLGELHAILRRQEDFYPFLKDNREKIEKILTFRIPYYVGPLARGNSRFAWMTRKSEETITPWNFEEVVDKGASAQSFIERMTNFDKNLPNEKVLPKHSLLYEYFTVYNELTKVKYVTEGMRKPAFLSGEQKKAIVDLLFKTNRKVTVKQLKEDYFKKIECFDSVEISGVEDRFNASLGTYHDLLKIIKDKDFLDNEENEDILEDIVLTLTLFEDREMIEERLKTYAHLFDDKVMKQLKRRRYTGWGRLSRKLINGIRDKQSGKTILDFLKSDGFANRNFMQLIHDDSLTFKEDIQKAQVSGQGDSLHEHIANLAGSPAIKKGILQTVKVVDELVKVMGRHKPENIVIEMARENQTTQKGQKNSRERMKRIEEGIKELGSQILKEHPVENTQLQNEKLYLYYLQNGRDMYVDQELDINRLSDYDVDHIVPQSFLKDDSIDNKVLTRSDKARGKSDNVPSEEVVKKMKNYWRQLLNAKLITQRKFDNLTKAERGGLSELDKAGFIKRQLVETRQITKHVAQILDSRMNTKYDENDKLIREVKVITLKSKLVSDFRKDFQFYKVREINNYHHAHDAYLNAVVGTALIKKYPKLESEFVYGDYKVYDVRKMIAKSEQEIGKATAKYFFYSNIMNFFKTEITLANGEIRKRPLIETNGETGEIVWDKGRDFATVRKVLSMPQVNIVKKTEVQTGGFSKESILPKRNSDKLIARKKDWDPKKYGGFDSPTVAYSVLVVAKVEKGKSKKLKSVKELLGITIMERSSFEKNPIDFLEAKGYKEVKKDLIIKLPKYSLFELENGRKRMLASAGELQKGNELALPSKYVNFLYLASHYEKLKGSPEDNEQKQLFVEQHKHYLDEIIEQISEFSKRVILADANLDKVLSAYNKHRDKPIREQAENIIHLFTLTNLGAPAAFKYFDTTIDRKRYTSTKEVLDATLIHQSITGLYETRIDLSQLGGDGGSGSETPGTSESATPESGGTVSLQDEHRLFDIPVTTSLPDVWLQDFPQAWAETGGLGRAKCQAPIIIDLKPTAVPVSIKQYPMSLEAHMGIRQHIIKFLELGVLRPCRSPWNTPLLPVKKPGTQDYRPVQDLREINKRTVDIHPTVPNPYNLLSTLKPDYSWYTVLDLKDAFFCLPLAPQSQELFAFEWKDPERGISGQLTWTRLPQGFKNSPTLFNEALHRDLTDFRTQHPEVTLLQYVDDLLLAAPTKKACTQGTRHLLQELGEKGYRASAKKAQICQTKVTYLGYILSEGKRWLTPGRIETVARIPPPRNPREVREFLGKAGFCRLFIPGFAELAAPLYALTKPSTPFTWQTEHQLAFEALKKALLSAPALGLPDTSKPFTLFLDERQGIAKGVLTQKLGPWKRPVAYLSKKLDPVAAGWPPCLRIMAATAMLVKDSAKLTLGQPLTVITPHTLEAIVRQPPDRWITNARLTHYQALLLDTDRVQFGPPVTLNPATLLPVPENQPSPHDCRQVLAETHGTREDLKDQELPDADHTWYTDGSSYLDSGTRRAGAAVVDGHNTIWAQSLPPGTSAQKAELIALTKALELSKGKKANIYTDSRYAFATAHTHGSIYERRGWLTSEGKEIKNKAEIIALLKALFLPQEVAIIHCPGHQKGQDPVAVGNRQADRVARQAAMAEVLTLATEPDNTSHITAGKRTADGSEFEKRTADGSEFESPKKKAKVE

SEQ ID NO: 1981 - protein, 2102 aa, synthetic construct
MPAAKRVKLDGGDKKYSIGLDIGTNSVGWAVITDEYKVPSKKFKVLGNTDRHSIKKNLIGALLFDSGETAEATRLKRTARRRYTRRKNRICYLQEIFSNEMAKVDDSFFHRLEESFLVEEDKKHERHPIFGNIVDEVAYHEKYPTIYHLRKKLVDSTDKADLRLIYLALAHMIKFRGHFLIEGDLNPDNSDVDKLFIQLVQTYNQLFEENPINASGVDAKAILSARLSKSRRLENLIAQLPGEKKNGLFGNLIALSLGLTPNFKSNFDLAEDAKLQLSKDTYDDDLDNLLAQIGDQYADLFLAAKNLSDAILLSDILRVNTEITKAPLSASMIKRYDEHHQDLTLLKALVRQQLPEKYKEIFFDQSKNGYAGYIDGGASQEEFYKFIKPILEKMDGTEELLVKLNREDLLRKQRTFDNGSIPHQIHLGELHAILRRQEDFYPFLKDNREKIEKILTFRIPYYVGPLARGNSRFAWMTRKSEETITPWNFEEVVDKGASAQSFIERMTNFDKNLPNEKVLPKHSLLYEYFTVYNELTKVKYVTEGMRKPAFLSGEQKKAIVDLLFKTNRKVTVKQLKEDYFKKIECFDSVEISGVEDRFNASLGTYHDLLKIIKDKDFLDNEENEDILEDIVLTLTLFEDREMIEERLKTYAHLFDDKVMKQLKRRRYTGWGRLSRKLINGIRDKQSGKTILDFLKSDGFANRNFMQLIHDDSLTFKEDIQKAQVSGQGDSLHEHIANLAGSPAIKKGILQTVKVVDELVKVMGRHKPENIVIEMARENQTTQKGQKNSRERMKRIEEGIKELGSQILKEHPVENTQLQNEKLYLYYLQNGRDMYVDQELDINRLSDYDVDHIVPQSFLKDDSIDNKVLTRSDKARGKSDNVPSEEVVKKMKNYWRQLLNAKLITQRKFDNLTKAERGGLSELDKAGFIKRQLVETRQITKHVAQILDSRMNTKYDENDKLIREVKVITLKSKLVSDFRKDFQFYKVREINNYHHAHDAYLNAVVGTALIKKYPKLESEFVYGDYKVYDVRKMIAKSEQEIGKATAKYFFYSNIMNFFKTEITLANGEIRKRPLIETNGETGEIVWDKGRDFATVRKVLSMPQVNIVKKTEVQTGGFSKESILPKRNSDKLIARKKDWDPKKYGGFDSPTVAYSVLVVAKVEKGKSKKLKSVKELLGITIMERSSFEKNPIDFLEAKGYKEVKKDLIIKLPKYSLFELENGRKRMLASAGELQKGNELALPSKYVNFLYLASHYEKLKGSPEDNEQKQLFVEQHKHYLDEIIEQISEFSKRVILADANLDKVLSAYNKHRDKPIREQAENIIHLFTLTNLGAPAAFKYFDTTIDRKRYTSTKEVLDATLIHQSITGLYETRIDLSQLGGDGGGSSPAPEAAAKGGTVSLQDEHRLFDIPVTTSLPDVWLQDFPQAWAETGGLGRAKCQAPIIIDLKPTAVPVSIKQYPMSLEAHMGIRQHIIKFLELGVLRPCRSPWNTPLLPVKKPGTQDYRPVQDLREINKRTVDIHPTVPNPYNLLSTLKPDYSWYTVLDLKDAFFCLPLAPQSQELFAFEWKDPERGISGQLTWTRLPQGFKNSPTLFNEALHRDLTDFRTQHPEVTLLQYVDDLLLAAPTKKACTQGTRHLLQELGEKGYRASAKKAQICQTKVTYLGYILSEGKRWLTPGRIETVARIPPPRNPREVREFLGKAGFCRLFIPGFAELAAPLYALTKPSTPFTWQTEHQLAFEALKKALLSAPALGLPDTSKPFTLFLDERQGIAKGVLTQKLGPWKRPVAYLSKKLDPVAAGWPPCLRIMAATAMLVKDSAKLTLGQPLTVITPHTLEAIVRQPPDRWITNARLTHYQALLLDTDRVQFGPPVTLNPATLLPVPENQPSPHDCRQVLAETHGTREDLKDQELPDADHTWYTDGSSYLDSGTRRAGAAVVDGHNTIWAQSLPPGTSAQKAELIALTKALELSKGKKANIYTDSRYAFATAHTHGSIYERRGWLTSEGKEIKNKAEIIALLKALFLPQEVAIIHCPGHQKGQDPVAVGNRQADRVARQAAMAEVLTLATEPDNTSHITAGKRTADGSEFEKRTADGSEFESPKKKAKVE

SEQ ID NO: 1982 - protein, 2100 aa, synthetic construct
MPAAKRVKLDGGDKKYSIGLDIGTNSVGWAVITDEYKVPSKKFKVLGNTDRHSIKKNLIGALLFDSGETAEATRLKRTARRRYTRRKNRICYLQEIFSNEMAKVDDSFFHRLEESFLVEEDKKHERHPIFGNIVDEVAYHEKYPTIYHLRKKLVDSTDKADLRLIYLALAHMIKFRGHFLIEGDLNPDNSDVDKLFIQLVQTYNQLFEENPINASGVDAKAILSARLSKSRRLENLIAQLPGEKKNGLFGNLIALSLGLTPNFKSNFDLAEDAKLQLSKDTYDDDLDNLLAQIGDQYADLFLAAKNLSDAILLSDILRVNTEITKAPLSASMIKRYDEHHQDLTLLKALVRQQLPEKYKEIFFDQSKNGYAGYIDGGASQEEFYKFIKPILEKMDGTEELLVKLNREDLLRKQRTFDNGSIPHQIHLGELHAILRRQEDFYPFLKDNREKIEKILTFRIPYYVGPLARGNSRFAWMTRKSEETITPWNFEEVVDKGASAQSFIERMTNFDKNLPNEKVLPKHSLLYEYFTVYNELTKVKYVTEGMRKPAFLSGEQKKAIVDLLFKTNRKVTVKQLKEDYFKKIECFDSVEISGVEDRFNASLGTYHDLLKIIKDKDFLDNEENEDILEDIVLTLTLFEDREMIEERLKTYAHLFDDKVMKQLKRRRYTGWGRLSRKLINGIRDKQSGKTILDFLKSDGFANRNFMQLIHDDSLTFKEDIQKAQVSGQGDSLHEHIANLAGSPAIKKGILQTVKVVDELVKVMGRHKPENIVIEMARENQTTQKGQKNSRERMKRIEEGIKELGSQILKEHPVENTQLQNEKLYLYYLQNGRDMYVDQELDINRLSDYDVDHIVPQSFLKDDSIDNKVLTRSDKARGKSDNVPSEEVVKKMKNYWRQLLNAKLITQRKFDNLTKAERGGLSELDKAGFIKRQLVETRQITKHVAQILDSRMNTKYDENDKLIREVKVITLKSKLVSDFRKDFQFYKVREINNYHHAHDAYLNAVVGTALIKKYPKLESEFVYGDYKVYDVRKMIAKSEQEIGKATAKYFFYSNIMNFFKTEITLANGEIRKRPLIETNGETGEIVWDKGRDFATVRKVLSMPQVNIVKKTEVQTGGFSKESILPKRNSDKLIARKKDWDPKKYGGFDSPTVAYSVLVVAKVEKGKSKKLKSVKELLGITIMERSSFEKNPIDFLEAKGYKEVKKDLIIKLPKYSLFELENGRKRMLASAGELQKGNELALPSKYVNFLYLASHYEKLKGSPEDNEQKQLFVEQHKHYLDEIIEQISEFSKRVILADANLDKVLSAYNKHRDKPIREQAENIIHLFTLTNLGAPAAFKYFDTTIDRKRYTSTKEVLDATLIHQSITGLYETRIDLSQLGGDGGGSSGGGGGSGGTVSLQDEHRLFDIPVTTSLPDVWLQDFPQAWAETGGLGRAKCQAPIIIDLKPTAVPVSIKQYPMSLEAHMGIRQHIIKFLELGVLRPCRSPWNTPLLPVKKPGTQDYRPVQDLREINKRTVDIHPTVPNPYNLLSTLKPDYSWYTVLDLKDAFFCLPLAPQSQELFAFEWKDPERGISGQLTWTRLPQGFKNSPTLFNEALHRDLTDFRTQHPEVTLLQYVDDLLLAAPTKKACTQGTRHLLQELGEKGYRASAKKAQICQTKVTYLGYILSEGKRWLTPGRIETVARIPPPRNPREVREFLGKAGFCRLFIPGFAELAAPLYALTKPSTPFTWQTEHQLAFEALKKALLSAPALGLPDTSKPFTLFLDERQGIAKGVLTQKLGPWKRPVAYLSKKLDPVAAGWPPCLRIMAATAMLVKDSAKLTLGQPLTVITPHTLEAIVRQPPDRWITNARLTHYQALLLDTDRVQFGPPVTLNPATLLPVPENQPSPHDCRQVLAETHGTREDLKDQELPDADHTWYTDGSSYLDSGTRRAGAAVVDGHNTIWAQSLPPGTSAQKAELIALTKALELSKGKKANIYTDSRYAFATAHTHGSIYERRGWLTSEGKEIKNKAEIIALLKALFLPQEVAIIHCPGHQKGQDPVAVGNRQADRVARQAAMAEVLTLATEPDNTSHITAGKRTADGSEFEKRTADGSEFESPKKKAKVE

SEQ ID NO: 1983 - protein, 2097 aa, synthetic construct
MPAAKRVKLDGGDKKYSIGLDIGTNSVGWAVITDEYKVPSKKFKVLGNTDRHSIKKNLIGALLFDSGETAEATRLKRTARRRYTRRKNRICYLQEIFSNEMAKVDDSFFHRLEESFLVEEDKKHERHPIFGNIVDEVAYHEKYPTIYHLRKKLVDSTDKADLRLIYLALAHMIKFRGHFLIEGDLNPDNSDVDKLFIQLVQTYNQLFEENPINASGVDAKAILSARLSKSRRLENLIAQLPGEKKNGLFGNLIALSLGLTPNFKSNFDLAEDAKLQLSKDTYDDDLDNLLAQIGDQYADLFLAAKNLSDAILLSDILRVNTEITKAPLSASMIKRYDEHHQDLTLLKALVRQQLPEKYKEIFFDQSKNGYAGYIDGGASQEEFYKFIKPILEKMDGTEELLVKLNREDLLRKQRTFDNGSIPHQIHLGELHAILRRQEDFYPFLKDNREKIEKILTFRIPYYVGPLARGNSRFAWMTRKSEETITPWNFEEVVDKGASAQSFIERMTNFDKNLPNEKVLPKHSLLYEYFTVYNELTKVKYVTEGMRKPAFLSGEQKKAIVDLLFKTNRKVTVKQLKEDYFKKIECFDSVEISGVEDRFNASLGTYHDLLKIIKDKDFLDNEENEDILEDIVLTLTLFEDREMIEERLKTYAHLFDDKVMKQLKRRRYTGWGRLSRKLINGIRDKQSGKTILDFLKSDGFANRNFMQLIHDDSLTFKEDIQKAQVSGQGDSLHEHIANLAGSPAIKKGILQTVKVVDELVKVMGRHKPENIVIEMARENQTTQKGQKNSRERMKRIEEGIKELGSQILKEHPVENTQLQNEKLYLYYLQNGRDMYVDQELDINRLSDYDVDHIVPQSFLKDDSIDNKVLTRSDKARGKSDNVPSEEVVKKMKNYWRQLLNAKLITQRKFDNLTKAERGGLSELDKAGFIKRQLVETRQITKHVAQILDSRMNTKYDENDKLIREVKVITLKSKLVSDFRKDFQFYKVREINNYHHAHDAYLNAVVGTALIKKYPKLESEFVYGDYKVYDVRKMIAKSEQEIGKATAKYFFYSNIMNFFKTEITLANGEIRKRPLIETNGETGEIVWDKGRDFATVRKVLSMPQVNIVKKTEVQTGGFSKESILPKRNSDKLIARKKDWDPKKYGGFDSPTVAYSVLVVAKVEKGKSKKLKSVKELLGITIMERSSFEKNPIDFLEAKGYKEVKKDLIIKLPKYSLFELENGRKRMLASAGELQKGNELALPSKYVNFLYLASHYEKLKGSPEDNEQKQLFVEQHKHYLDEIIEQISEFSKRVILADANLDKVLSAYNKHRDKPIREQAENIIHLFTLTNLGAPAAFKYFDTTIDRKRYTSTKEVLDATLIHQSITGLYETRIDLSQLGGDGGPAPGGGGGTVSLQDEHRLFDIPVTTSLPDVWLQDFPQAWAETGGLGRAKCQAPIIIDLKPTAVPVSIKQYPMSLEAHMGIRQHIIKFLELGVLRPCRSPWNTPLLPVKKPGTQDYRPVQDLREINKRTVDIHPTVPNPYNLLSTLKPDYSWYTVLDLKDAFFCLPLAPQSQELFAFEWKDPERGISGQLTWTRLPQGFKNSPTLFNEALHRDLTDFRTQHPEVTLLQYVDDLLLAAPTKKACTQGTRHLLQELGEKGYRASAKKAQICQTKVTYLGYILSEGKRWLTPGRIETVARIPPPRNPREVREFLGKAGFCRLFIPGFAELAAPLYALTKPSTPFTWQTEHQLAFEALKKALLSAPALGLPDTSKPFTLFLDERQGIAKGVLTQKLGPWKRPVAYLSKKLDPVAAGWPPCLRIMAATAMLVKDSAKLTLGQPLTVITPHTLEAIVRQPPDRWITNARLTHYQALLLDTDRVQFGPPVTLNPATLLPVPENQPSPHDCRQVLAETHGTREDLKDQELPDADHTWYTDGSSYLDSGTRRAGAAVVDGHNTIWAQSLPPGTSAQKAELIALTKALELSKGKKANIYTDSRYAFATAHTHGSIYERRGWLTSEGKEIKNKAEIIALLKALFLPQEVAIIHCPGHQKGQDPVAVGNRQADRVARQAAMAEVLTLATEPDNTSHITAGKRTADGSEFEKRTADGSEFESPKKKAKVE

SEQ ID NO: 1984 - protein, 2102 aa, synthetic construct
MPAAKRVKLDGGDKKYSIGLDIGTNSVGWAVITDEYKVPSKKFKVLGNTDRHSIKKNLIGALLFDSGETAEATRLKRTARRRYTRRKNRICYLQEIFSNEMAKVDDSFFHRLEESFLVEEDKKHERHPIFGNIVDEVAYHEKYPTIYHLRKKLVDSTDKADLRLIYLALAHMIKFRGHFLIEGDLNPDNSDVDKLFIQLVQTYNQLFEENPINASGVDAKAILSARLSKSRRLENLIAQLPGEKKNGLFGNLIALSLGLTPNFKSNFDLAEDAKLQLSKDTYDDDLDNLLAQIGDQYADLFLAAKNLSDAILLSDILRVNTEITKAPLSASMIKRYDEHHQDLTLLKALVRQQLPEKYKEIFFDQSKNGYAGYIDGGASQEEFYKFIKPILEKMDGTEELLVKLNREDLLRKQRTFDNGSIPHQIHLGELHAILRRQEDFYPFLKDNREKIEKILTFRIPYYVGPLARGNSRFAWMTRKSEETITPWNFEEVVDKGASAQSFIERMTNFDKNLPNEKVLPKHSLLYEYFTVYNELTKVKYVTEGMRKPAFLSGEQKKAIVDLLFKTNRKVTVKQLKEDYFKKIECFDSVEISGVEDRFNASLGTYHDLLKIIKDKDFLDNEENEDILEDIVLTLTLFEDREMIEERLKTYAHLFDDKVMKQLKRRRYTGWGRLSRKLINGIRDKQSGKTILDFLKSDGFANRNFMQLIHDDSLTFKEDIQKAQVSGQGDSLHEHIANLAGSPAIKKGILQTVKVVDELVKVMGRHKPENIVIEMARENQTTQKGQKNSRERMKRIEEGIKELGSQILKEHPVENTQLQNEKLYLYYLQNGRDMYVDQELDINRLSDYDVDHIVPQSFLKDDSIDNKVLTRSDKARGKSDNVPSEEVVKKMKNYWRQLLNAKLITQRKFDNLTKAERGGLSELDKAGFIKRQLVETRQITKHVAQILDSRMNTKYDENDKLIREVKVITLKSKLVSDFRKDFQFYKVREINNYHHAHDAYLNAVVGTALIKKYPKLESEFVYGDYKVYDVRKMIAKSEQEIGKATAKYFFYSNIMNFFKTEITLANGEIRKRPLIETNGETGEIVWDKGRDFATVRKVLSMPQVNIVKKTEVQTGGFSKESILPKRNSDKLIARKKDWDPKKYGGFDSPTVAYSVLVVAKVEKGKSKKLKSVKELLGITIMERSSFEKNPIDFLEAKGYKEVKKDLIIKLPKYSLFELENGRKRMLASAGELQKGNELALPSKYVNFLYLASHYEKLKGSPEDNEQKQLFVEQHKHYLDEIIEQISEFSKRVILADANLDKVLSAYNKHRDKPIREQAENIIHLFTLTNLGAPAAFKYFDTTIDRKRYTSTKEVLDATLIHQSITGLYETRIDLSQLGGDGGGGSEAAAKGGGGGTVSLQDEHRLFDIPVTTSLPDVWLQDFPQAWAETGGLGRAKCQAPIIIDLKPTAVPVSIKQYPMSLEAHMGIRQHIIKFLELGVLRPCRSPWNTPLLPVKKPGTQDYRPVQDLREINKRTVDIHPTVPNPYNLLSTLKPDYSWYTVLDLKDAFFCLPLAPQSQELFAFEWKDPERGISGQLTWTRLPQGFKNSPTLFNEALHRDLTDFRTQHPEVTLLQYVDDLLLAAPTKKACTQGTRHLLQELGEKGYRASAKKAQICQTKVTYLGYILSEGKRWLTPGRIETVARIPPPRNPREVREFLGKAGFCRLFIPGFAELAAPLYALTKPSTPFTWQTEHQLAFEALKKALLSAPALGLPDTSKPFTLFLDERQGIAKGVLTQKLGPWKRPVAYLSKKLDPVAAGWPPCLRIMAATAMLVKDSAKLTLGQPLTVITPHTLEAIVRQPPDRWITNARLTHYQALLLDTDRVQFGPPVTLNPATLLPVPENQPSPHDCRQVLAETHGTREDLKDQELPDADHTWYTDGSSYLDSGTRRAGAAVVDGHNTIWAQSLPPGTSAQKAELIALTKALELSKGKKANIYTDSRYAFATAHTHGSIYERRGWLTSEGKEIKNKAEIIALLKALFLPQEVAIIHCPGHQKGQDPVAVGNRQADRVARQAAMAEVLTLATEPDNTSHITAGKRTADGSEFEKRTADGSEFESPKKKAKVE

SEQ ID NO: 1985 - protein, 2100 aa, synthetic construct
MPAAKRVKLDGGDKKYSIGLDIGTNSVGWAVITDEYKVPSKKFKVLGNTDRHSIKKNLIGALLFDSGETAEATRLKRTARRRYTRRKNRICYLQEIFSNEMAKVDDSFFHRLEESFLVEEDKKHERHPIFGNIVDEVAYHEKYPTIYHLRKKLVDSTDKADLRLIYLALAHMIKFRGHFLIEGDLNPDNSDVDKLFIQLVQTYNQLFEENPINASGVDAKAILSARLSKSRRLENLIAQLPGEKKNGLFGNLIALSLGLTPNFKSNFDLAEDAKLQLSKDTYDDDLDNLLAQIGDQYADLFLAAKNLSDAILLSDILRVNTEITKAPLSASMIKRYDEHHQDLTLLKALVRQQLPEKYKEIFFDQSKNGYAGYIDGGASQEEFYKFIKPILEKMDGTEELLVKLNREDLLRKQRTFDNGSIPHQIHLGELHAILRRQEDFYPFLKDNREKIEKILTFRIPYYVGPLARGNSRFAWMTRKSEETITPWNFEEVVDKGASAQSFIERMTNFDKNLPNEKVLPKHSLLYEYFTVYNELTKVKYVTEGMRKPAFLSGEQKKAIVDLLFKTNRKVTVKQLKEDYFKKIECFDSVEISGVEDRFNASLGTYHDLLKIIKDKDFLDNEENEDILEDIVLTLTLFEDREMIEERLKTYAHLFDDKVMKQLKRRRYTGWGRLSRKLINGIRDKQSGKTILDFLKSDGFANRNFMQLIHDDSLTFKEDIQKAQVSGQGDSLHEHIANLAGSPAIKKGILQTVKVVDELVKVMGRHKPENIVIEMARENQTTQKGQKNSRERMKRIEEGIKELGSQILKEHPVENTQLQNEKLYLYYLQNGRDMYVDQELDINRLSDYDVDHIVPQSFLKDDSIDNKVLTRSDKARGKSDNVPSEEVVKKMKNYWRQLLNAKLITQRKFDNLTKAERGGLSELDKAGFIKRQLVETRQITKHVAQILDSRMNTKYDENDKLIREVKVITLKSKLVSDFRKDFQFYKVREINNYHHAHDAYLNAVVGTALIKKYPKLESEFVYGDYKVYDVRKMIAKSEQEIGKATAKYFFYSNIMNFFKTEITLANGEIRKRPLIETNGETGEIVWDKGRDFATVRKVLSMPQVNIVKKTEVQTGGFSKESILPKRNSDKLIARKKDWDPKKYGGFDSPTVAYSVLVVAKVEKGKSKKLKSVKELLGITIMERSSFEKNPIDFLEAKGYKEVKKDLIIKLPKYSLFELENGRKRMLASAGELQKGNELALPSKYVNFLYLASHYEKLKGSPEDNEQKQLFVEQHKHYLDEIIEQISEFSKRVILADANLDKVLSAYNKHRDKPIREQAENIIHLFTLTNLGAPAAFKYFDTTIDRKRYTSTKEVLDATLIHQSITGLYETRIDLSQLGGDGGGSSPAPGGSGGTVSLQDEHRLFDIPVTTSLPDVWLQDFPQAWAETGGLGRAKCQAPIIIDLKPTAVPVSIKQYPMSLEAHMGIRQHIIKFLELGVLRPCRSPWNTPLLPVKKPGTQDYRPVQDLREINKRTVDIHPTVPNPYNLLSTLKPDYSWYTVLDLKDAFFCLPLAPQSQELFAFEWKDPERGISGQLTWTRLPQGFKNSPTLFNEALHRDLTDFRTQHPEVTLLQYVDDLLLAAPTKKACTQGTRHLLQELGEKGYRASAKKAQICQTKVTYLGYILSEGKRWLTPGRIETVARIPPPRNPREVREFLGKAGFCRLFIPGFAELAAPLYALTKPSTPFTWQTEHQLAFEALKKALLSAPALGLPDTSKPFTLFLDERQGIAKGVLTQKLGPWKRPVAYLSKKLDPVAAGWPPCLRIMAATAMLVKDSAKLTLGQPLTVITPHTLEAIVRQPPDRWITNARLTHYQALLLDTDRVQFGPPVTLNPATLLPVPENQPSPHDCRQVLAETHGTREDLKDQELPDADHTWYTDGSSYLDSGTRRAGAAVVDGHNTIWAQSLPPGTSAQKAELIALTKALELSKGKKANIYTDSRYAFATAHTHGSIYERRGWLTSEGKEIKNKAEIIALLKALFLPQEVAIIHCPGHQKGQDPVAVGNRQADRVARQAAMAEVLTLATEPDNTSHITAGKRTADGSEFEKRTADGSEFESPKKKAKVE

SEQ ID NO: 1986 - protein, 2099 aa, synthetic construct
MPAAKRVKLDGGDKKYSIGLDIGTNSVGWAVITDEYKVPSKKFKVLGNTDRHSIKKNLIGALLFDSGETAEATRLKRTARRRYTRRKNRICYLQEIFSNEMAKVDDSFFHRLEESFLVEEDKKHERHPIFGNIVDEVAYHEKYPTIYHLRKKLVDSTDKADLRLIYLALAHMIKFRGHFLIEGDLNPDNSDVDKLFIQLVQTYNQLFEENPINASGVDAKAILSARLSKSRRLENLIAQLPGEKKNGLFGNLIALSLGLTPNFKSNFDLAEDAKLQLSKDTYDDDLDNLLAQIGDQYADLFLAAKNLSDAILLSDILRVNTEITKAPLSASMIKRYDEHHQDLTLLKALVRQQLPEKYKEIFFDQSKNGYAGYIDGGASQEEFYKFIKPILEKMDGTEELLVKLNREDLLRKQRTFDNGSIPHQIHLGELHAILRRQEDFYPFLKDNREKIEKILTFRIPYYVGPLARGNSRFAWMTRKSEETITPWNFEEVVDKGASAQSFIERMTNFDKNLPNEKVLPKHSLLYEYFTVYNELTKVKYVTEGMRKPAFLSGEQKKAIVDLLFKTNRKVTVKQLKEDYFKKIECFDSVEISGVEDRFNASLGTYHDLLKIIKDKDFLDNEENEDILEDIVLTLTLFEDREMIEERLKTYAHLFDDKVMKQLKRRRYTGWGRLSRKLINGIRDKQSGKTILDFLKSDGFANRNFMQLIHDDSLTFKEDIQKAQVSGQGDSLHEHIANLAGSPAIKKGILQTVKVVDELVKVMGRHKPENIVIEMARENQTTQKGQKNSRERMKRIEEGIKELGSQILKEHPVENTQLQNEKLYLYYLQNGRDMYVDQELDINRLSDYDVDHIVPQSFLKDDSIDNKVLTRSDKARGKSDNVPSEEVVKKMKNYWRQLLNAKLITQRKFDNLTKAERGGLSELDKAGFIKRQLVETRQITKHVAQILDSRMNTKYDENDKLIREVKVITLKSKLVSDFRKDFQFYKVREINNYHHAHDAYLNAVVGTALIKKYPKLESEFVYGDYKVYDVRKMIAKSEQEIGKATAKYFFYSNIMNFFKTEITLANGEIRKRPLIETNGETGEIVWDKGRDFATVRKVLSMPQVNIVKKTEVQTGGFSKESILPKRNSDKLIARKKDWDPKKYGGFDSPTVAYSVLVVAKVEKGKSKKLKSVKELLGITIMERSSFEKNPIDFLEAKGYKEVKKDLIIKLPKYSLFELENGRKRMLASAGELQKGNELALPSKYVNFLYLASHYEKLKGSPEDNEQKQLFVEQHKHYLDEIIEQISEFSKRVILADANLDKVLSAYNKHRDKPIREQAENIIHLFTLTNLGAPAAFKYFDTTIDRKRYTSTKEVLDATLIHQSITGLYETRIDLSQLGGDGGEAAAKGGGGGTVSLQDEHRLFDIPVTTSLPDVWLQDFPQAWAETGGLGRAKCQAPIIIDLKPTAVPVSIKQYPMSLEAHMGIRQHIIKFLELGVLRPCRSPWNTPLLPVKKPGTQDYRPVQDLREINKRTVDIHPTVPNPYNLLSTLKPDYSWYTVLDLKDAFFCLPLAPQSQELFAFEWKDPERGISGQLTWTRLPQGFKNSPTLFNEALHRDLTDFRTQHPEVTLLQYVDDLLLAAPTKKACTQGTRHLLQELGEKGYRASAKKAQICQTKVTYLGYILSEGKRWLTPGRIETVARIPPPRNPREVREFLGKAGFCRLFIPGFAELAAPLYALTKPSTPFTWQTEHQLAFEALKKALLSAPALGLPDTSKPFTLFLDERQGIAKGVLTQKLGPWKRPVAYLSKKLDPVAAGWPPCLRIMAATAMLVKDSAKLTLGQPLTVITPHTLEAIVRQPPDRWITNARLTHYQALLLDTDRVQFGPPVTLNPATLLPVPENQPSPHDCRQVLAETHGTREDLKDQELPDADHTWYTDGSSYLDSGTRRAGAAVVDGHNTIWAQSLPPGTSAQKAELIALTKALELSKGKKANIYTDSRYAFATAHTHGSIYERRGWLTSEGKEIKNKAEIIALLKALFLPQEVAIIHCPGHQKGQDPVAVGNRQADRVARQAAMAEVLTLATEPDNTSHITAGKRTADGSEFEKRTADGSEFESPKKKAKVE

SEQ ID NO: 1987 - protein, 2106 aa, synthetic construct
MPAAKRVKLDGGDKKYSIGLDIGTNSVGWAVITDEYKVPSKKFKVLGNTDRHSIKKNLIGALLFDSGETAEATRLKRTARRRYTRRKNRICYLQEIFSNEMAKVDDSFFHRLEESFLVEEDKKHERHPIFGNIVDEVAYHEKYPTIYHLRKKLVDSTDKADLRLIYLALAHMIKFRGHFLIEGDLNPDNSDVDKLFIQLVQTYNQLFEENPINASGVDAKAILSARLSKSRRLENLIAQLPGEKKNGLFGNLIALSLGLTPNFKSNFDLAEDAKLQLSKDTYDDDLDNLLAQIGDQYADLFLAAKNLSDAILLSDILRVNTEITKAPLSASMIKRYDEHHQDLTLLKALVRQQLPEKYKEIFFDQSKNGYAGYIDGGASQEEFYKFIKPILEKMDGTEELLVKLNREDLLRKQRTFDNGSIPHQIHLGELHAILRRQEDFYPFLKDNREKIEKILTFRIPYYVGPLARGNSRFAWMTRKSEETITPWNFEEVVDKGASAQSFIERMTNFDKNLPNEKVLPKHSLLYEYFTVYNELTKVKYVTEGMRKPAFLSGEQKKAIVDLLFKTNRKVTVKQLKEDYFKKIECFDSVEISGVEDRFNASLGTYHDLLKIIKDKDFLDNEENEDILEDIVLTLTLFEDREMIEERLKTYAHLFDDKVMKQLKRRRYTGWGRLSRKLINGIRDKQSGKTILDFLKSDGFANRNFMQLIHDDSLTFKEDIQKAQVSGQGDSLHEHIANLAGSPAIKKGILQTVKVVDELVKVMGRHKPENIVIEMARENQTTQKGQKNSRERMKRIEEGIKELGSQILKEHPVENTQLQNEKLYLYYLQNGRDMYVDQELDINRLSDYDVDHIVPQSFLKDDSIDNKVLTRSDKARGKSDNVPSEEVVKKMKNYWRQLLNAKLITQRKFDNLTKAERGGLSELDKAGFIKRQLVETRQITKHVAQILDSRMNTKYDENDKLIREVKVITLKSKLVSDFRKDFQFYKVREINNYHHAHDAYLNAVVGTALIKKYPKLESEFVYGDYKVYDVRKMIAKSEQEIGKATAKYFFYSNIMNFFKTEITLANGEIRKRPLIETNGETGEIVWDKGRDFATVRKVLSMPQVNIVKKTEVQTGGFSKESILPKRNSDKLIARKKDWDPKKYGGFDSPTVAYSVLVVAKVEKGKSKKLKSVKELLGITIMERSSFEKNPIDFLEAKGYKEVKKDLIIKLPKYSLFELENGRKRMLASAGELQKGNELALPSKYVNFLYLASHYEKLKGSPEDNEQKQLFVEQHKHYLDEIIEQISEFSKRVILADANLDKVLSAYNKHRDKPIREQAENIIHLFTLTNLGAPAAFKYFDTTIDRKRYTSTKEVLDATLIHQSITGLYETRIDLSQLGGDGGGGGGSGGGGSGGGGSGGTVSLQDEHRLFDIPVTTSLPDVWLQDFPQAWAETGGLGRAKCQAPIIIDLKPTAVPVSIKQYPMSLEAHMGIRQHIIKFLELGVLRPCRSPWNTPLLPVKKPGTQDYRPVQDLREINKRTVDIHPTVPNPYNLLSTLKPDYSWYTVLDLKDAFFCLPLAPQSQELFAFEWKDPERGISGQLTWTRLPQGFKNSPTLFNEALHRDLTDFRTQHPEVTLLQYVDDLLLAAPTKKACTQGTRHLLQELGEKGYRASAKKAQICQTKVTYLGYILSEGKRWLTPGRIETVARIPPPRNPREVREFLGKAGFCRLFIPGFAELAAPLYALTKPSTPFTWQTEHQLAFEALKKALLSAPALGLPDTSKPFTLFLDERQGIAKGVLTQKLGPWKRPVAYLSKKLDPVAAGWPPCLRIMAATAMLVKDSAKLTLGQPLTVITPHTLEAIVRQPPDRWITNARLTHYQALLLDTDRVQFGPPVTLNPATLLPVPENQPSPHDCRQVLAETHGTREDLKDQELPDADHTWYTDGSSYLDSGTRRAGAAVVDGHNTIWAQSLPPGTSAQKAELIALTKALELSKGKKANIYTDSRYAFATAHTHGSIYERRGWLTSEGKEIKNKAEIIALLKALFLPQEVAIIHCPGHQKGQDPVAVGNRQADRVARQAAMAEVLTLATEPDNTSHITAGKRTADGSEFEKRTADGSEFESPKKKAKVE

SEQ ID NO: 1988 - protein, 2100 aa, synthetic construct
MPAAKRVKLDGGDKKYSIGLDIGTNSVGWAVITDEYKVPSKKFKVLGNTDRHSIKKNLIGALLFDSGETAEATRLKRTARRRYTRRKNRICYLQEIFSNEMAKVDDSFFHRLEESFLVEEDKKHERHPIFGNIVDEVAYHEKYPTIYHLRKKLVDSTDKADLRLIYLALAHMIKFRGHFLIEGDLNPDNSDVDKLFIQLVQTYNQLFEENPINASGVDAKAILSARLSKSRRLENLIAQLPGEKKNGLFGNLIALSLGLTPNFKSNFDLAEDAKLQLSKDTYDDDLDNLLAQIGDQYADLFLAAKNLSDAILLSDILRVNTEITKAPLSASMIKRYDEHHQDLTLLKALVRQQLPEKYKEIFFDQSKNGYAGYIDGGASQEEFYKFIKPILEKMDGTEELLVKLNREDLLRKQRTFDNGSIPHQIHLGELHAILRRQEDFYPFLKDNREKIEKILTFRIPYYVGPLARGNSRFAWMTRKSEETITPWNFEEVVDKGASAQSFIERMTNFDKNLPNEKVLPKHSLLYEYFTVYNELTKVKYVTEGMRKPAFLSGEQKKAIVDLLFKTNRKVTVKQLKEDYFKKIECFDSVEISGVEDRFNASLGTYHDLLKIIKDKDFLDNEENEDILEDIVLTLTLFEDREMIEERLKTYAHLFDDKVMKQLKRRRYTGWGRLSRKLINGIRDKQSGKTILDFLKSDGFANRNFMQLIHDDSLTFKEDIQKAQVSGQGDSLHEHIANLAGSPAIKKGILQTVKVVDELVKVMGRHKPENIVIEMARENQTTQKGQKNSRERMKRIEEGIKELGSQILKEHPVENTQLQNEKLYLYYLQNGRDMYVDQELDINRLSDYDVDHIVPQSFLKDDSIDNKVLTRSDKARGKSDNVPSEEVVKKMKNYWRQLLNAKLITQRKFDNLTKAERGGLSELDKAGFIKRQLVETRQITKHVAQILDSRMNTKYDENDKLIREVKVITLKSKLVSDFRKDFQFYKVREINNYHHAHDAYLNAVVGTALIKKYPKLESEFVYGDYKVYDVRKMIAKSEQEIGKATAKYFFYSNIMNFFKTEITLANGEIRKRPLIETNGETGEIVWDKGRDFATVRKVLSMPQVNIVKKTEVQTGGFSKESILPKRNSDKLIARKKDWDPKKYGGFDSPTVAYSVLVVAKVEKGKSKKLKSVKELLGITIMERSSFEKNPIDFLEAKGYKEVKKDLIIKLPKYSLFELENGRKRMLASAGELQKGNELALPSKYVNFLYLASHYEKLKGSPEDNEQKQLFVEQHKHYLDEIIEQISEFSKRVILADANLDKVLSAYNKHRDKPIREQAENIIHLFTLTNLGAPAAFKYFDTTIDRKRYTSTKEVLDATLIHQSITGLYETRIDLSQLGGDGGGGGPAPGSSGGTVSLQDEHRLFDIPVTTSLPDVWLQDFPQAWAETGGLGRAKCQAPIIIDLKPTAVPVSIKQYPMSLEAHMGIRQHIIKFLELGVLRPCRSPWNTPLLPVKKPGTQDYRPVQDLREINKRTVDIHPTVPNPYNLLSTLKPDYSWYTVLDLKDAFFCLPLAPQSQELFAFEWKDPERGISGQLTWTRLPQGFKNSPTLFNEALHRDLTDFRTQHPEVTLLQYVDDLLLAAPTKKACTQGTRHLLQELGEKGYRASAKKAQICQTKVTYLGYILSEGKRWLTPGRIETVARIPPPRNPREVREFLGKAGFCRLFIPGFAELAAPLYALTKPSTPFTWQTEHQLAFEALKKALLSAPALGLPDTSKPFTLFLDERQGIAKGVLTQKLGPWKRPVAYLSKKLDPVAAGWPPCLRIMAATAMLVKDSAKLTLGQPLTVITPHTLEAIVRQPPDRWITNARLTHYQALLLDTDRVQFGPPVTLNPATLLPVPENQPSPHDCRQVLAETHGTREDLKDQELPDADHTWYTDGSSYLDSGTRRAGAAVVDGHNTIWAQSLPPGTSAQKAELIALTKALELSKGKKANIYTDSRYAFATAHTHGSIYERRGWLTSEGKEIKNKAEIIALLKALFLPQEVAIIHCPGHQKGQDPVAVGNRQADRVARQAAMAEVLTLATEPDNTSHITAGKRTADGSEFEKRTADGSEFESPKKKAKVE

SEQ ID NO: 1989 - protein, 2102 aa, synthetic construct
MPAAKRVKLDGGDKKYSIGLDIGTNSVGWAVITDEYKVPSKKFKVLGNTDRHSIKKNLIGALLFDSGETAEATRLKRTARRRYTRRKNRICYLQEIFSNEMAKVDDSFFHRLEESFLVEEDKKHERHPIFGNIVDEVAYHEKYPTIYHLRKKLVDSTDKADLRLIYLALAHMIKFRGHFLIEGDLNPDNSDVDKLFIQLVQTYNQLFEENPINASGVDAKAILSARLSKSRRLENLIAQLPGEKKNGLFGNLIALSLGLTPNFKSNFDLAEDAKLQLSKDTYDDDLDNLLAQIGDQYADLFLAAKNLSDAILLSDILRVNTEITKAPLSASMIKRYDEHHQDLTLLKALVRQQLPEKYKEIFFDQSKNGYAGYIDGGASQEEFYKFIKPILEKMDGTEELLVKLNREDLLRKQRTFDNGSIPHQIHLGELHAILRRQEDFYPFLKDNREKIEKILTFRIPYYVGPLARGNSRFAWMTRKSEETITPWNFEEVVDKGASAQSFIERMTNFDKNLPNEKVLPKHSLLYEYFTVYNELTKVKYVTEGMRKPAFLSGEQKKAIVDLLFKTNRKVTVKQLKEDYFKKIECFDSVEISGVEDRFNASLGTYHDLLKIIKDKDFLDNEENEDILEDIVLTLTLFEDREMIEERLKTYAHLFDDKVMKQLKRRRYTGWGRLSRKLINGIRDKQSGKTILDFLKSDGFANRNFMQLIHDDSLTFKEDIQKAQVSGQGDSLHEHIANLAGSPAIKKGILQTVKVVDELVKVMGRHKPENIVIEMARENQTTQKGQKNSRERMKRIEEGIKELGSQILKEHPVENTQLQNEKLYLYYLQNGRDMYVDQELDINRLSDYDVDHIVPQSFLKDDSIDNKVLTRSDKARGKSDNVPSEEVVKKMKNYWRQLLNAKLITQRKFDNLTKAERGGLSELDKAGFIKRQLVETRQITKHVAQILDSRMNTKYDENDKLIREVKVITLKSKLVSDFRKDFQFYKVREINNYHHAHDAYLNAVVGTALIKKYPKLESEFVYGDYKVYDVRKMIAKSEQEIGKATAKYFFYSNIMNFFKTEITLANGEIRKRPLIETNGETGEIVWDKGRDFATVRKVLSMPQVNIVKKTEVQTGGFSKESILPKRNSDKLIARKKDWDPKKYGGFDSPTVAYSVLVVAKVEKGKSKKLKSVKELLGITIMERSSFEKNPIDFLEAKGYKEVKKDLIIKLPKYSLFELENGRKRMLASAGELQKGNELALPSKYVNFLYLASHYEKLKGSPEDNEQKQLFVEQHKHYLDEIIEQISEFSKRVILADANLDKVLSAYNKHRDKPIREQAENIIHLFTLTNLGAPAAFKYFDTTIDRKRYTSTKEVLDATLIHQSITGLYETRIDLSQLGGDGGGGSEAAAKPAPGGTVSLQDEHRLFDIPVTTSLPDVWLQDFPQAWAETGGLGRAKCQAPIIIDLKPTAVPVSIKQYPMSLEAHMGIRQHIIKFLELGVLRPCRSPWNTPLLPVKKPGTQDYRPVQDLREINKRTVDIHPTVPNPYNLLSTLKPDYSWYTVLDLKDAFFCLPLAPQSQELFAFEWKDPERGISGQLTWTRLPQGFKNSPTLFNEALHRDLTDFRTQHPEVTLLQYVDDLLLAAPTKKACTQGTRHLLQELGEKGYRASAKKAQICQTKVTYLGYILSEGKRWLTPGRIETVARIPPPRNPREVREFLGKAGFCRLFIPGFAELAAPLYALTKPSTPFTWQTEHQLAFEALKKALLSAPALGLPDTSKPFTLFLDERQGIAKGVLTQKLGPWKRPVAYLSKKLDPVAAGWPPCLRIMAATAMLVKDSAKLTLGQPLTVITPHTLEAIVRQPPDRWITNARLTHYQALLLDTDRVQFGPPVTLNPATLLPVPENQPSPHDCRQVLAETHGTREDLKDQELPDADHTWYTDGSSYLDSGTRRAGAAVVDGHNTIWAQSLPPGTSAQKAELIALTKALELSKGKKANIYTDSRYAFATAHTHGSIYERRGWLTSEGKEIKNKAEIIALLKALFLPQEVAIIHCPGHQKGQDPVAVGNRQADRVARQAAMAEVLTLATEPDNTSHITAGKRTADGSEFEKRTADGSEFESPKKKAKVE

SEQ ID NO: 1990 - protein, 2100 aa, synthetic construct
MPAAKRVKLDGGDKKYSIGLDIGTNSVGWAVITDEYKVPSKKFKVLGNTDRHSIKKNLIGALLFDSGETAEATRLKRTARRRYTRRKNRICYLQEIFSNEMAKVDDSFFHRLEESFLVEEDKKHERHPIFGNIVDEVAYHEKYPTIYHLRKKLVDSTDKADLRLIYLALAHMIKFRGHFLIEGDLNPDNSDVDKLFIQLVQTYNQLFEENPINASGVDAKAILSARLSKSRRLENLIAQLPGEKKNGLFGNLIALSLGLTPNFKSNFDLAEDAKLQLSKDTYDDDLDNLLAQIGDQYADLFLAAKNLSDAILLSDILRVNTEITKAPLSASMIKRYDEHHQDLTLLKALVRQQLPEKYKEIFFDQSKNGYAGYIDGGASQEEFYKFIKPILEKMDGTEELLVKLNREDLLRKQRTFDNGSIPHQIHLGELHAILRRQEDFYPFLKDNREKIEKILTFRIPYYVGPLARGNSRFAWMTRKSEETITPWNFEEVVDKGASAQSFIERMTNFDKNLPNEKVLPKHSLLYEYFTVYNELTKVKYVTEGMRKPAFLSGEQKKAIVDLLFKTNRKVTVKQLKEDYFKKIECFDSVEISGVEDRFNASLGTYHDLLKIIKDKDFLDNEENEDILEDIVLTLTLFEDREMIEERLKTYAHLFDDKVMKQLKRRRYTGWGRLSRKLINGIRDKQSGKTILDFLKSDGFANRNFMQLIHDDSLTFKEDIQKAQVSGQGDSLHEHIANLAGSPAIKKGILQTVKVVDELVKVMGRHKPENIVIEMARENQTTQKGQKNSRERMKRIEEGIKELGSQILKEHPVENTQLQNEKLYLYYLQNGRDMYVDQELDINRLSDYDVDHIVPQSFLKDDSIDNKVLTRSDKARGKSDNVPSEEVVKKMKNYWRQLLNAKLITQRKFDNLTKAERGGLSELDKAGFIKRQLVETRQITKHVAQILDSRMNTKYDENDKLIREVKVITLKSKLVSDFRKDFQFYKVREINNYHHAHDAYLNAVVGTALIKKYPKLESEFVYGDYKVYDVRKMIAKSEQEIGKATAKYFFYSNIMNFFKTEITLANGEIRKRPLIETNGETGEIVWDKGRDFATVRKVLSMPQVNIVKKTEVQTGGFSKESILPKRNSDKLIARKKDWDPKKYGGFDSPTVAYSVLVVAKVEKGKSKKLKSVKELLGITIMERSSFEKNPIDFLEAKGYKEVKKDLIIKLPKYSLFELENGRKRMLASAGELQKGNELALPSKYVNFLYLASHYEKLKGSPEDNEQKQLFVEQHKHYLDEIIEQISEFSKRVILADANLDKVLSAYNKHRDKPIREQAENIIHLFTLTNLGAPAAFKYFDTTIDRKRYTSTKEVLDATLIHQSITGLYETRIDLSQLGGDGGPAPGGSGSSGGTVSLQDEHRLFDIPVTTSLPDVWLQDFPQAWAETGGLGRAKCQAPIIIDLKPTAVPVSIKQYPMSLEAHMGIRQHIIKFLELGVLRPCRSPWNTPLLPVKKPGTQDYRPVQDLREINKRTVDIHPTVPNPYNLLSTLKPDYSWYTVLDLKDAFFCLPLAPQSQELFAFEWKDPERGISGQLTWTRLPQGFKNSPTLFNEALHRDLTDFRTQHPEVTLLQYVDDLLLAAPTKKACTQGTRHLLQELGEKGYRASAKKAQICQTKVTYLGYILSEGKRWLTPGRIETVARIPPPRNPREVREFLGKAGFCRLFIPGFAELAAPLYALTKPSTPFTWQTEHQLAFEALKKALLSAPALGLPDTSKPFTLFLDERQGIAKGVLTQKLGPWKRPVAYLSKKLDPVAAGWPPCLRIMAATAMLVKDSAKLTLGQPLTVITPHTLEAIVRQPPDRWITNARLTHYQALLLDTDRVQFGPPVTLNPATLLPVPENQPSPHDCRQVLAETHGTREDLKDQELPDADHTWYTDGSSYLDSGTRRAGAAVVDGHNTIWAQSLPPGTSAQKAELIALTKALELSKGKKANIYTDSRYAFATAHTHGSIYERRGWLTSEGKEIKNKAEIIALLKALFLPQEVAIIHCPGHQKGQDPVAVGNRQADRVARQAAMAEVLTLATEPDNTSHITAGKRTADGSEFEKRTADGSEFESPKKKAKVE

SEQ ID NO: 1991 - protein, 2100 aa, synthetic construct
MPAAKRVKLDGGDKKYSIGLDIGTNSVGWAVITDEYKVPSKKFKVLGNTDRHSIKKNLIGALLFDSGETAEATRLKRTARRRYTRRKNRICYLQEIFSNEMAKVDDSFFHRLEESFLVEEDKKHERHPIFGNIVDEVAYHEKYPTIYHLRKKLVDSTDKADLRLIYLALAHMIKFRGHFLIEGDLNPDNSDVDKLFIQLVQTYNQLFEENPINASGVDAKAILSARLSKSRRLENLIAQLPGEKKNGLFGNLIALSLGLTPNFKSNFDLAEDAKLQLSKDTYDDDLDNLLAQIGDQYADLFLAAKNLSDAILLSDILRVNTEITKAPLSASMIKRYDEHHQDLTLLKALVRQQLPEKYKEIFFDQSKNGYAGYIDGGASQEEFYKFIKPILEKMDGTEELLVKLNREDLLRKQRTFDNGSIPHQIHLGELHAILRRQEDFYPFLKDNREKIEKILTFRIPYYVGPLARGNSRFAWMTRKSEETITPWNFEEVVDKGASAQSFIERMTNFDKNLPNEKVLPKHSLLYEYFTVYNELTKVKYVTEGMRKPAFLSGEQKKAIVDLLFKTNRKVTVKQLKEDYFKKIECFDSVEISGVEDRFNASLGTYHDLLKIIKDKDFLDNEENEDILEDIVLTLTLFEDREMIEERLKTYAHLFDDKVMKQLKRRRYTGWGRLSRKLINGIRDKQSGKTILDFLKSDGFANRNFMQLIHDDSLTFKEDIQKAQVSGQGDSLHEHIANLAGSPAIKKGILQTVKVVDELVKVMGRHKPENIVIEMARENQTTQKGQKNSRERMKRIEEGIKELGSQILKEHPVENTQLQNEKLYLYYLQNGRDMYVDQELDINRLSDYDVDHIVPQSFLKDDSIDNKVLTRSDKARGKSDNVPSEEVVKKMKNYWRQLLNAKLITQRKFDNLTKAERGGLSELDKAGFIKRQLVETRQITKHVAQILDSRMNTKYDENDKLIREVKVITLKSKLVSDFRKDFQFYKVREINNYHHAHDAYLNAVVGTALIKKYPKLESEFVYGDYKVYDVRKMIAKSEQEIGKATAKYFFYSNIMNFFKTEITLANGEIRKRPLIETNGETGEIVWDKGRDFATVRKVLSMPQVNIVKKTEVQTGGFSKESILPKRNSDKLIARKKDWDPKKYGGFDSPTVAYSVLVVAKVEKGKSKKLKSVKELLGITIMERSSFEKNPIDFLEAKGYKEVKKDLIIKLPKYSLFELENGRKRMLASAGELQKGNELALPSKYVNFLYLASHYEKLKGSPEDNEQKQLFVEQHKHYLDEIIEQISEFSKRVILADANLDKVLSAYNKHRDKPIREQAENIIHLFTLTNLGAPAAFKYFDTTIDRKRYTSTKEVLDATLIHQSITGLYETRIDLSQLGGDGGGGGGSSGGSGGTVSLQDEHRLFDIPVTTSLPDVWLQDFPQAWAETGGLGRAKCQAPIIIDLKPTAVPVSIKQYPMSLEAHMGIRQHIIKFLELGVLRPCRSPWNTPLLPVKKPGTQDYRPVQDLREINKRTVDIHPTVPNPYNLLSTLKPDYSWYTVLDLKDAFFCLPLAPQSQELFAFEWKDPERGISGQLTWTRLPQGFKNSPTLFNEALHRDLTDFRTQHPEVTLLQYVDDLLLAAPTKKACTQGTRHLLQELGEKGYRASAKKAQICQTKVTYLGYILSEGKRWLTPGRIETVARIPPPRNPREVREFLGKAGFCRLFIPGFAELAAPLYALTKPSTPFTWQTEHQLAFEALKKALLSAPALGLPDTSKPFTLFLDERQGIAKGVLTQKLGPWKRPVAYLSKKLDPVAAGWPPCLRIMAATAMLVKDSAKLTLGQPLTVITPHTLEAIVRQPPDRWITNARLTHYQALLLDTDRVQFGPPVTLNPATLLPVPENQPSPHDCRQVLAETHGTREDLKDQELPDADHTWYTDGSSYLDSGTRRAGAAVVDGHNTIWAQSLPPGTSAQKAELIALTKALELSKGKKANIYTDSRYAFATAHTHGSIYERRGWLTSEGKEIKNKAEIIALLKALFLPQEVAIIHCPGHQKGQDPVAVGNRQADRVARQAAMAEVLTLATEPDNTSHITAGKRTADGSEFEKRTADGSEFESPKKKAKVE

SEQ ID NO: 1992 - protein, 2106 aa, synthetic construct
MPAAKRVKLDGGDKKYSIGLDIGTNSVGWAVITDEYKVPSKKFKVLGNTDRHSIKKNLIGALLFDSGETAEATRLKRTARRRYTRRKNRICYLQEIFSNEMAKVDDSFFHRLEESFLVEEDKKHERHPIFGNIVDEVAYHEKYPTIYHLRKKLVDSTDKADLRLIYLALAHMIKFRGHFLIEGDLNPDNSDVDKLFIQLVQTYNQLFEENPINASGVDAKAILSARLSKSRRLENLIAQLPGEKKNGLFGNLIALSLGLTPNFKSNFDLAEDAKLQLSKDTYDDDLDNLLAQIGDQYADLFLAAKNLSDAILLSDILRVNTEITKAPLSASMIKRYDEHHQDLTLLKALVRQQLPEKYKEIFFDQSKNGYAGYIDGGASQEEFYKFIKPILEKMDGTEELLVKLNREDLLRKQRTFDNGSIPHQIHLGELHAILRRQEDFYPFLKDNREKIEKILTFRIPYYVGPLARGNSRFAWMTRKSEETITPWNFEEVVDKGASAQSFIERMTNFDKNLPNEKVLPKHSLLYEYFTVYNELTKVKYVTEGMRKPAFLSGEQKKAIVDLLFKTNRKVTVKQLKEDYFKKIECFDSVEISGVEDRFNASLGTYHDLLKIIKDKDFLDNEENEDILEDIVLTLTLFEDREMIEERLKTYAHLFDDKVMKQLKRRRYTGWGRLSRKLINGIRDKQSGKTILDFLKSDGFANRNFMQLIHDDSLTFKEDIQKAQVSGQGDSLHEHIANLAGSPAIKKGILQTVKVVDELVKVMGRHKPENIVIEMARENQTTQKGQKNSRERMKRIEEGIKELGSQILKEHPVENTQLQNEKLYLYYLQNGRDMYVDQELDINRLSDYDVDHIVPQSFLKDDSIDNKVLTRSDKARGKSDNVPSEEVVKKMKNYWRQLLNAKLITQRKFDNLTKAERGGLSELDKAGFIKRQLVETRQITKHVAQILDSRMNTKYDENDKLIREVKVITLKSKLVSDFRKDFQFYKVREINNYHHAHDAYLNAVVGTALIKKYPKLESEFVYGDYKVYDVRKMIAKSEQEIGKATAKYFFYSNIMNFFKTEITLANGEIRKRPLIETNGETGEIVWDKGRDFATVRKVLSMPQVNIVKKTEVQTGGFSKESILPKRNSDKLIARKKDWDPKKYGGFDSPTVAYSVLVVAKVEKGKSKKLKSVKELLGITIMERSSFEKNPIDFLEAKGYKEVKKDLIIKLPKYSLFELENGRKRMLASAGELQKGNELALPSKYVNFLYLASHYEKLKGSPEDNEQKQLFVEQHKHYLDEIIEQISEFSKRVILADANLDKVLSAYNKHRDKPIREQAENIIHLFTLTNLGAPAAFKYFDTTIDRKRYTSTKEVLDATLIHQSITGLYETRIDLSQLGGDGGGGSGGSGGSGGSGGSGGTVSLQDEHRLFDIPVTTSLPDVWLQDFPQAWAETGGLGRAKCQAPIIIDLKPTAVPVSIKQYPMSLEAHMGIRQHIIKFLELGVLRPCRSPWNTPLLPVKKPGTQDYRPVQDLREINKRTVDIHPTVPNPYNLLSTLKPDYSWYTVLDLKDAFFCLPLAPQSQELFAFEWKDPERGISGQLTWTRLPQGFKNSPTLFNEALHRDLTDFRTQHPEVTLLQYVDDLLLAAPTKKACTQGTRHLLQELGEKGYRASAKKAQICQTKVTYLGYILSEGKRWLTPGRIETVARIPPPRNPREVREFLGKAGFCRLFIPGFAELAAPLYALTKPSTPFTWQTEHQLAFEALKKALLSAPALGLPDTSKPFTLFLDERQGIAKGVLTQKLGPWKRPVAYLSKKLDPVAAGWPPCLRIMAATAMLVKDSAKLTLGQPLTVITPHTLEAIVRQPPDRWITNARLTHYQALLLDTDRVQFGPPVTLNPATLLPVPENQPSPHDCRQVLAETHGTREDLKDQELPDADHTWYTDGSSYLDSGTRRAGAAVVDGHNTIWAQSLPPGTSAQKAELIALTKALELSKGKKANIYTDSRYAFATAHTHGSIYERRGWLTSEGKEIKNKAEIIALLKALFLPQEVAIIHCPGHQKGQDPVAVGNRQADRVARQAAMAEVLTLATEPDNTSHITAGKRTADGSEFEKRTADGSEFESPKKKAKVE

SEQ ID NO: 1993 - protein, 2100 aa, synthetic construct
MPAAKRVKLDGGDKKYSIGLDIGTNSVGWAVITDEYKVPSKKFKVLGNTDRHSIKKNLIGALLFDSGETAEATRLKRTARRRYTRRKNRICYLQEIFSNEMAKVDDSFFHRLEESFLVEEDKKHERHPIFGNIVDEVAYHEKYPTIYHLRKKLVDSTDKADLRLIYLALAHMIKFRGHFLIEGDLNPDNSDVDKLFIQLVQTYNQLFEENPINASGVDAKAILSARLSKSRRLENLIAQLPGEKKNGLFGNLIALSLGLTPNFKSNFDLAEDAKLQLSKDTYDDDLDNLLAQIGDQYADLFLAAKNLSDAILLSDILRVNTEITKAPLSASMIKRYDEHHQDLTLLKALVRQQLPEKYKEIFFDQSKNGYAGYIDGGASQEEFYKFIKPILEKMDGTEELLVKLNREDLLRKQRTFDNGSIPHQIHLGELHAILRRQEDFYPFLKDNREKIEKILTFRIPYYVGPLARGNSRFAWMTRKSEETITPWNFEEVVDKGASAQSFIERMTNFDKNLPNEKVLPKHSLLYEYFTVYNELTKVKYVTEGMRKPAFLSGEQKKAIVDLLFKTNRKVTVKQLKEDYFKKIECFDSVEISGVEDRFNASLGTYHDLLKIIKDKDFLDNEENEDILEDIVLTLTLFEDREMIEERLKTYAHLFDDKVMKQLKRRRYTGWGRLSRKLINGIRDKQSGKTILDFLKSDGFANRNFMQLIHDDSLTFKEDIQKAQVSGQGDSLHEHIANLAGSPAIKKGILQTVKVVDELVKVMGRHKPENIVIEMARENQTTQKGQKNSRERMKRIEEGIKELGSQILKEHPVENTQLQNEKLYLYYLQNGRDMYVDQELDINRLSDYDVDHIVPQSFLKDDSIDNKVLTRSDKARGKSDNVPSEEVVKKMKNYWRQLLNAKLITQRKFDNLTKAERGGLSELDKAGFIKRQLVETRQITKHVAQILDSRMNTKYDENDKLIREVKVITLKSKLVSDFRKDFQFYKVREINNYHHAHDAYLNAVVGTALIKKYPKLESEFVYGDYKVYDVRKMIAKSEQEIGKATAKYFFYSNIMNFFKTEITLANGEIRKRPLIETNGETGEIVWDKGRDFATVRKVLSMPQVNIVKKTEVQTGGFSKESILPKRNSDKLIARKKDWDPKKYGGFDSPTVAYSVLVVAKVEKGKSKKLKSVKELLGITIMERSSFEKNPIDFLEAKGYKEVKKDLIIKLPKYSLFELENGRKRMLASAGELQKGNELALPSKYVNFLYLASHYEKLKGSPEDNEQKQLFVEQHKHYLDEIIEQISEFSKRVILADANLDKVLSAYNKHRDKPIREQAENIIHLFTLTNLGAPAAFKYFDTTIDRKRYTSTKEVLDATLIHQSITGLYETRIDLSQLGGDGGGSSGGSGGGGGTVSLQDEHRLFDIPVTTSLPDVWLQDFPQAWAETGGLGRAKCQAPIIIDLKPTAVPVSIKQYPMSLEAHMGIRQHIIKFLELGVLRPCRSPWNTPLLPVKKPGTQDYRPVQDLREINKRTVDIHPTVPNPYNLLSTLKPDYSWYTVLDLKDAFFCLPLAPQSQELFAFEWKDPERGISGQLTWTRLPQGFKNSPTLFNEALHRDLTDFRTQHPEVTLLQYVDDLLLAAPTKKACTQGTRHLLQELGEKGYRASAKKAQICQTKVTYLGYILSEGKRWLTPGRIETVARIPPPRNPREVREFLGKAGFCRLFIPGFAELAAPLYALTKPSTPFTWQTEHQLAFEALKKALLSAPALGLPDTSKPFTLFLDERQGIAKGVLTQKLGPWKRPVAYLSKKLDPVAAGWPPCLRIMAATAMLVKDSAKLTLGQPLTVITPHTLEAIVRQPPDRWITNARLTHYQALLLDTDRVQFGPPVTLNPATLLPVPENQPSPHDCRQVLAETHGTREDLKDQELPDADHTWYTDGSSYLDSGTRRAGAAVVDGHNTIWAQSLPPGTSAQKAELIALTKALELSKGKKANIYTDSRYAFATAHTHGSIYERRGWLTSEGKEIKNKAEIIALLKALFLPQEVAIIHCPGHQKGQDPVAVGNRQADRVARQAAMAEVLTLATEPDNTSHITAGKRTADGSEFEKRTADGSEFESPKKKAKVE

SEQ ID NO: 1994 - protein, 2103 aa, synthetic construct
MPAAKRVKLDGGDKKYSIGLDIGTNSVGWAVITDEYKVPSKKFKVLGNTDRHSIKKNLIGALLFDSGETAEATRLKRTARRRYTRRKNRICYLQEIFSNEMAKVDDSFFHRLEESFLVEEDKKHERHPIFGNIVDEVAYHEKYPTIYHLRKKLVDSTDKADLRLIYLALAHMIKFRGHFLIEGDLNPDNSDVDKLFIQLVQTYNQLFEENPINASGVDAKAILSARLSKSRRLENLIAQLPGEKKNGLFGNLIALSLGLTPNFKSNFDLAEDAKLQLSKDTYDDDLDNLLAQIGDQYADLFLAAKNLSDAILLSDILRVNTEITKAPLSASMIKRYDEHHQDLTLLKALVRQQLPEKYKEIFFDQSKNGYAGYIDGGASQEEFYKFIKPILEKMDGTEELLVKLNREDLLRKQRTFDNGSIPHQIHLGELHAILRRQEDFYPFLKDNREKIEKILTFRIPYYVGPLARGNSRFAWMTRKSEETITPWNFEEVVDKGASAQSFIERMTNFDKNLPNEKVLPKHSLLYEYFTVYNELTKVKYVTEGMRKPAFLSGEQKKAIVDLLFKTNRKVTVKQLKEDYFKKIECFDSVEISGVEDRFNASLGTYHDLLKIIKDKDFLDNEENEDILEDIVLTLTLFEDREMIEERLKTYAHLFDDKVMKQLKRRRYTGWGRLSRKLINGIRDKQSGKTILDFLKSDGFANRNFMQLIHDDSLTFKEDIQKAQVSGQGDSLHEHIANLAGSPAIKKGILQTVKVVDELVKVMGRHKPENIVIEMARENQTTQKGQKNSRERMKRIEEGIKELGSQILKEHPVENTQLQNEKLYLYYLQNGRDMYVDQELDINRLSDYDVDHIVPQSFLKDDSIDNKVLTRSDKARGKSDNVPSEEVVKKMKNYWRQLLNAKLITQRKFDNLTKAERGGLSELDKAGFIKRQLVETRQITKHVAQILDSRMNTKYDENDKLIREVKVITLKSKLVSDFRKDFQFYKVREINNYHHAHDAYLNAVVGTALIKKYPKLESEFVYGDYKVYDVRKMIAKSEQEIGKATAKYFFYSNIMNFFKTEITLANGEIRKRPLIETNGETGEIVWDKGRDFATVRKVLSMPQVNIVKKTEVQTGGFSKESILPKRNSDKLIARKKDWDPKKYGGFDSPTVAYSVLVVAKVEKGKSKKLKSVKELLGITIMERSSFEKNPIDFLEAKGYKEVKKDLIIKLPKYSLFELENGRKRMLASAGELQKGNELALPSKYVNFLYLASHYEKLKGSPEDNEQKQLFVEQHKHYLDEIIEQISEFSKRVILADANLDKVLSAYNKHRDKPIREQAENIIHLFTLTNLGAPAAFKYFDTTIDRKRYTSTKEVLDATLIHQSITGLYETRIDLSQLGGDGGGSSGSSGSSGSSGGTVSLQDEHRLFDIPVTTSLPDVWLQDFPQAWAETGGLGRAKCQAPIIIDLKPTAVPVSIKQYPMSLEAHMGIRQHIIKFLELGVLRPCRSPWNTPLLPVKKPGTQDYRPVQDLREINKRTVDIHPTVPNPYNLLSTLKPDYSWYTVLDLKDAFFCLPLAPQSQELFAFEWKDPERGISGQLTWTRLPQGFKNSPTLFNEALHRDLTDFRTQHPEVTLLQYVDDLLLAAPTKKACTQGTRHLLQELGEKGYRASAKKAQICQTKVTYLGYILSEGKRWLTPGRIETVARIPPPRNPREVREFLGKAGFCRLFIPGFAELAAPLYALTKPSTPFTWQTEHQLAFEALKKALLSAPALGLPDTSKPFTLFLDERQGIAKGVLTQKLGPWKRPVAYLSKKLDPVAAGWPPCLRIMAATAMLVKDSAKLTLGQPLTVITPHTLEAIVRQPPDRWITNARLTHYQALLLDTDRVQFGPPVTLNPATLLPVPENQPSPHDCRQVLAETHGTREDLKDQELPDADHTWYTDGSSYLDSGTRRAGAAVVDGHNTIWAQSLPPGTSAQKAELIALTKALELSKGKKANIYTDSRYAFATAHTHGSIYERRGWLTSEGKEIKNKAEIIALLKALFLPQEVAIIHCPGHQKGQDPVAVGNRQADRVARQAAMAEVLTLATEPDNTSHITAGKRTADGSEFEKRTADGSEFESPKKKAKVE

SEQ ID NO: 1995 - protein, 2099 aa, synthetic construct
MPAAKRVKLDGGDKKYSIGLDIGTNSVGWAVITDEYKVPSKKFKVLGNTDRHSIKKNLIGALLFDSGETAEATRLKRTARRRYTRRKNRICYLQEIFSNEMAKVDDSFFHRLEESFLVEEDKKHERHPIFGNIVDEVAYHEKYPTIYHLRKKLVDSTDKADLRLIYLALAHMIKFRGHFLIEGDLNPDNSDVDKLFIQLVQTYNQLFEENPINASGVDAKAILSARLSKSRRLENLIAQLPGEKKNGLFGNLIALSLGLTPNFKSNFDLAEDAKLQLSKDTYDDDLDNLLAQIGDQYADLFLAAKNLSDAILLSDILRVNTEITKAPLSASMIKRYDEHHQDLTLLKALVRQQLPEKYKEIFFDQSKNGYAGYIDGGASQEEFYKFIKPILEKMDGTEELLVKLNREDLLRKQRTFDNGSIPHQIHLGELHAILRRQEDFYPFLKDNREKIEKILTFRIPYYVGPLARGNSRFAWMTRKSEETITPWNFEEVVDKGASAQSFIERMTNFDKNLPNEKVLPKHSLLYEYFTVYNELTKVKYVTEGMRKPAFLSGEQKKAIVDLLFKTNRKVTVKQLKEDYFKKIECFDSVEISGVEDRFNASLGTYHDLLKIIKDKDFLDNEENEDILEDIVLTLTLFEDREMIEERLKTYAHLFDDKVMKQLKRRRYTGWGRLSRKLINGIRDKQSGKTILDFLKSDGFANRNFMQLIHDDSLTFKEDIQKAQVSGQGDSLHEHIANLAGSPAIKKGILQTVKVVDELVKVMGRHKPENIVIEMARENQTTQKGQKNSRERMKRIEEGIKELGSQILKEHPVENTQLQNEKLYLYYLQNGRDMYVDQELDINRLSDYDVDHIVPQSFLKDDSIDNKVLTRSDKARGKSDNVPSEEVVKKMKNYWRQLLNAKLITQRKFDNLTKAERGGLSELDKAGFIKRQLVETRQITKHVAQILDSRMNTKYDENDKLIREVKVITLKSKLVSDFRKDFQFYKVREINNYHHAHDAYLNAVVGTALIKKYPKLESEFVYGDYKVYDVRKMIAKSEQEIGKATAKYFFYSNIMNFFKTEITLANGEIRKRPLIETNGETGEIVWDKGRDFATVRKVLSMPQVNIVKKTEVQTGGFSKESILPKRNSDKLIARKKDWDPKKYGGFDSPTVAYSVLVVAKVEKGKSKKLKSVKELLGITIMERSSFEKNPIDFLEAKGYKEVKKDLIIKLPKYSLFELENGRKRMLASAGELQKGNELALPSKYVNFLYLASHYEKLKGSPEDNEQKQLFVEQHKHYLDEIIEQISEFSKRVILADANLDKVLSAYNKHRDKPIREQAENIIHLFTLTNLGAPAAFKYFDTTIDRKRYTSTKEVLDATLIHQSITGLYETRIDLSQLGGDGGPAPEAAAKGGTVSLQDEHRLFDIPVTTSLPDVWLQDFPQAWAETGGLGRAKCQAPIIIDLKPTAVPVSIKQYPMSLEAHMGIRQHIIKFLELGVLRPCRSPWNTPLLPVKKPGTQDYRPVQDLREINKRTVDIHPTVPNPYNLLSTLKPDYSWYTVLDLKDAFFCLPLAPQSQELFAFEWKDPERGISGQLTWTRLPQGFKNSPTLFNEALHRDLTDFRTQHPEVTLLQYVDDLLLAAPTKKACTQGTRHLLQELGEKGYRASAKKAQICQTKVTYLGYILSEGKRWLTPGRIETVARIPPPRNPREVREFLGKAGFCRLFIPGFAELAAPLYALTKPSTPFTWQTEHQLAFEALKKALLSAPALGLPDTSKPFTLFLDERQGIAKGVLTQKLGPWKRPVAYLSKKLDPVAAGWPPCLRIMAATAMLVKDSAKLTLGQPLTVITPHTLEAIVRQPPDRWITNARLTHYQALLLDTDRVQFGPPVTLNPATLLPVPENQPSPHDCRQVLAETHGTREDLKDQELPDADHTWYTDGSSYLDSGTRRAGAAVVDGHNTIWAQSLPPGTSAQKAELIALTKALELSKGKKANIYTDSRYAFATAHTHGSIYERRGWLTSEGKEIKNKAEIIALLKALFLPQEVAIIHCPGHQKGQDPVAVGNRQADRVARQAAMAEVLTLATEPDNTSHITAGKRTADGSEFEKRTADGSEFESPKKKAKVE

SEQ ID NO: 1996 - protein, 2097 aa, synthetic construct
MPAAKRVKLDGGDKKYSIGLDIGTNSVGWAVITDEYKVPSKKFKVLGNTDRHSIKKNLIGALLFDSGETAEATRLKRTARRRYTRRKNRICYLQEIFSNEMAKVDDSFFHRLEESFLVEEDKKHERHPIFGNIVDEVAYHEKYPTIYHLRKKLVDSTDKADLRLIYLALAHMIKFRGHFLIEGDLNPDNSDVDKLFIQLVQTYNQLFEENPINASGVDAKAILSARLSKSRRLENLIAQLPGEKKNGLFGNLIALSLGLTPNFKSNFDLAEDAKLQLSKDTYDDDLDNLLAQIGDQYADLFLAAKNLSDAILLSDILRVNTEITKAPLSASMIKRYDEHHQDLTLLKALVRQQLPEKYKEIFFDQSKNGYAGYIDGGASQEEFYKFIKPILEKMDGTEELLVKLNREDLLRKQRTFDNGSIPHQIHLGELHAILRRQEDFYPFLKDNREKIEKILTFRIPYYVGPLARGNSRFAWMTRKSEETITPWNFEEVVDKGASAQSFIERMTNFDKNLPNEKVLPKHSLLYEYFTVYNELTKVKYVTEGMRKPAFLSGEQKKAIVDLLFKTNRKVTVKQLKEDYFKKIECFDSVEISGVEDRFNASLGTYHDLLKIIKDKDFLDNEENEDILEDIVLTLTLFEDREMIEERLKTYAHLFDDKVMKQLKRRRYTGWGRLSRKLINGIRDKQSGKTILDFLKSDGFANRNFMQLIHDDSLTFKEDIQKAQVSGQGDSLHEHIANLAGSPAIKKGILQTVKVVDELVKVMGRHKPENIVIEMARENQTTQKGQKNSRERMKRIEEGIKELGSQILKEHPVENTQLQNEKLYLYYLQNGRDMYVDQELDINRLSDYDVDHIVPQSFLKDDSIDNKVLTRSDKARGKSDNVPSEEVVKKMKNYWRQLLNAKLITQRKFDNLTKAERGGLSELDKAGFIKRQLVETRQITKHVAQILDSRMNTKYDENDKLIREVKVITLKSKLVSDFRKDFQFYKVREINNYHHAHDAYLNAVVGTALIKKYPKLESEFVYGDYKVYDVRKMIAKSEQEIGKATAKYFFYSNIMNFFKTEITLANGEIRKRPLIETNGETGEIVWDKGRDFATVRKVLSMPQVNIVKKTEVQTGGFSKESILPKRNSDKLIARKKDWDPKKYGGFDSPTVAYSVLVVAKVEKGKSKKLKSVKELLGITIMERSSFEKNPIDFLEAKGYKEVKKDLIIKLPKYSLFELENGRKRMLASAGELQKGNELALPSKYVNFLYLASHYEKLKGSPEDNEQKQLFVEQHKHYLDEIIEQISEFSKRVILADANLDKVLSAYNKHRDKPIREQAENIIHLFTLTNLGAPAAFKYFDTTIDRKRYTSTKEVLDATLIHQSITGLYETRIDLSQLGGDGGGGGPAPGGTVSLQDEHRLFDIPVTTSLPDVWLQDFPQAWAETGGLGRAKCQAPIIIDLKPTAVPVSIKQYPMSLEAHMGIRQHIIKFLELGVLRPCRSPWNTPLLPVKKPGTQDYRPVQDLREINKRTVDIHPTVPNPYNLLSTLKPDYSWYTVLDLKDAFFCLPLAPQSQELFAFEWKDPERGISGQLTWTRLPQGFKNSPTLFNEALHRDLTDFRTQHPEVTLLQYVDDLLLAAPTKKACTQGTRHLLQELGEKGYRASAKKAQICQTKVTYLGYILSEGKRWLTPGRIETVARIPPPRNPREVREFLGKAGFCRLFIPGFAELAAPLYALTKPSTPFTWQTEHQLAFEALKKALLSAPALGLPDTSKPFTLFLDERQGIAKGVLTQKLGPWKRPVAYLSKKLDPVAAGWPPCLRIMAATAMLVKDSAKLTLGQPLTVITPHTLEAIVRQPPDRWITNARLTHYQALLLDTDRVQFGPPVTLNPATLLPVPENQPSPHDCRQVLAETHGTREDLKDQELPDADHTWYTDGSSYLDSGTRRAGAAVVDGHNTIWAQSLPPGTSAQKAELIALTKALELSKGKKANIYTDSRYAFATAHTHGSIYERRGWLTSEGKEIKNKAEIIALLKALFLPQEVAIIHCPGHQKGQDPVAVGNRQADRVARQAAMAEVLTLATEPDNTSHITAGKRTADGSEFEKRTADGSEFESPKKKAKVE

SEQ ID NO: 1997 - protein, 2099 aa, synthetic construct
MPAAKRVKLDGGDKKYSIGLDIGTNSVGWAVITDEYKVPSKKFKVLGNTDRHSIKKNLIGALLFDSGETAEATRLKRTARRRYTRRKNRICYLQEIFSNEMAKVDDSFFHRLEESFLVEEDKKHERHPIFGNIVDEVAYHEKYPTIYHLRKKLVDSTDKADLRLIYLALAHMIKFRGHFLIEGDLNPDNSDVDKLFIQLVQTYNQLFEENPINASGVDAKAILSARLSKSRRLENLIAQLPGEKKNGLFGNLIALSLGLTPNFKSNFDLAEDAKLQLSKDTYDDDLDNLLAQIGDQYADLFLAAKNLSDAILLSDILRVNTEITKAPLSASMIKRYDEHHQDLTLLKALVRQQLPEKYKEIFFDQSKNGYAGYIDGGASQEEFYKFIKPILEKMDGTEELLVKLNREDLLRKQRTFDNGSIPHQIHLGELHAILRRQEDFYPFLKDNREKIEKILTFRIPYYVGPLARGNSRFAWMTRKSEETITPWNFEEVVDKGASAQSFIERMTNFDKNLPNEKVLPKHSLLYEYFTVYNELTKVKYVTEGMRKPAFLSGEQKKAIVDLLFKTNRKVTVKQLKEDYFKKIECFDSVEISGVEDRFNASLGTYHDLLKIIKDKDFLDNEENEDILEDIVLTLTLFEDREMIEERLKTYAHLFDDKVMKQLKRRRYTGWGRLSRKLINGIRDKQSGKTILDFLKSDGFANRNFMQLIHDDSLTFKEDIQKAQVSGQGDSLHEHIANLAGSPAIKKGILQTVKVVDELVKVMGRHKPENIVIEMARENQTTQKGQKNSRERMKRIEEGIKELGSQILKEHPVENTQLQNEKLYLYYLQNGRDMYVDQELDINRLSDYDVDHIVPQSFLKDDSIDNKVLTRSDKARGKSDNVPSEEVVKKMKNYWRQLLNAKLITQRKFDNLTKAERGGLSELDKAGFIKRQLVETRQITKHVAQILDSRMNTKYDENDKLIREVKVITLKSKLVSDFRKDFQFYKVREINNYHHAHDAYLNAVVGTALIKKYPKLESEFVYGDYKVYDVRKMIAKSEQEIGKATAKYFFYSNIMNFFKTEITLANGEIRKRPLIETNGETGEIVWDKGRDFATVRKVLSMPQVNIVKKTEVQTGGFSKESILPKRNSDKLIARKKDWDPKKYGGFDSPTVAYSVLVVAKVEKGKSKKLKSVKELLGITIMERSSFEKNPIDFLEAKGYKEVKKDLIIKLPKYSLFELENGRKRMLASAGELQKGNELALPSKYVNFLYLASHYEKLKGSPEDNEQKQLFVEQHKHYLDEIIEQISEFSKRVILADANLDKVLSAYNKHRDKPIREQAENIIHLFTLTNLGAPAAFKYFDTTIDRKRYTSTKEVLDATLIHQSITGLYETRIDLSQLGGDGGGGSEAAAKGGTVSLQDEHRLFDIPVTTSLPDVWLQDFPQAWAETGGLGRAKCQAPIIIDLKPTAVPVSIKQYPMSLEAHMGIRQHIIKFLELGVLRPCRSPWNTPLLPVKKPGTQDYRPVQDLREINKRTVDIHPTVPNPYNLLSTLKPDYSWYTVLDLKDAFFCLPLAPQSQELFAFEWKDPERGISGQLTWTRLPQGFKNSPTLFNEALHRDLTDFRTQHPEVTLLQYVDDLLLAAPTKKACTQGTRHLLQELGEKGYRASAKKAQICQTKVTYLGYILSEGKRWLTPGRIETVARIPPPRNPREVREFLGKAGFCRLFIPGFAELAAPLYALTKPSTPFTWQTEHQLAFEALKKALLSAPALGLPDTSKPFTLFLDERQGIAKGVLTQKLGPWKRPVAYLSKKLDPVAAGWPPCLRIMAATAMLVKDSAKLTLGQPLTVITPHTLEAIVRQPPDRWITNARLTHYQALLLDTDRVQFGPPVTLNPATLLPVPENQPSPHDCRQVLAETHGTREDLKDQELPDADHTWYTDGSSYLDSGTRRAGAAVVDGHNTIWAQSLPPGTSAQKAELIALTKALELSKGKKANIYTDSRYAFATAHTHGSIYERRGWLTSEGKEIKNKAEIIALLKALFLPQEVAIIHCPGHQKGQDPVAVGNRQADRVARQAAMAEVLTLATEPDNTSHITAGKRTADGSEFEKRTADGSEFESPKKKAKVE

SEQ ID NO: 1998 - protein, 2096 aa, synthetic construct
MPAAKRVKLDGGDKKYSIGLDIGTNSVGWAVITDEYKVPSKKFKVLGNTDRHSIKKNLIGALLFDSGETAEATRLKRTARRRYTRRKNRICYLQEIFSNEMAKVDDSFFHRLEESFLVEEDKKHERHPIFGNIVDEVAYHEKYPTIYHLRKKLVDSTDKADLRLIYLALAHMIKFRGHFLIEGDLNPDNSDVDKLFIQLVQTYNQLFEENPINASGVDAKAILSARLSKSRRLENLIAQLPGEKKNGLFGNLIALSLGLTPNFKSNFDLAEDAKLQLSKDTYDDDLDNLLAQIGDQYADLFLAAKNLSDAILLSDILRVNTEITKAPLSASMIKRYDEHHQDLTLLKALVRQQLPEKYKEIFFDQSKNGYAGYIDGGASQEEFYKFIKPILEKMDGTEELLVKLNREDLLRKQRTFDNGSIPHQIHLGELHAILRRQEDFYPFLKDNREKIEKILTFRIPYYVGPLARGNSRFAWMTRKSEETITPWNFEEVVDKGASAQSFIERMTNFDKNLPNEKVLPKHSLLYEYFTVYNELTKVKYVTEGMRKPAFLSGEQKKAIVDLLFKTNRKVTVKQLKEDYFKKIECFDSVEISGVEDRFNASLGTYHDLLKIIKDKDFLDNEENEDILEDIVLTLTLFEDREMIEERLKTYAHLFDDKVMKQLKRRRYTGWGRLSRKLINGIRDKQSGKTILDFLKSDGFANRNFMQLIHDDSLTFKEDIQKAQVSGQGDSLHEHIANLAGSPAIKKGILQTVKVVDELVKVMGRHKPENIVIEMARENQTTQKGQKNSRERMKRIEEGIKELGSQILKEHPVENTQLQNEKLYLYYLQNGRDMYVDQELDINRLSDYDVDHIVPQSFLKDDSIDNKVLTRSDKARGKSDNVPSEEVVKKMKNYWRQLLNAKLITQRKFDNLTKAERGGLSELDKAGFIKRQLVETRQITKHVAQILDSRMNTKYDENDKLIREVKVITLKSKLVSDFRKDFQFYKVREINNYHHAHDAYLNAVVGTALIKKYPKLESEFVYGDYKVYDVRKMIAKSEQEIGKATAKYFFYSNIMNFFKTEITLANGEIRKRPLIETNGETGEIVWDKGRDFATVRKVLSMPQVNIVKKTEVQTGGFSKESILPKRNSDKLIARKKDWDPKKYGGFDSPTVAYSVLVVAKVEKGKSKKLKSVKELLGITIMERSSFEKNPIDFLEAKGYKEVKKDLIIKLPKYSLFELENGRKRMLASAGELQKGNELALPSKYVNFLYLASHYEKLKGSPEDNEQKQLFVEQHKHYLDEIIEQISEFSKRVILADANLDKVLSAYNKHRDKPIREQAENIIHLFTLTNLGAPAAFKYFDTTIDRKRYTSTKEVLDATLIHQSITGLYETRIDLSQLGGDGGGGGGGGGTVSLQDEHRLFDIPVTTSLPDVWLQDFPQAWAETGGLGRAKCQAPIIIDLKPTAVPVSIKQYPMSLEAHMGIRQHIIKFLELGVLRPCRSPWNTPLLPVKKPGTQDYRPVQDLREINKRTVDIHPTVPNPYNLLSTLKPDYSWYTVLDLKDAFFCLPLAPQSQELFAFEWKDPERGISGQLTWTRLPQGFKNSPTLFNEALHRDLTDFRTQHPEVTLLQYVDDLLLAAPTKKACTQGTRHLLQELGEKGYRASAKKAQICQTKVTYLGYILSEGKRWLTPGRIETVARIPPPRNPREVREFLGKAGFCRLFIPGFAELAAPLYALTKPSTPFTWQTEHQLAFEALKKALLSAPALGLPDTSKPFTLFLDERQGIAKGVLTQKLGPWKRPVAYLSKKLDPVAAGWPPCLRIMAATAMLVKDSAKLTLGQPLTVITPHTLEAIVRQPPDRWITNARLTHYQALLLDTDRVQFGPPVTLNPATLLPVPENQPSPHDCRQVLAETHGTREDLKDQELPDADHTWYTDGSSYLDSGTRRAGAAVVDGHNTIWAQSLPPGTSAQKAELIALTKALELSKGKKANIYTDSRYAFATAHTHGSIYERRGWLTSEGKEIKNKAEIIALLKALFLPQEVAIIHCPGHQKGQDPVAVGNRQADRVARQAAMAEVLTLATEPDNTSHITAGKRTADGSEFEKRTADGSEFESPKKKAKVE

SEQ ID NO: 1999 - protein, 2094 aa, synthetic construct
MPAAKRVKLDGGDKKYSIGLDIGTNSVGWAVITDEYKVPSKKFKVLGNTDRHSIKKNLIGALLFDSGETAEATRLKRTARRRYTRRKNRICYLQEIFSNEMAKVDDSFFHRLEESFLVEEDKKHERHPIFGNIVDEVAYHEKYPTIYHLRKKLVDSTDKADLRLIYLALAHMIKFRGHFLIEGDLNPDNSDVDKLFIQLVQTYNQLFEENPINASGVDAKAILSARLSKSRRLENLIAQLPGEKKNGLFGNLIALSLGLTPNFKSNFDLAEDAKLQLSKDTYDDDLDNLLAQIGDQYADLFLAAKNLSDAILLSDILRVNTEITKAPLSASMIKRYDEHHQDLTLLKALVRQQLPEKYKEIFFDQSKNGYAGYIDGGASQEEFYKFIKPILEKMDGTEELLVKLNREDLLRKQRTFDNGSIPHQIHLGELHAILRRQEDFYPFLKDNREKIEKILTFRIPYYVGPLARGNSRFAWMTRKSEETITPWNFEEVVDKGASAQSFIERMTNFDKNLPNEKVLPKHSLLYEYFTVYNELTKVKYVTEGMRKPAFLSGEQKKAIVDLLFKTNRKVTVKQLKEDYFKKIECFDSVEISGVEDRFNASLGTYHDLLKIIKDKDFLDNEENEDILEDIVLTLTLFEDREMIEERLKTYAHLFDDKVMKQLKRRRYTGWGRLSRKLINGIRDKQSGKTILDFLKSDGFANRNFMQLIHDDSLTFKEDIQKAQVSGQGDSLHEHIANLAGSPAIKKGILQTVKVVDELVKVMGRHKPENIVIEMARENQTTQKGQKNSRERMKRIEEGIKELGSQILKEHPVENTQLQNEKLYLYYLQNGRDMYVDQELDINRLSDYDVDHIVPQSFLKDDSIDNKVLTRSDKARGKSDNVPSEEVVKKMKNYWRQLLNAKLITQRKFDNLTKAERGGLSELDKAGFIKRQLVETRQITKHVAQILDSRMNTKYDENDKLIREVKVITLKSKLVSDFRKDFQFYKVREINNYHHAHDAYLNAVVGTALIKKYPKLESEFVYGDYKVYDVRKMIAKSEQEIGKATAKYFFYSNIMNFFKTEITLANGEIRKRPLIETNGETGEIVWDKGRDFATVRKVLSMPQVNIVKKTEVQTGGFSKESILPKRNSDKLIARKKDWDPKKYGGFDSPTVAYSVLVVAKVEKGKSKKLKSVKELLGITIMERSSFEKNPIDFLEAKGYKEVKKDLIIKLPKYSLFELENGRKRMLASAGELQKGNELALPSKYVNFLYLASHYEKLKGSPEDNEQKQLFVEQHKHYLDEIIEQISEFSKRVILADANLDKVLSAYNKHRDKPIREQAENIIHLFTLTNLGAPAAFKYFDTTIDRKRYTSTKEVLDATLIHQSITGLYETRIDLSQLGGDGGGGSGGTVSLQDEHRLFDIPVTTSLPDVWLQDFPQAWAETGGLGRAKCQAPIIIDLKPTAVPVSIKQYPMSLEAHMGIRQHIIKFLELGVLRPCRSPWNTPLLPVKKPGTQDYRPVQDLREINKRTVDIHPTVPNPYNLLSTLKPDYSWYTVLDLKDAFFCLPLAPQSQELFAFEWKDPERGISGQLTWTRLPQGFKNSPTLFNEALHRDLTDFRTQHPEVTLLQYVDDLLLAAPTKKACTQGTRHLLQELGEKGYRASAKKAQICQTKVTYLGYILSEGKRWLTPGRIETVARIPPPRNPREVREFLGKAGFCRLFIPGFAELAAPLYALTKPSTPFTWQTEHQLAFEALKKALLSAPALGLPDTSKPFTLFLDERQGIAKGVLTQKLGPWKRPVAYLSKKLDPVAAGWPPCLRIMAATAMLVKDSAKLTLGQPLTVITPHTLEAIVRQPPDRWITNARLTHYQALLLDTDRVQFGPPVTLNPATLLPVPENQPSPHDCRQVLAETHGTREDLKDQELPDADHTWYTDGSSYLDSGTRRAGAAVVDGHNTIWAQSLPPGTSAQKAELIALTKALELSKGKKANIYTDSRYAFATAHTHGSIYERRGWLTSEGKEIKNKAEIIALLKALFLPQEVAIIHCPGHQKGQDPVAVGNRQADRVARQAAMAEVLTLATEPDNTSHITAGKRTADGSEFEKRTADGSEFESPKKKAKVE

SEQ ID NO: 2000 - protein, 2121 aa, synthetic construct
MPAAKRVKLDGGDKKYSIGLDIGTNSVGWAVITDEYKVPSKKFKVLGNTDRHSIKKNLIGALLFDSGETAEATRLKRTARRRYTRRKNRICYLQEIFSNEMAKVDDSFFHRLEESFLVEEDKKHERHPIFGNIVDEVAYHEKYPTIYHLRKKLVDSTDKADLRLIYLALAHMIKFRGHFLIEGDLNPDNSDVDKLFIQLVQTYNQLFEENPINASGVDAKAILSARLSKSRRLENLIAQLPGEKKNGLFGNLIALSLGLTPNFKSNFDLAEDAKLQLSKDTYDDDLDNLLAQIGDQYADLFLAAKNLSDAILLSDILRVNTEITKAPLSASMIKRYDEHHQDLTLLKALVRQQLPEKYKEIFFDQSKNGYAGYIDGGASQEEFYKFIKPILEKMDGTEELLVKLNREDLLRKQRTFDNGSIPHQIHLGELHAILRRQEDFYPFLKDNREKIEKILTFRIPYYVGPLARGNSRFAWMTRKSEETITPWNFEEVVDKGASAQSFIERMTNFDKNLPNEKVLPKHSLLYEYFTVYNELTKVKYVTEGMRKPAFLSGEQKKAIVDLLFKTNRKVTVKQLKEDYFKKIECFDSVEISGVEDRFNASLGTYHDLLKIIKDKDFLDNEENEDILEDIVLTLTLFEDREMIEERLKTYAHLFDDKVMKQLKRRRYTGWGRLSRKLINGIRDKQSGKTILDFLKSDGFANRNFMQLIHDDSLTFKEDIQKAQVSGQGDSLHEHIANLAGSPAIKKGILQTVKVVDELVKVMGRHKPENIVIEMARENQTTQKGQKNSRERMKRIEEGIKELGSQILKEHPVENTQLQNEKLYLYYLQNGRDMYVDQELDINRLSDYDVDHIVPQSFLKDDSIDNKVLTRSDKARGKSDNVPSEEVVKKMKNYWRQLLNAKLITQRKFDNLTKAERGGLSELDKAGFIKRQLVETRQITKHVAQILDSRMNTKYDENDKLIREVKVITLKSKLVSDFRKDFQFYKVREINNYHHAHDAYLNAVVGTALIKKYPKLESEFVYGDYKVYDVRKMIAKSEQEIGKATAKYFFYSNIMNFFKTEITLANGEIRKRPLIETNGETGEIVWDKGRDFATVRKVLSMPQVNIVKKTEVQTGGFSKESILPKRNSDKLIARKKDWDPKKYGGFDSPTVAYSVLVVAKVEKGKSKKLKSVKELLGITIMERSSFEKNPIDFLEAKGYKEVKKDLIIKLPKYSLFELENGRKRMLASAGELQKGNELALPSKYVNFLYLASHYEKLKGSPEDNEQKQLFVEQHKHYLDEIIEQISEFSKRVILADANLDKVLSAYNKHRDKPIREQAENIIHLFTLTNLGAPAAFKYFDTTIDRKRYTSTKEVLDATLIHQSITGLYETRIDLSQLGGDGGEAAAKEAAAKEAAAKEAAAKEAAAKEAAAKGGTVSLQDEHRLFDIPVTTSLPDVWLQDFPQAWAETGGLGRAKCQAPIIIDLKPTAVPVSIKQYPMSLEAHMGIRQHIIKFLELGVLRPCRSPWNTPLLPVKKPGTQDYRPVQDLREINKRTVDIHPTVPNPYNLLSTLKPDYSWYTVLDLKDAFFCLPLAPQSQELFAFEWKDPERGISGQLTWTRLPQGFKNSPTLFNEALHRDLTDFRTQHPEVTLLQYVDDLLLAAPTKKACTQGTRHLLQELGEKGYRASAKKAQICQTKVTYLGYILSEGKRWLTPGRIETVARIPPPRNPREVREFLGKAGFCRLFIPGFAELAAPLYALTKPSTPFTWQTEHQLAFEALKKALLSAPALGLPDTSKPFTLFLDERQGIAKGVLTQKLGPWKRPVAYLSKKLDPVAAGWPPCLRIMAATAMLVKDSAKLTLGQPLTVITPHTLEAIVRQPPDRWITNARLTHYQALLLDTDRVQFGPPVTLNPATLLPVPENQPSPHDCRQVLAETHGTREDLKDQELPDADHTWYTDGSSYLDSGTRRAGAAVVDGHNTIWAQSLPPGTSAQKAELIALTKALELSKGKKANIYTDSRYAFATAHTHGSIYERRGWLTSEGKEIKNKAEIIALLKALFLPQEVAIIHCPGHQKGQDPVAVGNRQADRVARQAAMAEVLTLATEPDNTSHITAGKRTADGSEFEKRTADGSEFESPKKKAKVE

SEQ ID NO: 2001 - protein, 2102 aa, synthetic construct
MPAAKRVKLDGGDKKYSIGLDIGTNSVGWAVITDEYKVPSKKFKVLGNTDRHSIKKNLIGALLFDSGETAEATRLKRTARRRYTRRKNRICYLQEIFSNEMAKVDDSFFHRLEESFLVEEDKKHERHPIFGNIVDEVAYHEKYPTIYHLRKKLVDSTDKADLRLIYLALAHMIKFRGHFLIEGDLNPDNSDVDKLFIQLVQTYNQLFEENPINASGVDAKAILSARLSKSRRLENLIAQLPGEKKNGLFGNLIALSLGLTPNFKSNFDLAEDAKLQLSKDTYDDDLDNLLAQIGDQYADLFLAAKNLSDAILLSDILRVNTEITKAPLSASMIKRYDEHHQDLTLLKALVRQQLPEKYKEIFFDQSKNGYAGYIDGGASQEEFYKFIKPILEKMDGTEELLVKLNREDLLRKQRTFDNGSIPHQIHLGELHAILRRQEDFYPFLKDNREKIEKILTFRIPYYVGPLARGNSRFAWMTRKSEETITPWNFEEVVDKGASAQSFIERMTNFDKNLPNEKVLPKHSLLYEYFTVYNELTKVKYVTEGMRKPAFLSGEQKKAIVDLLFKTNRKVTVKQLKEDYFKKIECFDSVEISGVEDRFNASLGTYHDLLKIIKDKDFLDNEENEDILEDIVLTLTLFEDREMIEERLKTYAHLFDDKVMKQLKRRRYTGWGRLSRKLINGIRDKQSGKTILDFLKSDGFANRNFMQLIHDDSLTFKEDIQKAQVSGQGDSLHEHIANLAGSPAIKKGILQTVKVVDELVKVMGRHKPENIVIEMARENQTTQKGQKNSRERMKRIEEGIKELGSQILKEHPVENTQLQNEKLYLYYLQNGRDMYVDQELDINRLSDYDVDHIVPQSFLKDDSIDNKVLTRSDKARGKSDNVPSEEVVKKMKNYWRQLLNAKLITQRKFDNLTKAERGGLSELDKAGFIKRQLVETRQITKHVAQILDSRMNTKYDENDKLIREVKVITLKSKLVSDFRKDFQFYKVREINNYHHAHDAYLNAVVGTALIKKYPKLESEFVYGDYKVYDVRKMIAKSEQEIGKATAKYFFYSNIMNFFKTEITLANGEIRKRPLIETNGETGEIVWDKGRDFATVRKVLSMPQVNIVKKTEVQTGGFSKESILPKRNSDKLIARKKDWDPKKYGGFDSPTVAYSVLVVAKVEKGKSKKLKSVKELLGITIMERSSFEKNPIDFLEAKGYKEVKKDLIIKLPKYSLFELENGRKRMLASAGELQKGNELALPSKYVNFLYLASHYEKLKGSPEDNEQKQLFVEQHKHYLDEIIEQISEFSKRVILADANLDKVLSAYNKHRDKPIREQAENIIHLFTLTNLGAPAAFKYFDTTIDRKRYTSTKEVLDATLIHQSITGLYETRIDLSQLGGDGGEAAAKGGSGSSGGTVSLQDEHRLFDIPVTTSLPDVWLQDFPQAWAETGGLGRAKCQAPIIIDLKPTAVPVSIKQYPMSLEAHMGIRQHIIKFLELGVLRPCRSPWNTPLLPVKKPGTQDYRPVQDLREINKRTVDIHPTVPNPYNLLSTLKPDYSWYTVLDLKDAFFCLPLAPQSQELFAFEWKDPERGISGQLTWTRLPQGFKNSPTLFNEALHRDLTDFRTQHPEVTLLQYVDDLLLAAPTKKACTQGTRHLLQELGEKGYRASAKKAQICQTKVTYLGYILSEGKRWLTPGRIETVARIPPPRNPREVREFLGKAGFCRLFIPGFAELAAPLYALTKPSTPFTWQTEHQLAFEALKKALLSAPALGLPDTSKPFTLFLDERQGIAKGVLTQKLGPWKRPVAYLSKKLDPVAAGWPPCLRIMAATAMLVKDSAKLTLGQPLTVITPHTLEAIVRQPPDRWITNARLTHYQALLLDTDRVQFGPPVTLNPATLLPVPENQPSPHDCRQVLAETHGTREDLKDQELPDADHTWYTDGSSYLDSGTRRAGAAVVDGHNTIWAQSLPPGTSAQKAELIALTKALELSKGKKANIYTDSRYAFATAHTHGSIYERRGWLTSEGKEIKNKAEIIALLKALFLPQEVAIIHCPGHQKGQDPVAVGNRQADRVARQAAMAEVLTLATEPDNTSHITAGKRTADGSEFEKRTADGSEFESPKKKAKVE

SEQ ID NO: 2002 - protein, 2100 aa, synthetic construct
MPAAKRVKLDGGDKKYSIGLDIGTNSVGWAVITDEYKVPSKKFKVLGNTDRHSIKKNLIGALLFDSGETAEATRLKRTARRRYTRRKNRICYLQEIFSNEMAKVDDSFFHRLEESFLVEEDKKHERHPIFGNIVDEVAYHEKYPTIYHLRKKLVDSTDKADLRLIYLALAHMIKFRGHFLIEGDLNPDNSDVDKLFIQLVQTYNQLFEENPINASGVDAKAILSARLSKSRRLENLIAQLPGEKKNGLFGNLIALSLGLTPNFKSNFDLAEDAKLQLSKDTYDDDLDNLLAQIGDQYADLFLAAKNLSDAILLSDILRVNTEITKAPLSASMIKRYDEHHQDLTLLKALVRQQLPEKYKEIFFDQSKNGYAGYIDGGASQEEFYKFIKPILEKMDGTEELLVKLNREDLLRKQRTFDNGSIPHQIHLGELHAILRRQEDFYPFLKDNREKIEKILTFRIPYYVGPLARGNSRFAWMTRKSEETITPWNFEEVVDKGASAQSFIERMTNFDKNLPNEKVLPKHSLLYEYFTVYNELTKVKYVTEGMRKPAFLSGEQKKAIVDLLFKTNRKVTVKQLKEDYFKKIECFDSVEISGVEDRFNASLGTYHDLLKIIKDKDFLDNEENEDILEDIVLTLTLFEDREMIEERLKTYAHLFDDKVMKQLKRRRYTGWGRLSRKLINGIRDKQSGKTILDFLKSDGFANRNFMQLIHDDSLTFKEDIQKAQVSGQGDSLHEHIANLAGSPAIKKGILQTVKVVDELVKVMGRHKPENIVIEMARENQTTQKGQKNSRERMKRIEEGIKELGSQILKEHPVENTQLQNEKLYLYYLQNGRDMYVDQELDINRLSDYDVDHIVPQSFLKDDSIDNKVLTRSDKARGKSDNVPSEEVVKKMKNYWRQLLNAKLITQRKFDNLTKAERGGLSELDKAGFIKRQLVETRQITKHVAQILDSRMNTKYDENDKLIREVKVITLKSKLVSDFRKDFQFYKVREINNYHHAHDAYLNAVVGTALIKKYPKLESEFVYGDYKVYDVRKMIAKSEQEIGKATAKYFFYSNIMNFFKTEITLANGEIRKRPLIETNGETGEIVWDKGRDFATVRKVLSMPQVNIVKKTEVQTGGFSKESILPKRNSDKLIARKKDWDPKKYGGFDSPTVAYSVLVVAKVEKGKSKKLKSVKELLGITIMERSSFEKNPIDFLEAKGYKEVKKDLIIKLPKYSLFELENGRKRMLASAGELQKGNELALPSKYVNFLYLASHYEKLKGSPEDNEQKQLFVEQHKHYLDEIIEQISEFSKRVILADANLDKVLSAYNKHRDKPIREQAENIIHLFTLTNLGAPAAFKYFDTTIDRKRYTSTKEVLDATLIHQSITGLYETRIDLSQLGGDGGGGGGSSPAPGGTVSLQDEHRLFDIPVTTSLPDVWLQDFPQAWAETGGLGRAKCQAPIIIDLKPTAVPVSIKQYPMSLEAHMGIRQHIIKFLELGVLRPCRSPWNTPLLPVKKPGTQDYRPVQDLREINKRTVDIHPTVPNPYNLLSTLKPDYSWYTVLDLKDAFFCLPLAPQSQELFAFEWKDPERGISGQLTWTRLPQGFKNSPTLFNEALHRDLTDFRTQHPEVTLLQYVDDLLLAAPTKKACTQGTRHLLQELGEKGYRASAKKAQICQTKVTYLGYILSEGKRWLTPGRIETVARIPPPRNPREVREFLGKAGFCRLFIPGFAELAAPLYALTKPSTPFTWQTEHQLAFEALKKALLSAPALGLPDTSKPFTLFLDERQGIAKGVLTQKLGPWKRPVAYLSKKLDPVAAGWPPCLRIMAATAMLVKDSAKLTLGQPLTVITPHTLEAIVRQPPDRWITNARLTHYQALLLDTDRVQFGPPVTLNPATLLPVPENQPSPHDCRQVLAETHGTREDLKDQELPDADHTWYTDGSSYLDSGTRRAGAAVVDGHNTIWAQSLPPGTSAQKAELIALTKALELSKGKKANIYTDSRYAFATAHTHGSIYERRGWLTSEGKEIKNKAEIIALLKALFLPQEVAIIHCPGHQKGQDPVAVGNRQADRVARQAAMAEVLTLATEPDNTSHITAGKRTADGSEFEKRTADGSEFESPKKKAKVE

SEQ ID NO: 2003 - protein, 2102 aa, synthetic construct
MPAAKRVKLDGGDKKYSIGLDIGTNSVGWAVITDEYKVPSKKFKVLGNTDRHSIKKNLIGALLFDSGETAEATRLKRTARRRYTRRKNRICYLQEIFSNEMAKVDDSFFHRLEESFLVEEDKKHERHPIFGNIVDEVAYHEKYPTIYHLRKKLVDSTDKADLRLIYLALAHMIKFRGHFLIEGDLNPDNSDVDKLFIQLVQTYNQLFEENPINASGVDAKAILSARLSKSRRLENLIAQLPGEKKNGLFGNLIALSLGLTPNFKSNFDLAEDAKLQLSKDTYDDDLDNLLAQIGDQYADLFLAAKNLSDAILLSDILRVNTEITKAPLSASMIKRYDEHHQDLTLLKALVRQQLPEKYKEIFFDQSKNGYAGYIDGGASQEEFYKFIKPILEKMDGTEELLVKLNREDLLRKQRTFDNGSIPHQIHLGELHAILRRQEDFYPFLKDNREKIEKILTFRIPYYVGPLARGNSRFAWMTRKSEETITPWNFEEVVDKGASAQSFIERMTNFDKNLPNEKVLPKHSLLYEYFTVYNELTKVKYVTEGMRKPAFLSGEQKKAIVDLLFKTNRKVTVKQLKEDYFKKIECFDSVEISGVEDRFNASLGTYHDLLKIIKDKDFLDNEENEDILEDIVLTLTLFEDREMIEERLKTYAHLFDDKVMKQLKRRRYTGWGRLSRKLINGIRDKQSGKTILDFLKSDGFANRNFMQLIHDDSLTFKEDIQKAQVSGQGDSLHEHIANLAGSPAIKKGILQTVKVVDELVKVMGRHKPENIVIEMARENQTTQKGQKNSRERMKRIEEGIKELGSQILKEHPVENTQLQNEKLYLYYLQNGRDMYVDQELDINRLSDYDVDHIVPQSFLKDDSIDNKVLTRSDKARGKSDNVPSEEVVKKMKNYWRQLLNAKLITQRKFDNLTKAERGGLSELDKAGFIKRQLVETRQITKHVAQILDSRMNTKYDENDKLIREVKVITLKSKLVSDFRKDFQFYKVREINNYHHAHDAYLNAVVGTALIKKYPKLESEFVYGDYKVYDVRKMIAKSEQEIGKATAKYFFYSNIMNFFKTEITLANGEIRKRPLIETNGETGEIVWDKGRDFATVRKVLSMPQVNIVKKTEVQTGGFSKESILPKRNSDKLIARKKDWDPKKYGGFDSPTVAYSVLVVAKVEKGKSKKLKSVKELLGITIMERSSFEKNPIDFLEAKGYKEVKKDLIIKLPKYSLFELENGRKRMLASAGELQKGNELALPSKYVNFLYLASHYEKLKGSPEDNEQKQLFVEQHKHYLDEIIEQISEFSKRVILADANLDKVLSAYNKHRDKPIREQAENIIHLFTLTNLGAPAAFKYFDTTIDRKRYTSTKEVLDATLIHQSITGLYETRIDLSQLGGDGGGGSGGGEAAAKGGTVSLQDEHRLFDIPVTTSLPDVWLQDFPQAWAETGGLGRAKCQAPIIIDLKPTAVPVSIKQYPMSLEAHMGIRQHIIKFLELGVLRPCRSPWNTPLLPVKKPGTQDYRPVQDLREINKRTVDIHPTVPNPYNLLSTLKPDYSWYTVLDLKDAFFCLPLAPQSQELFAFEWKDPERGISGQLTWTRLPQGFKNSPTLFNEALHRDLTDFRTQHPEVTLLQYVDDLLLAAPTKKACTQGTRHLLQELGEKGYRASAKKAQICQTKVTYLGYILSEGKRWLTPGRIETVARIPPPRNPREVREFLGKAGFCRLFIPGFAELAAPLYALTKPSTPFTWQTEHQLAFEALKKALLSAPALGLPDTSKPFTLFLDERQGIAKGVLTQKLGPWKRPVAYLSKKLDPVAAGWPPCLRIMAATAMLVKDSAKLTLGQPLTVITPHTLEAIVRQPPDRWITNARLTHYQALLLDTDRVQFGPPVTLNPATLLPVPENQPSPHDCRQVLAETHGTREDLKDQELPDADHTWYTDGSSYLDSGTRRAGAAVVDGHNTIWAQSLPPGTSAQKAELIALTKALELSKGKKANIYTDSRYAFATAHTHGSIYERRGWLTSEGKEIKNKAEIIALLKALFLPQEVAIIHCPGHQKGQDPVAVGNRQADRVARQAAMAEVLTLATEPDNTSHITAGKRTADGSEFEKRTADGSEFESPKKKAKVE

SEQ ID NO: 2004 - protein, 2099 aa, synthetic construct
MPAAKRVKLDGGDKKYSIGLDIGTNSVGWAVITDEYKVPSKKFKVLGNTDRHSIKKNLIGALLFDSGETAEATRLKRTARRRYTRRKNRICYLQEIFSNEMAKVDDSFFHRLEESFLVEEDKKHERHPIFGNIVDEVAYHEKYPTIYHLRKKLVDSTDKADLRLIYLALAHMIKFRGHFLIEGDLNPDNSDVDKLFIQLVQTYNQLFEENPINASGVDAKAILSARLSKSRRLENLIAQLPGEKKNGLFGNLIALSLGLTPNFKSNFDLAEDAKLQLSKDTYDDDLDNLLAQIGDQYADLFLAAKNLSDAILLSDILRVNTEITKAPLSASMIKRYDEHHQDLTLLKALVRQQLPEKYKEIFFDQSKNGYAGYIDGGASQEEFYKFIKPILEKMDGTEELLVKLNREDLLRKQRTFDNGSIPHQIHLGELHAILRRQEDFYPFLKDNREKIEKILTFRIPYYVGPLARGNSRFAWMTRKSEETITPWNFEEVVDKGASAQSFIERMTNFDKNLPNEKVLPKHSLLYEYFTVYNELTKVKYVTEGMRKPAFLSGEQKKAIVDLLFKTNRKVTVKQLKEDYFKKIECFDSVEISGVEDRFNASLGTYHDLLKIIKDKDFLDNEENEDILEDIVLTLTLFEDREMIEERLKTYAHLFDDKVMKQLKRRRYTGWGRLSRKLINGIRDKQSGKTILDFLKSDGFANRNFMQLIHDDSLTFKEDIQKAQVSGQGDSLHEHIANLAGSPAIKKGILQTVKVVDELVKVMGRHKPENIVIEMARENQTTQKGQKNSRERMKRIEEGIKELGSQILKEHPVENTQLQNEKLYLYYLQNGRDMYVDQELDINRLSDYDVDHIVPQSFLKDDSIDNKVLTRSDKARGKSDNVPSEEVVKKMKNYWRQLLNAKLITQRKFDNLTKAERGGLSELDKAGFIKRQLVETRQITKHVAQILDSRMNTKYDENDKLIREVKVITLKSKLVSDFRKDFQFYKVREINNYHHAHDAYLNAVVGTALIKKYPKLESEFVYGDYKVYDVRKMIAKSEQEIGKATAKYFFYSNIMNFFKTEITLANGEIRKRPLIETNGETGEIVWDKGRDFATVRKVLSMPQVNIVKKTEVQTGGFSKESILPKRNSDKLIARKKDWDPKKYGGFDSPTVAYSVLVVAKVEKGKSKKLKSVKELLGITIMERSSFEKNPIDFLEAKGYKEVKKDLIIKLPKYSLFELENGRKRMLASAGELQKGNELALPSKYVNFLYLASHYEKLKGSPEDNEQKQLFVEQHKHYLDEIIEQISEFSKRVILADANLDKVLSAYNKHRDKPIREQAENIIHLFTLTNLGAPAAFKYFDTTIDRKRYTSTKEVLDATLIHQSITGLYETRIDLSQLGGDGGGGGEAAAKGGTVSLQDEHRLFDIPVTTSLPDVWLQDFPQAWAETGGLGRAKCQAPIIIDLKPTAVPVSIKQYPMSLEAHMGIRQHIIKFLELGVLRPCRSPWNTPLLPVKKPGTQDYRPVQDLREINKRTVDIHPTVPNPYNLLSTLKPDYSWYTVLDLKDAFFCLPLAPQSQELFAFEWKDPERGISGQLTWTRLPQGFKNSPTLFNEALHRDLTDFRTQHPEVTLLQYVDDLLLAAPTKKACTQGTRHLLQELGEKGYRASAKKAQICQTKVTYLGYILSEGKRWLTPGRIETVARIPPPRNPREVREFLGKAGFCRLFIPGFAELAAPLYALTKPSTPFTWQTEHQLAFEALKKALLSAPALGLPDTSKPFTLFLDERQGIAKGVLTQKLGPWKRPVAYLSKKLDPVAAGWPPCLRIMAATAMLVKDSAKLTLGQPLTVITPHTLEAIVRQPPDRWITNARLTHYQALLLDTDRVQFGPPVTLNPATLLPVPENQPSPHDCRQVLAETHGTREDLKDQELPDADHTWYTDGSSYLDSGTRRAGAAVVDGHNTIWAQSLPPGTSAQKAELIALTKALELSKGKKANIYTDSRYAFATAHTHGSIYERRGWLTSEGKEIKNKAEIIALLKALFLPQEVAIIHCPGHQKGQDPVAVGNRQADRVARQAAMAEVLTLATEPDNTSHITAGKRTADGSEFEKRTADGSEFESPKKKAKVE

SEQ ID NO: 2005 - protein, 2103 aa, synthetic construct
MPAAKRVKLDGGDKKYSIGLDIGTNSVGWAVITDEYKVPSKKFKVLGNTDRHSIKKNLIGALLFDSGETAEATRLKRTARRRYTRRKNRICYLQEIFSNEMAKVDDSFFHRLEESFLVEEDKKHERHPIFGNIVDEVAYHEKYPTIYHLRKKLVDSTDKADLRLIYLALAHMIKFRGHFLIEGDLNPDNSDVDKLFIQLVQTYNQLFEENPINASGVDAKAILSARLSKSRRLENLIAQLPGEKKNGLFGNLIALSLGLTPNFKSNFDLAEDAKLQLSKDTYDDDLDNLLAQIGDQYADLFLAAKNLSDAILLSDILRVNTEITKAPLSASMIKRYDEHHQDLTLLKALVRQQLPEKYKEIFFDQSKNGYAGYIDGGASQEEFYKFIKPILEKMDGTEELLVKLNREDLLRKQRTFDNGSIPHQIHLGELHAILRRQEDFYPFLKDNREKIEKILTFRIPYYVGPLARGNSRFAWMTRKSEETITPWNFEEVVDKGASAQSFIERMTNFDKNLPNEKVLPKHSLLYEYFTVYNELTKVKYVTEGMRKPAFLSGEQKKAIVDLLFKTNRKVTVKQLKEDYFKKIECFDSVEISGVEDRFNASLGTYHDLLKIIKDKDFLDNEENEDILEDIVLTLTLFEDREMIEERLKTYAHLFDDKVMKQLKRRRYTGWGRLSRKLINGIRDKQSGKTILDFLKSDGFANRNFMQLIHDDSLTFKEDIQKAQVSGQGDSLHEHIANLAGSPAIKKGILQTVKVVDELVKVMGRHKPENIVIEMARENQTTQKGQKNSRERMKRIEEGIKELGSQILKEHPVENTQLQNEKLYLYYLQNGRDMYVDQELDINRLSDYDVDHIVPQSFLKDDSIDNKVLTRSDKARGKSDNVPSEEVVKKMKNYWRQLLNAKLITQRKFDNLTKAERGGLSELDKAGFIKRQLVETRQITKHVAQILDSRMNTKYDENDKLIREVKVITLKSKLVSDFRKDFQFYKVREINNYHHAHDAYLNAVVGTALIKKYPKLESEFVYGDYKVYDVRKMIAKSEQEIGKATAKYFFYSNIMNFFKTEITLANGEIRKRPLIETNGETGEIVWDKGRDFATVRKVLSMPQVNIVKKTEVQTGGFSKESILPKRNSDKLIARKKDWDPKKYGGFDSPTVAYSVLVVAKVEKGKSKKLKSVKELLGITIMERSSFEKNPIDFLEAKGYKEVKKDLIIKLPKYSLFELENGRKRMLASAGELQKGNELALPSKYVNFLYLASHYEKLKGSPEDNEQKQLFVEQHKHYLDEIIEQISEFSKRVILADANLDKVLSAYNKHRDKPIREQAENIIHLFTLTNLGAPAAFKYFDTTIDRKRYTSTKEVLDATLIHQSITGLYETRIDLSQLGGDGGGSAGSAAGSGEFGGTVSLQDEHRLFDIPVTTSLPDVWLQDFPQAWAETGGLGRAKCQAPIIIDLKPTAVPVSIKQYPMSLEAHMGIRQHIIKFLELGVLRPCRSPWNTPLLPVKKPGTQDYRPVQDLREINKRTVDIHPTVPNPYNLLSTLKPDYSWYTVLDLKDAFFCLPLAPQSQELFAFEWKDPERGISGQLTWTRLPQGFKNSPTLFNEALHRDLTDFRTQHPEVTLLQYVDDLLLAAPTKKACTQGTRHLLQELGEKGYRASAKKAQICQTKVTYLGYILSEGKRWLTPGRIETVARIPPPRNPREVREFLGKAGFCRLFIPGFAELAAPLYALTKPSTPFTWQTEHQLAFEALKKALLSAPALGLPDTSKPFTLFLDERQGIAKGVLTQKLGPWKRPVAYLSKKLDPVAAGWPPCLRIMAATAMLVKDSAKLTLGQPLTVITPHTLEAIVRQPPDRWITNARLTHYQALLLDTDRVQFGPPVTLNPATLLPVPENQPSPHDCRQVLAETHGTREDLKDQELPDADHTWYTDGSSYLDSGTRRAGAAVVDGHNTIWAQSLPPGTSAQKAELIALTKALELSKGKKANIYTDSRYAFATAHTHGSIYERRGWLTSEGKEIKNKAEIIALLKALFLPQEVAIIHCPGHQKGQDPVAVGNRQADRVARQAAMAEVLTLATEPDNTSHITAGKRTADGSEFEKRTADGSEFESPKKKAKVE

SEQ ID NO: 2006 - protein, 2096 aa, synthetic construct
MPAAKRVKLDGGDKKYSIGLDIGTNSVGWAVITDEYKVPSKKFKVLGNTDRHSIKKNLIGALLFDSGETAEATRLKRTARRRYTRRKNRICYLQEIFSNEMAKVDDSFFHRLEESFLVEEDKKHERHPIFGNIVDEVAYHEKYPTIYHLRKKLVDSTDKADLRLIYLALAHMIKFRGHFLIEGDLNPDNSDVDKLFIQLVQTYNQLFEENPINASGVDAKAILSARLSKSRRLENLIAQLPGEKKNGLFGNLIALSLGLTPNFKSNFDLAEDAKLQLSKDTYDDDLDNLLAQIGDQYADLFLAAKNLSDAILLSDILRVNTEITKAPLSASMIKRYDEHHQDLTLLKALVRQQLPEKYKEIFFDQSKNGYAGYIDGGASQEEFYKFIKPILEKMDGTEELLVKLNREDLLRKQRTFDNGSIPHQIHLGELHAILRRQEDFYPFLKDNREKIEKILTFRIPYYVGPLARGNSRFAWMTRKSEETITPWNFEEVVDKGASAQSFIERMTNFDKNLPNEKVLPKHSLLYEYFTVYNELTKVKYVTEGMRKPAFLSGEQKKAIVDLLFKTNRKVTVKQLKEDYFKKIECFDSVEISGVEDRFNASLGTYHDLLKIIKDKDFLDNEENEDILEDIVLTLTLFEDREMIEERLKTYAHLFDDKVMKQLKRRRYTGWGRLSRKLINGIRDKQSGKTILDFLKSDGFANRNFMQLIHDDSLTFKEDIQKAQVSGQGDSLHEHIANLAGSPAIKKGILQTVKVVDELVKVMGRHKPENIVIEMARENQTTQKGQKNSRERMKRIEEGIKELGSQILKEHPVENTQLQNEKLYLYYLQNGRDMYVDQELDINRLSDYDVDHIVPQSFLKDDSIDNKVLTRSDKARGKSDNVPSEEVVKKMKNYWRQLLNAKLITQRKFDNLTKAERGGLSELDKAGFIKRQLVETRQITKHVAQILDSRMNTKYDENDKLIREVKVITLKSKLVSDFRKDFQFYKVREINNYHHAHDAYLNAVVGTALIKKYPKLESEFVYGDYKVYDVRKMIAKSEQEIGKATAKYFFYSNIMNFFKTEITLANGEIRKRPLIETNGETGEIVWDKGRDFATVRKVLSMPQVNIVKKTEVQTGGFSKESILPKRNSDKLIARKKDWDPKKYGGFDSPTVAYSVLVVAKVEKGKSKKLKSVKELLGITIMERSSFEKNPIDFLEAKGYKEVKKDLIIKLPKYSLFELENGRKRMLASAGELQKGNELALPSKYVNFLYLASHYEKLKGSPEDNEQKQLFVEQHKHYLDEIIEQISEFSKRVILADANLDKVLSAYNKHRDKPIREQAENIIHLFTLTNLGAPAAFKYFDTTIDRKRYTSTKEVLDATLIHQSITGLYETRIDLSQLGGDGGGGGGSGGTVSLQDEHRLFDIPVTTSLPDVWLQDFPQAWAETGGLGRAKCQAPIIIDLKPTAVPVSIKQYPMSLEAHMGIRQHIIKFLELGVLRPCRSPWNTPLLPVKKPGTQDYRPVQDLREINKRTVDIHPTVPNPYNLLSTLKPDYSWYTVLDLKDAFFCLPLAPQSQELFAFEWKDPERGISGQLTWTRLPQGFKNSPTLFNEALHRDLTDFRTQHPEVTLLQYVDDLLLAAPTKKACTQGTRHLLQELGEKGYRASAKKAQICQTKVTYLGYILSEGKRWLTPGRIETVARIPPPRNPREVREFLGKAGFCRLFIPGFAELAAPLYALTKPSTPFTWQTEHQLAFEALKKALLSAPALGLPDTSKPFTLFLDERQGIAKGVLTQKLGPWKRPVAYLSKKLDPVAAGWPPCLRIMAATAMLVKDSAKLTLGQPLTVITPHTLEAIVRQPPDRWITNARLTHYQALLLDTDRVQFGPPVTLNPATLLPVPENQPSPHDCRQVLAETHGTREDLKDQELPDADHTWYTDGSSYLDSGTRRAGAAVVDGHNTIWAQSLPPGTSAQKAELIALTKALELSKGKKANIYTDSRYAFATAHTHGSIYERRGWLTSEGKEIKNKAEIIALLKALFLPQEVAIIHCPGHQKGQDPVAVGNRQADRVARQAAMAEVLTLATEPDNTSHITAGKRTADGSEFEKRTADGSEFESPKKKAKVE

SEQ ID NO: 2007 - protein, 2100 aa, synthetic construct
MPAAKRVKLDGGDKKYSIGLDIGTNSVGWAVITDEYKVPSKKFKVLGNTDRHSIKKNLIGALLFDSGETAEATRLKRTARRRYTRRKNRICYLQEIFSNEMAKVDDSFFHRLEESFLVEEDKKHERHPIFGNIVDEVAYHEKYPTIYHLRKKLVDSTDKADLRLIYLALAHMIKFRGHFLIEGDLNPDNSDVDKLFIQLVQTYNQLFEENPINASGVDAKAILSARLSKSRRLENLIAQLPGEKKNGLFGNLIALSLGLTPNFKSNFDLAEDAKLQLSKDTYDDDLDNLLAQIGDQYADLFLAAKNLSDAILLSDILRVNTEITKAPLSASMIKRYDEHHQDLTLLKALVRQQLPEKYKEIFFDQSKNGYAGYIDGGASQEEFYKFIKPILEKMDGTEELLVKLNREDLLRKQRTFDNGSIPHQIHLGELHAILRRQEDFYPFLKDNREKIEKILTFRIPYYVGPLARGNSRFAWMTRKSEETITPWNFEEVVDKGASAQSFIERMTNFDKNLPNEKVLPKHSLLYEYFTVYNELTKVKYVTEGMRKPAFLSGEQKKAIVDLLFKTNRKVTVKQLKEDYFKKIECFDSVEISGVEDRFNASLGTYHDLLKIIKDKDFLDNEENEDILEDIVLTLTLFEDREMIEERLKTYAHLFDDKVMKQLKRRRYTGWGRLSRKLINGIRDKQSGKTILDFLKSDGFANRNFMQLIHDDSLTFKEDIQKAQVSGQGDSLHEHIANLAGSPAIKKGILQTVKVVDELVKVMGRHKPENIVIEMARENQTTQKGQKNSRERMKRIEEGIKELGSQILKEHPVENTQLQNEKLYLYYLQNGRDMYVDQELDINRLSDYDVDHIVPQSFLKDDSIDNKVLTRSDKARGKSDNVPSEEVVKKMKNYWRQLLNAKLITQRKFDNLTKAERGGLSELDKAGFIKRQLVETRQITKHVAQILDSRMNTKYDENDKLIREVKVITLKSKLVSDFRKDFQFYKVREINNYHHAHDAYLNAVVGTALIKKYPKLESEFVYGDYKVYDVRKMIAKSEQEIGKATAKYFFYSNIMNFFKTEITLANGEIRKRPLIETNGETGEIVWDKGRDFATVRKVLSMPQVNIVKKTEVQTGGFSKESILPKRNSDKLIARKKDWDPKKYGGFDSPTVAYSVLVVAKVEKGKSKKLKSVKELLGITIMERSSFEKNPIDFLEAKGYKEVKKDLIIKLPKYSLFELENGRKRMLASAGELQKGNELALPSKYVNFLYLASHYEKLKGSPEDNEQKQLFVEQHKHYLDEIIEQISEFSKRVILADANLDKVLSAYNKHRDKPIREQAENIIHLFTLTNLGAPAAFKYFDTTIDRKRYTSTKEVLDATLIHQSITGLYETRIDLSQLGGDGGGSSGGGPAPGGTVSLQDEHRLFDIPVTTSLPDVWLQDFPQAWAETGGLGRAKCQAPIIIDLKPTAVPVSIKQYPMSLEAHMGIRQHIIKFLELGVLRPCRSPWNTPLLPVKKPGTQDYRPVQDLREINKRTVDIHPTVPNPYNLLSTLKPDYSWYTVLDLKDAFFCLPLAPQSQELFAFEWKDPERGISGQLTWTRLPQGFKNSPTLFNEALHRDLTDFRTQHPEVTLLQYVDDLLLAAPTKKACTQGTRHLLQELGEKGYRASAKKAQICQTKVTYLGYILSEGKRWLTPGRIETVARIPPPRNPREVREFLGKAGFCRLFIPGFAELAAPLYALTKPSTPFTWQTEHQLAFEALKKALLSAPALGLPDTSKPFTLFLDERQGIAKGVLTQKLGPWKRPVAYLSKKLDPVAAGWPPCLRIMAATAMLVKDSAKLTLGQPLTVITPHTLEAIVRQPPDRWITNARLTHYQALLLDTDRVQFGPPVTLNPATLLPVPENQPSPHDCRQVLAETHGTREDLKDQELPDADHTWYTDGSSYLDSGTRRAGAAVVDGHNTIWAQSLPPGTSAQKAELIALTKALELSKGKKANIYTDSRYAFATAHTHGSIYERRGWLTSEGKEIKNKAEIIALLKALFLPQEVAIIHCPGHQKGQDPVAVGNRQADRVARQAAMAEVLTLATEPDNTSHITAGKRTADGSEFEKRTADGSEFESPKKKAKVE

SEQ ID NO: 2008 - protein, 2096 aa, synthetic construct
MPAAKRVKLDGGDKKYSIGLDIGTNSVGWAVITDEYKVPSKKFKVLGNTDRHSIKKNLIGALLFDSGETAEATRLKRTARRRYTRRKNRICYLQEIFSNEMAKVDDSFFHRLEESFLVEEDKKHERHPIFGNIVDEVAYHEKYPTIYHLRKKLVDSTDKADLRLIYLALAHMIKFRGHFLIEGDLNPDNSDVDKLFIQLVQTYNQLFEENPINASGVDAKAILSARLSKSRRLENLIAQLPGEKKNGLFGNLIALSLGLTPNFKSNFDLAEDAKLQLSKDTYDDDLDNLLAQIGDQYADLFLAAKNLSDAILLSDILRVNTEITKAPLSASMIKRYDEHHQDLTLLKALVRQQLPEKYKEIFFDQSKNGYAGYIDGGASQEEFYKFIKPILEKMDGTEELLVKLNREDLLRKQRTFDNGSIPHQIHLGELHAILRRQEDFYPFLKDNREKIEKILTFRIPYYVGPLARGNSRFAWMTRKSEETITPWNFEEVVDKGASAQSFIERMTNFDKNLPNEKVLPKHSLLYEYFTVYNELTKVKYVTEGMRKPAFLSGEQKKAIVDLLFKTNRKVTVKQLKEDYFKKIECFDSVEISGVEDRFNASLGTYHDLLKIIKDKDFLDNEENEDILEDIVLTLTLFEDREMIEERLKTYAHLFDDKVMKQLKRRRYTGWGRLSRKLINGIRDKQSGKTILDFLKSDGFANRNFMQLIHDDSLTFKEDIQKAQVSGQGDSLHEHIANLAGSPAIKKGILQTVKVVDELVKVMGRHKPENIVIEMARENQTTQKGQKNSRERMKRIEEGIKELGSQILKEHPVENTQLQNEKLYLYYLQNGRDMYVDQELDINRLSDYDVDHIVPQSFLKDDSIDNKVLTRSDKARGKSDNVPSEEVVKKMKNYWRQLLNAKLITQRKFDNLTKAERGGLSELDKAGFIKRQLVETRQITKHVAQILDSRMNTKYDENDKLIREVKVITLKSKLVSDFRKDFQFYKVREINNYHHAHDAYLNAVVGTALIKKYPKLESEFVYGDYKVYDVRKMIAKSEQEIGKATAKYFFYSNIMNFFKTEITLANGEIRKRPLIETNGETGEIVWDKGRDFATVRKVLSMPQVNIVKKTEVQTGGFSKESILPKRNSDKLIARKKDWDPKKYGGFDSPTVAYSVLVVAKVEKGKSKKLKSVKELLGITIMERSSFEKNPIDFLEAKGYKEVKKDLIIKLPKYSLFELENGRKRMLASAGELQKGNELALPSKYVNFLYLASHYEKLKGSPEDNEQKQLFVEQHKHYLDEIIEQISEFSKRVILADANLDKVLSAYNKHRDKPIREQAENIIHLFTLTNLGAPAAFKYFDTTIDRKRYTSTKEVLDATLIHQSITGLYETRIDLSQLGGDGGEAAAKGGTVSLQDEHRLFDIPVTTSLPDVWLQDFPQAWAETGGLGRAKCQAPIIIDLKPTAVPVSIKQYPMSLEAHMGIRQHIIKFLELGVLRPCRSPWNTPLLPVKKPGTQDYRPVQDLREINKRTVDIHPTVPNPYNLLSTLKPDYSWYTVLDLKDAFFCLPLAPQSQELFAFEWKDPERGISGQLTWTRLPQGFKNSPTLFNEALHRDLTDFRTQHPEVTLLQYVDDLLLAAPTKKACTQGTRHLLQELGEKGYRASAKKAQICQTKVTYLGYILSEGKRWLTPGRIETVARIPPPRNPREVREFLGKAGFCRLFIPGFAELAAPLYALTKPSTPFTWQTEHQLAFEALKKALLSAPALGLPDTSKPFTLFLDERQGIAKGVLTQKLGPWKRPVAYLSKKLDPVAAGWPPCLRIMAATAMLVKDSAKLTLGQPLTVITPHTLEAIVRQPPDRWITNARLTHYQALLLDTDRVQFGPPVTLNPATLLPVPENQPSPHDCRQVLAETHGTREDLKDQELPDADHTWYTDGSSYLDSGTRRAGAAVVDGHNTIWAQSLPPGTSAQKAELIALTKALELSKGKKANIYTDSRYAFATAHTHGSIYERRGWLTSEGKEIKNKAEIIALLKALFLPQEVAIIHCPGHQKGQDPVAVGNRQADRVARQAAMAEVLTLATEPDNTSHITAGKRTADGSEFEKRTADGSEFESPKKKAKVE

SEQ ID NO: 2009 - protein, 2102 aa, synthetic construct
MPAAKRVKLDGGDKKYSIGLDIGTNSVGWAVITDEYKVPSKKFKVLGNTDRHSIKKNLIGALLFDSGETAEATRLKRTARRRYTRRKNRICYLQEIFSNEMAKVDDSFFHRLEESFLVEEDKKHERHPIFGNIVDEVAYHEKYPTIYHLRKKLVDSTDKADLRLIYLALAHMIKFRGHFLIEGDLNPDNSDVDKLFIQLVQTYNQLFEENPINASGVDAKAILSARLSKSRRLENLIAQLPGEKKNGLFGNLIALSLGLTPNFKSNFDLAEDAKLQLSKDTYDDDLDNLLAQIGDQYADLFLAAKNLSDAILLSDILRVNTEITKAPLSASMIKRYDEHHQDLTLLKALVRQQLPEKYKEIFFDQSKNGYAGYIDGGASQEEFYKFIKPILEKMDGTEELLVKLNREDLLRKQRTFDNGSIPHQIHLGELHAILRRQEDFYPFLKDNREKIEKILTFRIPYYVGPLARGNSRFAWMTRKSEETITPWNFEEVVDKGASAQSFIERMTNFDKNLPNEKVLPKHSLLYEYFTVYNELTKVKYVTEGMRKPAFLSGEQKKAIVDLLFKTNRKVTVKQLKEDYFKKIECFDSVEISGVEDRFNASLGTYHDLLKIIKDKDFLDNEENEDILEDIVLTLTLFEDREMIEERLKTYAHLFDDKVMKQLKRRRYTGWGRLSRKLINGIRDKQSGKTILDFLKSDGFANRNFMQLIHDDSLTFKEDIQKAQVSGQGDSLHEHIANLAGSPAIKKGILQTVKVVDELVKVMGRHKPENIVIEMARENQTTQKGQKNSRERMKRIEEGIKELGSQILKEHPVENTQLQNEKLYLYYLQNGRDMYVDQELDINRLSDYDVDHIVPQSFLKDDSIDNKVLTRSDKARGKSDNVPSEEVVKKMKNYWRQLLNAKLITQRKFDNLTKAERGGLSELDKAGFIKRQLVETRQITKHVAQILDSRMNTKYDENDKLIREVKVITLKSKLVSDFRKDFQFYKVREINNYHHAHDAYLNAVVGTALIKKYPKLESEFVYGDYKVYDVRKMIAKSEQEIGKATAKYFFYSNIMNFFKTEITLANGEIRKRPLIETNGETGEIVWDKGRDFATVRKVLSMPQVNIVKKTEVQTGGFSKESILPKRNSDKLIARKKDWDPKKYGGFDSPTVAYSVLVVAKVEKGKSKKLKSVKELLGITIMERSSFEKNPIDFLEAKGYKEVKKDLIIKLPKYSLFELENGRKRMLASAGELQKGNELALPSKYVNFLYLASHYEKLKGSPEDNEQKQLFVEQHKHYLDEIIEQISEFSKRVILADANLDKVLSAYNKHRDKPIREQAENIIHLFTLTNLGAPAAFKYFDTTIDRKRYTSTKEVLDATLIHQSITGLYETRIDLSQLGGDGGEAAAKGGGGSSGGTVSLQDEHRLFDIPVTTSLPDVWLQDFPQAWAETGGLGRAKCQAPIIIDLKPTAVPVSIKQYPMSLEAHMGIRQHIIKFLELGVLRPCRSPWNTPLLPVKKPGTQDYRPVQDLREINKRTVDIHPTVPNPYNLLSTLKPDYSWYTVLDLKDAFFCLPLAPQSQELFAFEWKDPERGISGQLTWTRLPQGFKNSPTLFNEALHRDLTDFRTQHPEVTLLQYVDDLLLAAPTKKACTQGTRHLLQELGEKGYRASAKKAQICQTKVTYLGYILSEGKRWLTPGRIETVARIPPPRNPREVREFLGKAGFCRLFIPGFAELAAPLYALTKPSTPFTWQTEHQLAFEALKKALLSAPALGLPDTSKPFTLFLDERQGIAKGVLTQKLGPWKRPVAYLSKKLDPVAAGWPPCLRIMAATAMLVKDSAKLTLGQPLTVITPHTLEAIVRQPPDRWITNARLTHYQALLLDTDRVQFGPPVTLNPATLLPVPENQPSPHDCRQVLAETHGTREDLKDQELPDADHTWYTDGSSYLDSGTRRAGAAVVDGHNTIWAQSLPPGTSAQKAELIALTKALELSKGKKANIYTDSRYAFATAHTHGSIYERRGWLTSEGKEIKNKAEIIALLKALFLPQEVAIIHCPGHQKGQDPVAVGNRQADRVARQAAMAEVLTLATEPDNTSHITAGKRTADGSEFEKRTADGSEFESPKKKAKVE

SEQ ID NO: 2010 - protein, 2100 aa, synthetic construct
MPAAKRVKLDGGDKKYSIGLDIGTNSVGWAVITDEYKVPSKKFKVLGNTDRHSIKKNLIGALLFDSGETAEATRLKRTARRRYTRRKNRICYLQEIFSNEMAKVDDSFFHRLEESFLVEEDKKHERHPIFGNIVDEVAYHEKYPTIYHLRKKLVDSTDKADLRLIYLALAHMIKFRGHFLIEGDLNPDNSDVDKLFIQLVQTYNQLFEENPINASGVDAKAILSARLSKSRRLENLIAQLPGEKKNGLFGNLIALSLGLTPNFKSNFDLAEDAKLQLSKDTYDDDLDNLLAQIGDQYADLFLAAKNLSDAILLSDILRVNTEITKAPLSASMIKRYDEHHQDLTLLKALVRQQLPEKYKEIFFDQSKNGYAGYIDGGASQEEFYKFIKPILEKMDGTEELLVKLNREDLLRKQRTFDNGSIPHQIHLGELHAILRRQEDFYPFLKDNREKIEKILTFRIPYYVGPLARGNSRFAWMTRKSEETITPWNFEEVVDKGASAQSFIERMTNFDKNLPNEKVLPKHSLLYEYFTVYNELTKVKYVTEGMRKPAFLSGEQKKAIVDLLFKTNRKVTVKQLKEDYFKKIECFDSVEISGVEDRFNASLGTYHDLLKIIKDKDFLDNEENEDILEDIVLTLTLFEDREMIEERLKTYAHLFDDKVMKQLKRRRYTGWGRLSRKLINGIRDKQSGKTILDFLKSDGFANRNFMQLIHDDSLTFKEDIQKAQVSGQGDSLHEHIANLAGSPAIKKGILQTVKVVDELVKVMGRHKPENIVIEMARENQTTQKGQKNSRERMKRIEEGIKELGSQILKEHPVENTQLQNEKLYLYYLQNGRDMYVDQELDINRLSDYDVDHIVPQSFLKDDSIDNKVLTRSDKARGKSDNVPSEEVVKKMKNYWRQLLNAKLITQRKFDNLTKAERGGLSELDKAGFIKRQLVETRQITKHVAQILDSRMNTKYDENDKLIREVKVITLKSKLVSDFRKDFQFYKVREINNYHHAHDAYLNAVVGTALIKKYPKLESEFVYGDYKVYDVRKMIAKSEQEIGKATAKYFFYSNIMNFFKTEITLANGEIRKRPLIETNGETGEIVWDKGRDFATVRKVLSMPQVNIVKKTEVQTGGFSKESILPKRNSDKLIARKKDWDPKKYGGFDSPTVAYSVLVVAKVEKGKSKKLKSVKELLGITIMERSSFEKNPIDFLEAKGYKEVKKDLIIKLPKYSLFELENGRKRMLASAGELQKGNELALPSKYVNFLYLASHYEKLKGSPEDNEQKQLFVEQHKHYLDEIIEQISEFSKRVILADANLDKVLSAYNKHRDKPIREQAENIIHLFTLTNLGAPAAFKYFDTTIDRKRYTSTKEVLDATLIHQSITGLYETRIDLSQLGGDGGPAPGGSGGGGGTVSLQDEHRLFDIPVTTSLPDVWLQDFPQAWAETGGLGRAKCQAPIIIDLKPTAVPVSIKQYPMSLEAHMGIRQHIIKFLELGVLRPCRSPWNTPLLPVKKPGTQDYRPVQDLREINKRTVDIHPTVPNPYNLLSTLKPDYSWYTVLDLKDAFFCLPLAPQSQELFAFEWKDPERGISGQLTWTRLPQGFKNSPTLFNEALHRDLTDFRTQHPEVTLLQYVDDLLLAAPTKKACTQGTRHLLQELGEKGYRASAKKAQICQTKVTYLGYILSEGKRWLTPGRIETVARIPPPRNPREVREFLGKAGFCRLFIPGFAELAAPLYALTKPSTPFTWQTEHQLAFEALKKALLSAPALGLPDTSKPFTLFLDERQGIAKGVLTQKLGPWKRPVAYLSKKLDPVAAGWPPCLRIMAATAMLVKDSAKLTLGQPLTVITPHTLEAIVRQPPDRWITNARLTHYQALLLDTDRVQFGPPVTLNPATLLPVPENQPSPHDCRQVLAETHGTREDLKDQELPDADHTWYTDGSSYLDSGTRRAGAAVVDGHNTIWAQSLPPGTSAQKAELIALTKALELSKGKKANIYTDSRYAFATAHTHGSIYERRGWLTSEGKEIKNKAEIIALLKALFLPQEVAIIHCPGHQKGQDPVAVGNRQADRVARQAAMAEVLTLATEPDNTSHITAGKRTADGSEFEKRTADGSEFESPKKKAKVE

SEQ ID NO: 2011 - protein, 2100 aa, synthetic construct
MPAAKRVKLDGGDKKYSIGLDIGTNSVGWAVITDEYKVPSKKFKVLGNTDRHSIKKNLIGALLFDSGETAEATRLKRTARRRYTRRKNRICYLQEIFSNEMAKVDDSFFHRLEESFLVEEDKKHERHPIFGNIVDEVAYHEKYPTIYHLRKKLVDSTDKADLRLIYLALAHMIKFRGHFLIEGDLNPDNSDVDKLFIQLVQTYNQLFEENPINASGVDAKAILSARLSKSRRLENLIAQLPGEKKNGLFGNLIALSLGLTPNFKSNFDLAEDAKLQLSKDTYDDDLDNLLAQIGDQYADLFLAAKNLSDAILLSDILRVNTEITKAPLSASMIKRYDEHHQDLTLLKALVRQQLPEKYKEIFFDQSKNGYAGYIDGGASQEEFYKFIKPILEKMDGTEELLVKLNREDLLRKQRTFDNGSIPHQIHLGELHAILRRQEDFYPFLKDNREKIEKILTFRIPYYVGPLARGNSRFAWMTRKSEETITPWNFEEVVDKGASAQSFIERMTNFDKNLPNEKVLPKHSLLYEYFTVYNELTKVKYVTEGMRKPAFLSGEQKKAIVDLLFKTNRKVTVKQLKEDYFKKIECFDSVEISGVEDRFNASLGTYHDLLKIIKDKDFLDNEENEDILEDIVLTLTLFEDREMIEERLKTYAHLFDDKVMKQLKRRRYTGWGRLSRKLINGIRDKQSGKTILDFLKSDGFANRNFMQLIHDDSLTFKEDIQKAQVSGQGDSLHEHIANLAGSPAIKKGILQTVKVVDELVKVMGRHKPENIVIEMARENQTTQKGQKNSRERMKRIEEGIKELGSQILKEHPVENTQLQNEKLYLYYLQNGRDMYVDQELDINRLSDYDVDHIVPQSFLKDDSIDNKVLTRSDKARGKSDNVPSEEVVKKMKNYWRQLLNAKLITQRKFDNLTKAERGGLSELDKAGFIKRQLVETRQITKHVAQILDSRMNTKYDENDKLIREVKVITLKSKLVSDFRKDFQFYKVREINNYHHAHDAYLNAVVGTALIKKYPKLESEFVYGDYKVYDVRKMIAKSEQEIGKATAKYFFYSNIMNFFKTEITLANGEIRKRPLIETNGETGEIVWDKGRDFATVRKVLSMPQVNIVKKTEVQTGGFSKESILPKRNSDKLIARKKDWDPKKYGGFDSPTVAYSVLVVAKVEKGKSKKLKSVKELLGITIMERSSFEKNPIDFLEAKGYKEVKKDLIIKLPKYSLFELENGRKRMLASAGELQKGNELALPSKYVNFLYLASHYEKLKGSPEDNEQKQLFVEQHKHYLDEIIEQISEFSKRVILADANLDKVLSAYNKHRDKPIREQAENIIHLFTLTNLGAPAAFKYFDTTIDRKRYTSTKEVLDATLIHQSITGLYETRIDLSQLGGDGGGGGPAPGGSGGTVSLQDEHRLFDIPVTTSLPDVWLQDFPQAWAETGGLGRAKCQAPIIIDLKPTAVPVSIKQYPMSLEAHMGIRQHIIKFLELGVLRPCRSPWNTPLLPVKKPGTQDYRPVQDLREINKRTVDIHPTVPNPYNLLSTLKPDYSWYTVLDLKDAFFCLPLAPQSQELFAFEWKDPERGISGQLTWTRLPQGFKNSPTLFNEALHRDLTDFRTQHPEVTLLQYVDDLLLAAPTKKACTQGTRHLLQELGEKGYRASAKKAQICQTKVTYLGYILSEGKRWLTPGRIETVARIPPPRNPREVREFLGKAGFCRLFIPGFAELAAPLYALTKPSTPFTWQTEHQLAFEALKKALLSAPALGLPDTSKPFTLFLDERQGIAKGVLTQKLGPWKRPVAYLSKKLDPVAAGWPPCLRIMAATAMLVKDSAKLTLGQPLTVITPHTLEAIVRQPPDRWITNARLTHYQALLLDTDRVQFGPPVTLNPATLLPVPENQPSPHDCRQVLAETHGTREDLKDQELPDADHTWYTDGSSYLDSGTRRAGAAVVDGHNTIWAQSLPPGTSAQKAELIALTKALELSKGKKANIYTDSRYAFATAHTHGSIYERRGWLTSEGKEIKNKAEIIALLKALFLPQEVAIIHCPGHQKGQDPVAVGNRQADRVARQAAMAEVLTLATEPDNTSHITAGKRTADGSEFEKRTADGSEFESPKKKAKVE

SEQ ID NO: 2012 - protein, 2099 aa, synthetic construct
MPAAKRVKLDGGDKKYSIGLDIGTNSVGWAVITDEYKVPSKKFKVLGNTDRHSIKKNLIGALLFDSGETAEATRLKRTARRRYTRRKNRICYLQEIFSNEMAKVDDSFFHRLEESFLVEEDKKHERHPIFGNIVDEVAYHEKYPTIYHLRKKLVDSTDKADLRLIYLALAHMIKFRGHFLIEGDLNPDNSDVDKLFIQLVQTYNQLFEENPINASGVDAKAILSARLSKSRRLENLIAQLPGEKKNGLFGNLIALSLGLTPNFKSNFDLAEDAKLQLSKDTYDDDLDNLLAQIGDQYADLFLAAKNLSDAILLSDILRVNTEITKAPLSASMIKRYDEHHQDLTLLKALVRQQLPEKYKEIFFDQSKNGYAGYIDGGASQEEFYKFIKPILEKMDGTEELLVKLNREDLLRKQRTFDNGSIPHQIHLGELHAILRRQEDFYPFLKDNREKIEKILTFRIPYYVGPLARGNSRFAWMTRKSEETITPWNFEEVVDKGASAQSFIERMTNFDKNLPNEKVLPKHSLLYEYFTVYNELTKVKYVTEGMRKPAFLSGEQKKAIVDLLFKTNRKVTVKQLKEDYFKKIECFDSVEISGVEDRFNASLGTYHDLLKIIKDKDFLDNEENEDILEDIVLTLTLFEDREMIEERLKTYAHLFDDKVMKQLKRRRYTGWGRLSRKLINGIRDKQSGKTILDFLKSDGFANRNFMQLIHDDSLTFKEDIQKAQVSGQGDSLHEHIANLAGSPAIKKGILQTVKVVDELVKVMGRHKPENIVIEMARENQTTQKGQKNSRERMKRIEEGIKELGSQILKEHPVENTQLQNEKLYLYYLQNGRDMYVDQELDINRLSDYDVDHIVPQSFLKDDSIDNKVLTRSDKARGKSDNVPSEEVVKKMKNYWRQLLNAKLITQRKFDNLTKAERGGLSELDKAGFIKRQLVETRQITKHVAQILDSRMNTKYDENDKLIREVKVITLKSKLVSDFRKDFQFYKVREINNYHHAHDAYLNAVVGTALIKKYPKLESEFVYGDYKVYDVRKMIAKSEQEIGKATAKYFFYSNIMNFFKTEITLANGEIRKRPLIETNGETGEIVWDKGRDFATVRKVLSMPQVNIVKKTEVQTGGFSKESILPKRNSDKLIARKKDWDPKKYGGFDSPTVAYSVLVVAKVEKGKSKKLKSVKELLGITIMERSSFEKNPIDFLEAKGYKEVKKDLIIKLPKYSLFELENGRKRMLASAGELQKGNELALPSKYVNFLYLASHYEKLKGSPEDNEQKQLFVEQHKHYLDEIIEQISEFSKRVILADANLDKVLSAYNKHRDKPIREQAENIIHLFTLTNLGAPAAFKYFDTTIDRKRYTSTKEVLDATLIHQSITGLYETRIDLSQLGGDGGEAAAKGGSGGTVSLQDEHRLFDIPVTTSLPDVWLQDFPQAWAETGGLGRAKCQAPIIIDLKPTAVPVSIKQYPMSLEAHMGIRQHIIKFLELGVLRPCRSPWNTPLLPVKKPGTQDYRPVQDLREINKRTVDIHPTVPNPYNLLSTLKPDYSWYTVLDLKDAFFCLPLAPQSQELFAFEWKDPERGISGQLTWTRLPQGFKNSPTLFNEALHRDLTDFRTQHPEVTLLQYVDDLLLAAPTKKACTQGTRHLLQELGEKGYRASAKKAQICQTKVTYLGYILSEGKRWLTPGRIETVARIPPPRNPREVREFLGKAGFCRLFIPGFAELAAPLYALTKPSTPFTWQTEHQLAFEALKKALLSAPALGLPDTSKPFTLFLDERQGIAKGVLTQKLGPWKRPVAYLSKKLDPVAAGWPPCLRIMAATAMLVKDSAKLTLGQPLTVITPHTLEAIVRQPPDRWITNARLTHYQALLLDTDRVQFGPPVTLNPATLLPVPENQPSPHDCRQVLAETHGTREDLKDQELPDADHTWYTDGSSYLDSGTRRAGAAVVDGHNTIWAQSLPPGTSAQKAELIALTKALELSKGKKANIYTDSRYAFATAHTHGSIYERRGWLTSEGKEIKNKAEIIALLKALFLPQEVAIIHCPGHQKGQDPVAVGNRQADRVARQAAMAEVLTLATEPDNTSHITAGKRTADGSEFEKRTADGSEFESPKKKAKVE

SEQ ID NO: 2013 - protein, 2100 aa, synthetic construct
MPAAKRVKLDGGDKKYSIGLDIGTNSVGWAVITDEYKVPSKKFKVLGNTDRHSIKKNLIGALLFDSGETAEATRLKRTARRRYTRRKNRICYLQEIFSNEMAKVDDSFFHRLEESFLVEEDKKHERHPIFGNIVDEVAYHEKYPTIYHLRKKLVDSTDKADLRLIYLALAHMIKFRGHFLIEGDLNPDNSDVDKLFIQLVQTYNQLFEENPINASGVDAKAILSARLSKSRRLENLIAQLPGEKKNGLFGNLIALSLGLTPNFKSNFDLAEDAKLQLSKDTYDDDLDNLLAQIGDQYADLFLAAKNLSDAILLSDILRVNTEITKAPLSASMIKRYDEHHQDLTLLKALVRQQLPEKYKEIFFDQSKNGYAGYIDGGASQEEFYKFIKPILEKMDGTEELLVKLNREDLLRKQRTFDNGSIPHQIHLGELHAILRRQEDFYPFLKDNREKIEKILTFRIPYYVGPLARGNSRFAWMTRKSEETITPWNFEEVVDKGASAQSFIERMTNFDKNLPNEKVLPKHSLLYEYFTVYNELTKVKYVTEGMRKPAFLSGEQKKAIVDLLFKTNRKVTVKQLKEDYFKKIECFDSVEISGVEDRFNASLGTYHDLLKIIKDKDFLDNEENEDILEDIVLTLTLFEDREMIEERLKTYAHLFDDKVMKQLKRRRYTGWGRLSRKLINGIRDKQSGKTILDFLKSDGFANRNFMQLIHDDSLTFKEDIQKAQVSGQGDSLHEHIANLAGSPAIKKGILQTVKVVDELVKVMGRHKPENIVIEMARENQTTQKGQKNSRERMKRIEEGIKELGSQILKEHPVENTQLQNEKLYLYYLQNGRDMYVDQELDINRLSDYDVDHIVPQSFLKDDSIDNKVLTRSDKARGKSDNVPSEEVVKKMKNYWRQLLNAKLITQRKFDNLTKAERGGLSELDKAGFIKRQLVETRQITKHVAQILDSRMNTKYDENDKLIREVKVITLKSKLVSDFRKDFQFYKVREINNYHHAHDAYLNAVVGTALIKKYPKLESEFVYGDYKVYDVRKMIAKSEQEIGKATAKYFFYSNIMNFFKTEITLANGEIRKRPLIETNGETGEIVWDKGRDFATVRKVLSMPQVNIVKKTEVQTGGFSKESILPKRNSDKLIARKKDWDPKKYGGFDSPTVAYSVLVVAKVEKGKSKKLKSVKELLGITIMERSSFEKNPIDFLEAKGYKEVKKDLIIKLPKYSLFELENGRKRMLASAGELQKGNELALPSKYVNFLYLASHYEKLKGSPEDNEQKQLFVEQHKHYLDEIIEQISEFSKRVILADANLDKVLSAYNKHRDKPIREQAENIIHLFTLTNLGAPAAFKYFDTTIDRKRYTSTKEVLDATLIHQSITGLYETRIDLSQLGGDGGPAPGGGGSSGGTVSLQDEHRLFDIPVTTSLPDVWLQDFPQAWAETGGLGRAKCQAPIIIDLKPTAVPVSIKQYPMSLEAHMGIRQHIIKFLELGVLRPCRSPWNTPLLPVKKPGTQDYRPVQDLREINKRTVDIHPTVPNPYNLLSTLKPDYSWYTVLDLKDAFFCLPLAPQSQELFAFEWKDPERGISGQLTWTRLPQGFKNSPTLFNEALHRDLTDFRTQHPEVTLLQYVDDLLLAAPTKKACTQGTRHLLQELGEKGYRASAKKAQICQTKVTYLGYILSEGKRWLTPGRIETVARIPPPRNPREVREFLGKAGFCRLFIPGFAELAAPLYALTKPSTPFTWQTEHQLAFEALKKALLSAPALGLPDTSKPFTLFLDERQGIAKGVLTQKLGPWKRPVAYLSKKLDPVAAGWPPCLRIMAATAMLVKDSAKLTLGQPLTVITPHTLEAIVRQPPDRWITNARLTHYQALLLDTDRVQFGPPVTLNPATLLPVPENQPSPHDCRQVLAETHGTREDLKDQELPDADHTWYTDGSSYLDSGTRRAGAAVVDGHNTIWAQSLPPGTSAQKAELIALTKALELSKGKKANIYTDSRYAFATAHTHGSIYERRGWLTSEGKEIKNKAEIIALLKALFLPQEVAIIHCPGHQKGQDPVAVGNRQADRVARQAAMAEVLTLATEPDNTSHITAGKRTADGSEFEKRTADGSEFESPKKKAKVE

SEQ ID NO: 2014 - protein, 2102 aa, synthetic construct
MPAAKRVKLDGGDKKYSIGLDIGTNSVGWAVITDEYKVPSKKFKVLGNTDRHSIKKNLIGALLFDSGETAEATRLKRTARRRYTRRKNRICYLQEIFSNEMAKVDDSFFHRLEESFLVEEDKKHERHPIFGNIVDEVAYHEKYPTIYHLRKKLVDSTDKADLRLIYLALAHMIKFRGHFLIEGDLNPDNSDVDKLFIQLVQTYNQLFEENPINASGVDAKAILSARLSKSRRLENLIAQLPGEKKNGLFGNLIALSLGLTPNFKSNFDLAEDAKLQLSKDTYDDDLDNLLAQIGDQYADLFLAAKNLSDAILLSDILRVNTEITKAPLSASMIKRYDEHHQDLTLLKALVRQQLPEKYKEIFFDQSKNGYAGYIDGGASQEEFYKFIKPILEKMDGTEELLVKLNREDLLRKQRTFDNGSIPHQIHLGELHAILRRQEDFYPFLKDNREKIEKILTFRIPYYVGPLARGNSRFAWMTRKSEETITPWNFEEVVDKGASAQSFIERMTNFDKNLPNEKVLPKHSLLYEYFTVYNELTKVKYVTEGMRKPAFLSGEQKKAIVDLLFKTNRKVTVKQLKEDYFKKIECFDSVEISGVEDRFNASLGTYHDLLKIIKDKDFLDNEENEDILEDIVLTLTLFEDREMIEERLKTYAHLFDDKVMKQLKRRRYTGWGRLSRKLINGIRDKQSGKTILDFLKSDGFANRNFMQLIHDDSLTFKEDIQKAQVSGQGDSLHEHIANLAGSPAIKKGILQTVKVVDELVKVMGRHKPENIVIEMARENQTTQKGQKNSRERMKRIEEGIKELGSQILKEHPVENTQLQNEKLYLYYLQNGRDMYVDQELDINRLSDYDVDHIVPQSFLKDDSIDNKVLTRSDKARGKSDNVPSEEVVKKMKNYWRQLLNAKLITQRKFDNLTKAERGGLSELDKAGFIKRQLVETRQITKHVAQILDSRMNTKYDENDKLIREVKVITLKSKLVSDFRKDFQFYKVREINNYHHAHDAYLNAVVGTALIKKYPKLESEFVYGDYKVYDVRKMIAKSEQEIGKATAKYFFYSNIMNFFKTEITLANGEIRKRPLIETNGETGEIVWDKGRDFATVRKVLSMPQVNIVKKTEVQTGGFSKESILPKRNSDKLIARKKDWDPKKYGGFDSPTVAYSVLVVAKVEKGKSKKLKSVKELLGITIMERSSFEKNPIDFLEAKGYKEVKKDLIIKLPKYSLFELENGRKRMLASAGELQKGNELALPSKYVNFLYLASHYEKLKGSPEDNEQKQLFVEQHKHYLDEIIEQISEFSKRVILADANLDKVLSAYNKHRDKPIREQAENIIHLFTLTNLGAPAAFKYFDTTIDRKRYTSTKEVLDATLIHQSITGLYETRIDLSQLGGDGGEAAAKGSSGGGGGTVSLQDEHRLFDIPVTTSLPDVWLQDFPQAWAETGGLGRAKCQAPIIIDLKPTAVPVSIKQYPMSLEAHMGIRQHIIKFLELGVLRPCRSPWNTPLLPVKKPGTQDYRPVQDLREINKRTVDIHPTVPNPYNLLSTLKPDYSWYTVLDLKDAFFCLPLAPQSQELFAFEWKDPERGISGQLTWTRLPQGFKNSPTLFNEALHRDLTDFRTQHPEVTLLQYVDDLLLAAPTKKACTQGTRHLLQELGEKGYRASAKKAQICQTKVTYLGYILSEGKRWLTPGRIETVARIPPPRNPREVREFLGKAGFCRLFIPGFAELAAPLYALTKPSTPFTWQTEHQLAFEALKKALLSAPALGLPDTSKPFTLFLDERQGIAKGVLTQKLGPWKRPVAYLSKKLDPVAAGWPPCLRIMAATAMLVKDSAKLTLGQPLTVITPHTLEAIVRQPPDRWITNARLTHYQALLLDTDRVQFGPPVTLNPATLLPVPENQPSPHDCRQVLAETHGTREDLKDQELPDADHTWYTDGSSYLDSGTRRAGAAVVDGHNTIWAQSLPPGTSAQKAELIALTKALELSKGKKANIYTDSRYAFATAHTHGSIYERRGWLTSEGKEIKNKAEIIALLKALFLPQEVAIIHCPGHQKGQDPVAVGNRQADRVARQAAMAEVLTLATEPDNTSHITAGKRTADGSEFEKRTADGSEFESPKKKAKVE

SEQ ID NO: 2015 - protein, 2100 aa, synthetic construct
MPAAKRVKLDGGDKKYSIGLDIGTNSVGWAVITDEYKVPSKKFKVLGNTDRHSIKKNLIGALLFDSGETAEATRLKRTARRRYTRRKNRICYLQEIFSNEMAKVDDSFFHRLEESFLVEEDKKHERHPIFGNIVDEVAYHEKYPTIYHLRKKLVDSTDKADLRLIYLALAHMIKFRGHFLIEGDLNPDNSDVDKLFIQLVQTYNQLFEENPINASGVDAKAILSARLSKSRRLENLIAQLPGEKKNGLFGNLIALSLGLTPNFKSNFDLAEDAKLQLSKDTYDDDLDNLLAQIGDQYADLFLAAKNLSDAILLSDILRVNTEITKAPLSASMIKRYDEHHQDLTLLKALVRQQLPEKYKEIFFDQSKNGYAGYIDGGASQEEFYKFIKPILEKMDGTEELLVKLNREDLLRKQRTFDNGSIPHQIHLGELHAILRRQEDFYPFLKDNREKIEKILTFRIPYYVGPLARGNSRFAWMTRKSEETITPWNFEEVVDKGASAQSFIERMTNFDKNLPNEKVLPKHSLLYEYFTVYNELTKVKYVTEGMRKPAFLSGEQKKAIVDLLFKTNRKVTVKQLKEDYFKKIECFDSVEISGVEDRFNASLGTYHDLLKIIKDKDFLDNEENEDILEDIVLTLTLFEDREMIEERLKTYAHLFDDKVMKQLKRRRYTGWGRLSRKLINGIRDKQSGKTILDFLKSDGFANRNFMQLIHDDSLTFKEDIQKAQVSGQGDSLHEHIANLAGSPAIKKGILQTVKVVDELVKVMGRHKPENIVIEMARENQTTQKGQKNSRERMKRIEEGIKELGSQILKEHPVENTQLQNEKLYLYYLQNGRDMYVDQELDINRLSDYDVDHIVPQSFLKDDSIDNKVLTRSDKARGKSDNVPSEEVVKKMKNYWRQLLNAKLITQRKFDNLTKAERGGLSELDKAGFIKRQLVETRQITKHVAQILDSRMNTKYDENDKLIREVKVITLKSKLVSDFRKDFQFYKVREINNYHHAHDAYLNAVVGTALIKKYPKLESEFVYGDYKVYDVRKMIAKSEQEIGKATAKYFFYSNIMNFFKTEITLANGEIRKRPLIETNGETGEIVWDKGRDFATVRKVLSMPQVNIVKKTEVQTGGFSKESILPKRNSDKLIARKKDWDPKKYGGFDSPTVAYSVLVVAKVEKGKSKKLKSVKELLGITIMERSSFEKNPIDFLEAKGYKEVKKDLIIKLPKYSLFELENGRKRMLASAGELQKGNELALPSKYVNFLYLASHYEKLKGSPEDNEQKQLFVEQHKHYLDEIIEQISEFSKRVILADANLDKVLSAYNKHRDKPIREQAENIIHLFTLTNLGAPAAFKYFDTTIDRKRYTSTKEVLDATLIHQSITGLYETRIDLSQLGGDGGPAPGGGGGSGGTVSLQDEHRLFDIPVTTSLPDVWLQDFPQAWAETGGLGRAKCQAPIIIDLKPTAVPVSIKQYPMSLEAHMGIRQHIIKFLELGVLRPCRSPWNTPLLPVKKPGTQDYRPVQDLREINKRTVDIHPTVPNPYNLLSTLKPDYSWYTVLDLKDAFFCLPLAPQSQELFAFEWKDPERGISGQLTWTRLPQGFKNSPTLFNEALHRDLTDFRTQHPEVTLLQYVDDLLLAAPTKKACTQGTRHLLQELGEKGYRASAKKAQICQTKVTYLGYILSEGKRWLTPGRIETVARIPPPRNPREVREFLGKAGFCRLFIPGFAELAAPLYALTKPSTPFTWQTEHQLAFEALKKALLSAPALGLPDTSKPFTLFLDERQGIAKGVLTQKLGPWKRPVAYLSKKLDPVAAGWPPCLRIMAATAMLVKDSAKLTLGQPLTVITPHTLEAIVRQPPDRWITNARLTHYQALLLDTDRVQFGPPVTLNPATLLPVPENQPSPHDCRQVLAETHGTREDLKDQELPDADHTWYTDGSSYLDSGTRRAGAAVVDGHNTIWAQSLPPGTSAQKAELIALTKALELSKGKKANIYTDSRYAFATAHTHGSIYERRGWLTSEGKEIKNKAEIIALLKALFLPQEVAIIHCPGHQKGQDPVAVGNRQADRVARQAAMAEVLTLATEPDNTSHITAGKRTADGSEFEKRTADGSEFESPKKKAKVE

SEQ ID NO: 2016 - protein, 2095 aa, synthetic construct
MPAAKRVKLDGGDKKYSIGLDIGTNSVGWAVITDEYKVPSKKFKVLGNTDRHSIKKNLIGALLFDSGETAEATRLKRTARRRYTRRKNRICYLQEIFSNEMAKVDDSFFHRLEESFLVEEDKKHERHPIFGNIVDEVAYHEKYPTIYHLRKKLVDSTDKADLRLIYLALAHMIKFRGHFLIEGDLNPDNSDVDKLFIQLVQTYNQLFEENPINASGVDAKAILSARLSKSRRLENLIAQLPGEKKNGLFGNLIALSLGLTPNFKSNFDLAEDAKLQLSKDTYDDDLDNLLAQIGDQYADLFLAAKNLSDAILLSDILRVNTEITKAPLSASMIKRYDEHHQDLTLLKALVRQQLPEKYKEIFFDQSKNGYAGYIDGGASQEEFYKFIKPILEKMDGTEELLVKLNREDLLRKQRTFDNGSIPHQIHLGELHAILRRQEDFYPFLKDNREKIEKILTFRIPYYVGPLARGNSRFAWMTRKSEETITPWNFEEVVDKGASAQSFIERMTNFDKNLPNEKVLPKHSLLYEYFTVYNELTKVKYVTEGMRKPAFLSGEQKKAIVDLLFKTNRKVTVKQLKEDYFKKIECFDSVEISGVEDRFNASLGTYHDLLKIIKDKDFLDNEENEDILEDIVLTLTLFEDREMIEERLKTYAHLFDDKVMKQLKRRRYTGWGRLSRKLINGIRDKQSGKTILDFLKSDGFANRNFMQLIHDDSLTFKEDIQKAQVSGQGDSLHEHIANLAGSPAIKKGILQTVKVVDELVKVMGRHKPENIVIEMARENQTTQKGQKNSRERMKRIEEGIKELGSQILKEHPVENTQLQNEKLYLYYLQNGRDMYVDQELDINRLSDYDVDHIVPQSFLKDDSIDNKVLTRSDKARGKSDNVPSEEVVKKMKNYWRQLLNAKLITQRKFDNLTKAERGGLSELDKAGFIKRQLVETRQITKHVAQILDSRMNTKYDENDKLIREVKVITLKSKLVSDFRKDFQFYKVREINNYHHAHDAYLNAVVGTALIKKYPKLESEFVYGDYKVYDVRKMIAKSEQEIGKATAKYFFYSNIMNFFKTEITLANGEIRKRPLIETNGETGEIVWDKGRDFATVRKVLSMPQVNIVKKTEVQTGGFSKESILPKRNSDKLIARKKDWDPKKYGGFDSPTVAYSVLVVAKVEKGKSKKLKSVKELLGITIMERSSFEKNPIDFLEAKGYKEVKKDLIIKLPKYSLFELENGRKRMLASAGELQKGNELALPSKYVNFLYLASHYEKLKGSPEDNEQKQLFVEQHKHYLDEIIEQISEFSKRVILADANLDKVLSAYNKHRDKPIREQAENIIHLFTLTNLGAPAAFKYFDTTIDRKRYTSTKEVLDATLIHQSITGLYETRIDLSQLGGDGGGGGGGGTVSLQDEHRLFDIPVTTSLPDVWLQDFPQAWAETGGLGRAKCQAPIIIDLKPTAVPVSIKQYPMSLEAHMGIRQHIIKFLELGVLRPCRSPWNTPLLPVKKPGTQDYRPVQDLREINKRTVDIHPTVPNPYNLLSTLKPDYSWYTVLDLKDAFFCLPLAPQSQELFAFEWKDPERGISGQLTWTRLPQGFKNSPTLFNEALHRDLTDFRTQHPEVTLLQYVDDLLLAAPTKKACTQGTRHLLQELGEKGYRASAKKAQICQTKVTYLGYILSEGKRWLTPGRIETVARIPPPRNPREVREFLGKAGFCRLFIPGFAELAAPLYALTKPSTPFTWQTEHQLAFEALKKALLSAPALGLPDTSKPFTLFLDERQGIAKGVLTQKLGPWKRPVAYLSKKLDPVAAGWPPCLRIMAATAMLVKDSAKLTLGQPLTVITPHTLEAIVRQPPDRWITNARLTHYQALLLDTDRVQFGPPVTLNPATLLPVPENQPSPHDCRQVLAETHGTREDLKDQELPDADHTWYTDGSSYLDSGTRRAGAAVVDGHNTIWAQSLPPGTSAQKAELIALTKALELSKGKKANIYTDSRYAFATAHTHGSIYERRGWLTSEGKEIKNKAEIIALLKALFLPQEVAIIHCPGHQKGQDPVAVGNRQADRVARQAAMAEVLTLATEPDNTSHITAGKRTADGSEFEKRTADGSEFESPKKKAKVE

SEQ ID NO: 2017 - protein, 2102 aa, synthetic construct
MPAAKRVKLDGGDKKYSIGLDIGTNSVGWAVITDEYKVPSKKFKVLGNTDRHSIKKNLIGALLFDSGETAEATRLKRTARRRYTRRKNRICYLQEIFSNEMAKVDDSFFHRLEESFLVEEDKKHERHPIFGNIVDEVAYHEKYPTIYHLRKKLVDSTDKADLRLIYLALAHMIKFRGHFLIEGDLNPDNSDVDKLFIQLVQTYNQLFEENPINASGVDAKAILSARLSKSRRLENLIAQLPGEKKNGLFGNLIALSLGLTPNFKSNFDLAEDAKLQLSKDTYDDDLDNLLAQIGDQYADLFLAAKNLSDAILLSDILRVNTEITKAPLSASMIKRYDEHHQDLTLLKALVRQQLPEKYKEIFFDQSKNGYAGYIDGGASQEEFYKFIKPILEKMDGTEELLVKLNREDLLRKQRTFDNGSIPHQIHLGELHAILRRQEDFYPFLKDNREKIEKILTFRIPYYVGPLARGNSRFAWMTRKSEETITPWNFEEVVDKGASAQSFIERMTNFDKNLPNEKVLPKHSLLYEYFTVYNELTKVKYVTEGMRKPAFLSGEQKKAIVDLLFKTNRKVTVKQLKEDYFKKIECFDSVEISGVEDRFNASLGTYHDLLKIIKDKDFLDNEENEDILEDIVLTLTLFEDREMIEERLKTYAHLFDDKVMKQLKRRRYTGWGRLSRKLINGIRDKQSGKTILDFLKSDGFANRNFMQLIHDDSLTFKEDIQKAQVSGQGDSLHEHIANLAGSPAIKKGILQTVKVVDELVKVMGRHKPENIVIEMARENQTTQKGQKNSRERMKRIEEGIKELGSQILKEHPVENTQLQNEKLYLYYLQNGRDMYVDQELDINRLSDYDVDHIVPQSFLKDDSIDNKVLTRSDKARGKSDNVPSEEVVKKMKNYWRQLLNAKLITQRKFDNLTKAERGGLSELDKAGFIKRQLVETRQITKHVAQILDSRMNTKYDENDKLIREVKVITLKSKLVSDFRKDFQFYKVREINNYHHAHDAYLNAVVGTALIKKYPKLESEFVYGDYKVYDVRKMIAKSEQEIGKATAKYFFYSNIMNFFKTEITLANGEIRKRPLIETNGETGEIVWDKGRDFATVRKVLSMPQVNIVKKTEVQTGGFSKESILPKRNSDKLIARKKDWDPKKYGGFDSPTVAYSVLVVAKVEKGKSKKLKSVKELLGITIMERSSFEKNPIDFLEAKGYKEVKKDLIIKLPKYSLFELENGRKRMLASAGELQKGNELALPSKYVNFLYLASHYEKLKGSPEDNEQKQLFVEQHKHYLDEIIEQISEFSKRVILADANLDKVLSAYNKHRDKPIREQAENIIHLFTLTNLGAPAAFKYFDTTIDRKRYTSTKEVLDATLIHQSITGLYETRIDLSQLGGDGGGGGEAAAKGSSGGTVSLQDEHRLFDIPVTTSLPDVWLQDFPQAWAETGGLGRAKCQAPIIIDLKPTAVPVSIKQYPMSLEAHMGIRQHIIKFLELGVLRPCRSPWNTPLLPVKKPGTQDYRPVQDLREINKRTVDIHPTVPNPYNLLSTLKPDYSWYTVLDLKDAFFCLPLAPQSQELFAFEWKDPERGISGQLTWTRLPQGFKNSPTLFNEALHRDLTDFRTQHPEVTLLQYVDDLLLAAPTKKACTQGTRHLLQELGEKGYRASAKKAQICQTKVTYLGYILSEGKRWLTPGRIETVARIPPPRNPREVREFLGKAGFCRLFIPGFAELAAPLYALTKPSTPFTWQTEHQLAFEALKKALLSAPALGLPDTSKPFTLFLDERQGIAKGVLTQKLGPWKRPVAYLSKKLDPVAAGWPPCLRIMAATAMLVKDSAKLTLGQPLTVITPHTLEAIVRQPPDRWITNARLTHYQALLLDTDRVQFGPPVTLNPATLLPVPENQPSPHDCRQVLAETHGTREDLKDQELPDADHTWYTDGSSYLDSGTRRAGAAVVDGHNTIWAQSLPPGTSAQKAELIALTKALELSKGKKANIYTDSRYAFATAHTHGSIYERRGWLTSEGKEIKNKAEIIALLKALFLPQEVAIIHCPGHQKGQDPVAVGNRQADRVARQAAMAEVLTLATEPDNTSHITAGKRTADGSEFEKRTADGSEFESPKKKAKVE

SEQ ID NO: 2018 - protein, 2104 aa, synthetic construct
MPAAKRVKLDGGDKKYSIGLDIGTNSVGWAVITDEYKVPSKKFKVLGNTDRHSIKKNLIGALLFDSGETAEATRLKRTARRRYTRRKNRICYLQEIFSNEMAKVDDSFFHRLEESFLVEEDKKHERHPIFGNIVDEVAYHEKYPTIYHLRKKLVDSTDKADLRLIYLALAHMIKFRGHFLIEGDLNPDNSDVDKLFIQLVQTYNQLFEENPINASGVDAKAILSARLSKSRRLENLIAQLPGEKKNGLFGNLIALSLGLTPNFKSNFDLAEDAKLQLSKDTYDDDLDNLLAQIGDQYADLFLAAKNLSDAILLSDILRVNTEITKAPLSASMIKRYDEHHQDLTLLKALVRQQLPEKYKEIFFDQSKNGYAGYIDGGASQEEFYKFIKPILEKMDGTEELLVKLNREDLLRKQRTFDNGSIPHQIHLGELHAILRRQEDFYPFLKDNREKIEKILTFRIPYYVGPLARGNSRFAWMTRKSEETITPWNFEEVVDKGASAQSFIERMTNFDKNLPNEKVLPKHSLLYEYFTVYNELTKVKYVTEGMRKPAFLSGEQKKAIVDLLFKTNRKVTVKQLKEDYFKKIECFDSVEISGVEDRFNASLGTYHDLLKIIKDKDFLDNEENEDILEDIVLTLTLFEDREMIEERLKTYAHLFDDKVMKQLKRRRYTGWGRLSRKLINGIRDKQSGKTILDFLKSDGFANRNFMQLIHDDSLTFKEDIQKAQVSGQGDSLHEHIANLAGSPAIKKGILQTVKVVDELVKVMGRHKPENIVIEMARENQTTQKGQKNSRERMKRIEEGIKELGSQILKEHPVENTQLQNEKLYLYYLQNGRDMYVDQELDINRLSDYDVDHIVPQSFLKDDSIDNKVLTRSDKARGKSDNVPSEEVVKKMKNYWRQLLNAKLITQRKFDNLTKAERGGLSELDKAGFIKRQLVETRQITKHVAQILDSRMNTKYDENDKLIREVKVITLKSKLVSDFRKDFQFYKVREINNYHHAHDAYLNAVVGTALIKKYPKLESEFVYGDYKVYDVRKMIAKSEQEIGKATAKYFFYSNIMNFFKTEITLANGEIRKRPLIETNGETGEIVWDKGRDFATVRKVLSMPQVNIVKKTEVQTGGFSKESILPKRNSDKLIARKKDWDPKKYGGFDSPTVAYSVLVVAKVEKGKSKKLKSVKELLGITIMERSSFEKNPIDFLEAKGYKEVKKDLIIKLPKYSLFELENGRKRMLASAGELQKGNELALPSKYVNFLYLASHYEKLKGSPEDNEQKQLFVEQHKHYLDEIIEQISEFSKRVILADANLDKVLSAYNKHRDKPIREQAENIIHLFTLTNLGAPAAFKYFDTTIDRKRYTSTKEVLDATLIHQSITGLYETRIDLSQLGGDGGPAPAPAPAPAPAPGGTVSLQDEHRLFDIPVTTSLPDVWLQDFPQAWAETGGLGRAKCQAPIIIDLKPTAVPVSIKQYPMSLEAHMGIRQHIIKFLELGVLRPCRSPWNTPLLPVKKPGTQDYRPVQDLREINKRTVDIHPTVPNPYNLLSTLKPDYSWYTVLDLKDAFFCLPLAPQSQELFAFEWKDPERGISGQLTWTRLPQGFKNSPTLFNEALHRDLTDFRTQHPEVTLLQYVDDLLLAAPTKKACTQGTRHLLQELGEKGYRASAKKAQICQTKVTYLGYILSEGKRWLTPGRIETVARIPPPRNPREVREFLGKAGFCRLFIPGFAELAAPLYALTKPSTPFTWQTEHQLAFEALKKALLSAPALGLPDTSKPFTLFLDERQGIAKGVLTQKLGPWKRPVAYLSKKLDPVAAGWPPCLRIMAATAMLVKDSAKLTLGQPLTVITPHTLEAIVRQPPDRWITNARLTHYQALLLDTDRVQFGPPVTLNPATLLPVPENQPSPHDCRQVLAETHGTREDLKDQELPDADHTWYTDGSSYLDSGTRRAGAAVVDGHNTIWAQSLPPGTSAQKAELIALTKALELSKGKKANIYTDSRYAFATAHTHGSIYERRGWLTSEGKEIKNKAEIIALLKALFLPQEVAIIHCPGHQKGQDPVAVGNRQADRVARQAAMAEVLTLATEPDNTSHITAGKRTADGSEFEKRTADGSEFESPKKKAKVE

SEQ ID NO: 2019 - protein, 2100 aa, synthetic construct
MPAAKRVKLDGGDKKYSIGLDIGTNSVGWAVITDEYKVPSKKFKVLGNTDRHSIKKNLIGALLFDSGETAEATRLKRTARRRYTRRKNRICYLQEIFSNEMAKVDDSFFHRLEESFLVEEDKKHERHPIFGNIVDEVAYHEKYPTIYHLRKKLVDSTDKADLRLIYLALAHMIKFRGHFLIEGDLNPDNSDVDKLFIQLVQTYNQLFEENPINASGVDAKAILSARLSKSRRLENLIAQLPGEKKNGLFGNLIALSLGLTPNFKSNFDLAEDAKLQLSKDTYDDDLDNLLAQIGDQYADLFLAAKNLSDAILLSDILRVNTEITKAPLSASMIKRYDEHHQDLTLLKALVRQQLPEKYKEIFFDQSKNGYAGYIDGGASQEEFYKFIKPILEKMDGTEELLVKLNREDLLRKQRTFDNGSIPHQIHLGELHAILRRQEDFYPFLKDNREKIEKILTFRIPYYVGPLARGNSRFAWMTRKSEETITPWNFEEVVDKGASAQSFIERMTNFDKNLPNEKVLPKHSLLYEYFTVYNELTKVKYVTEGMRKPAFLSGEQKKAIVDLLFKTNRKVTVKQLKEDYFKKIECFDSVEISGVEDRFNASLGTYHDLLKIIKDKDFLDNEENEDILEDIVLTLTLFEDREMIEERLKTYAHLFDDKVMKQLKRRRYTGWGRLSRKLINGIRDKQSGKTILDFLKSDGFANRNFMQLIHDDSLTFKEDIQKAQVSGQGDSLHEHIANLAGSPAIKKGILQTVKVVDELVKVMGRHKPENIVIEMARENQTTQKGQKNSRERMKRIEEGIKELGSQILKEHPVENTQLQNEKLYLYYLQNGRDMYVDQELDINRLSDYDVDHIVPQSFLKDDSIDNKVLTRSDKARGKSDNVPSEEVVKKMKNYWRQLLNAKLITQRKFDNLTKAERGGLSELDKAGFIKRQLVETRQITKHVAQILDSRMNTKYDENDKLIREVKVITLKSKLVSDFRKDFQFYKVREINNYHHAHDAYLNAVVGTALIKKYPKLESEFVYGDYKVYDVRKMIAKSEQEIGKATAKYFFYSNIMNFFKTEITLANGEIRKRPLIETNGETGEIVWDKGRDFATVRKVLSMPQVNIVKKTEVQTGGFSKESILPKRNSDKLIARKKDWDPKKYGGFDSPTVAYSVLVVAKVEKGKSKKLKSVKELLGITIMERSSFEKNPIDFLEAKGYKEVKKDLIIKLPKYSLFELENGRKRMLASAGELQKGNELALPSKYVNFLYLASHYEKLKGSPEDNEQKQLFVEQHKHYLDEIIEQISEFSKRVILADANLDKVLSAYNKHRDKPIREQAENIIHLFTLTNLGAPAAFKYFDTTIDRKRYTSTKEVLDATLIHQSITGLYETRIDLSQLGGDGGPAPGSSGGGGGTVSLQDEHRLFDIPVTTSLPDVWLQDFPQAWAETGGLGRAKCQAPIIIDLKPTAVPVSIKQYPMSLEAHMGIRQHIIKFLELGVLRPCRSPWNTPLLPVKKPGTQDYRPVQDLREINKRTVDIHPTVPNPYNLLSTLKPDYSWYTVLDLKDAFFCLPLAPQSQELFAFEWKDPERGISGQLTWTRLPQGFKNSPTLFNEALHRDLTDFRTQHPEVTLLQYVDDLLLAAPTKKACTQGTRHLLQELGEKGYRASAKKAQICQTKVTYLGYILSEGKRWLTPGRIETVARIPPPRNPREVREFLGKAGFCRLFIPGFAELAAPLYALTKPSTPFTWQTEHQLAFEALKKALLSAPALGLPDTSKPFTLFLDERQGIAKGVLTQKLGPWKRPVAYLSKKLDPVAAGWPPCLRIMAATAMLVKDSAKLTLGQPLTVITPHTLEAIVRQPPDRWITNARLTHYQALLLDTDRVQFGPPVTLNPATLLPVPENQPSPHDCRQVLAETHGTREDLKDQELPDADHTWYTDGSSYLDSGTRRAGAAVVDGHNTIWAQSLPPGTSAQKAELIALTKALELSKGKKANIYTDSRYAFATAHTHGSIYERRGWLTSEGKEIKNKAEIIALLKALFLPQEVAIIHCPGHQKGQDPVAVGNRQADRVARQAAMAEVLTLATEPDNTSHITAGKRTADGSEFEKRTADGSEFESPKKKAKVE

SEQ ID NO: 2020 - protein, 2100 aa, synthetic construct
MPAAKRVKLDGGDKKYSIGLDIGTNSVGWAVITDEYKVPSKKFKVLGNTDRHSIKKNLIGALLFDSGETAEATRLKRTARRRYTRRKNRICYLQEIFSNEMAKVDDSFFHRLEESFLVEEDKKHERHPIFGNIVDEVAYHEKYPTIYHLRKKLVDSTDKADLRLIYLALAHMIKFRGHFLIEGDLNPDNSDVDKLFIQLVQTYNQLFEENPINASGVDAKAILSARLSKSRRLENLIAQLPGEKKNGLFGNLIALSLGLTPNFKSNFDLAEDAKLQLSKDTYDDDLDNLLAQIGDQYADLFLAAKNLSDAILLSDILRVNTEITKAPLSASMIKRYDEHHQDLTLLKALVRQQLPEKYKEIFFDQSKNGYAGYIDGGASQEEFYKFIKPILEKMDGTEELLVKLNREDLLRKQRTFDNGSIPHQIHLGELHAILRRQEDFYPFLKDNREKIEKILTFRIPYYVGPLARGNSRFAWMTRKSEETITPWNFEEVVDKGASAQSFIERMTNFDKNLPNEKVLPKHSLLYEYFTVYNELTKVKYVTEGMRKPAFLSGEQKKAIVDLLFKTNRKVTVKQLKEDYFKKIECFDSVEISGVEDRFNASLGTYHDLLKIIKDKDFLDNEENEDILEDIVLTLTLFEDREMIEERLKTYAHLFDDKVMKQLKRRRYTGWGRLSRKLINGIRDKQSGKTILDFLKSDGFANRNFMQLIHDDSLTFKEDIQKAQVSGQGDSLHEHIANLAGSPAIKKGILQTVKVVDELVKVMGRHKPENIVIEMARENQTTQKGQKNSRERMKRIEEGIKELGSQILKEHPVENTQLQNEKLYLYYLQNGRDMYVDQELDINRLSDYDVDHIVPQSFLKDDSIDNKVLTRSDKARGKSDNVPSEEVVKKMKNYWRQLLNAKLITQRKFDNLTKAERGGLSELDKAGFIKRQLVETRQITKHVAQILDSRMNTKYDENDKLIREVKVITLKSKLVSDFRKDFQFYKVREINNYHHAHDAYLNAVVGTALIKKYPKLESEFVYGDYKVYDVRKMIAKSEQEIGKATAKYFFYSNIMNFFKTEITLANGEIRKRPLIETNGETGEIVWDKGRDFATVRKVLSMPQVNIVKKTEVQTGGFSKESILPKRNSDKLIARKKDWDPKKYGGFDSPTVAYSVLVVAKVEKGKSKKLKSVKELLGITIMERSSFEKNPIDFLEAKGYKEVKKDLIIKLPKYSLFELENGRKRMLASAGELQKGNELALPSKYVNFLYLASHYEKLKGSPEDNEQKQLFVEQHKHYLDEIIEQISEFSKRVILADANLDKVLSAYNKHRDKPIREQAENIIHLFTLTNLGAPAAFKYFDTTIDRKRYTSTKEVLDATLIHQSITGLYETRIDLSQLGGDGGGSSGGSPAPGGTVSLQDEHRLFDIPVTTSLPDVWLQDFPQAWAETGGLGRAKCQAPIIIDLKPTAVPVSIKQYPMSLEAHMGIRQHIIKFLELGVLRPCRSPWNTPLLPVKKPGTQDYRPVQDLREINKRTVDIHPTVPNPYNLLSTLKPDYSWYTVLDLKDAFFCLPLAPQSQELFAFEWKDPERGISGQLTWTRLPQGFKNSPTLFNEALHRDLTDFRTQHPEVTLLQYVDDLLLAAPTKKACTQGTRHLLQELGEKGYRASAKKAQICQTKVTYLGYILSEGKRWLTPGRIETVARIPPPRNPREVREFLGKAGFCRLFIPGFAELAAPLYALTKPSTPFTWQTEHQLAFEALKKALLSAPALGLPDTSKPFTLFLDERQGIAKGVLTQKLGPWKRPVAYLSKKLDPVAAGWPPCLRIMAATAMLVKDSAKLTLGQPLTVITPHTLEAIVRQPPDRWITNARLTHYQALLLDTDRVQFGPPVTLNPATLLPVPENQPSPHDCRQVLAETHGTREDLKDQELPDADHTWYTDGSSYLDSGTRRAGAAVVDGHNTIWAQSLPPGTSAQKAELIALTKALELSKGKKANIYTDSRYAFATAHTHGSIYERRGWLTSEGKEIKNKAEIIALLKALFLPQEVAIIHCPGHQKGQDPVAVGNRQADRVARQAAMAEVLTLATEPDNTSHITAGKRTADGSEFEKRTADGSEFESPKKKAKVE

SEQ ID NO: 2021 - protein, 2097 aa, synthetic construct
MPAAKRVKLDGGDKKYSIGLDIGTNSVGWAVITDEYKVPSKKFKVLGNTDRHSIKKNLIGALLFDSGETAEATRLKRTARRRYTRRKNRICYLQEIFSNEMAKVDDSFFHRLEESFLVEEDKKHERHPIFGNIVDEVAYHEKYPTIYHLRKKLVDSTDKADLRLIYLALAHMIKFRGHFLIEGDLNPDNSDVDKLFIQLVQTYNQLFEENPINASGVDAKAILSARLSKSRRLENLIAQLPGEKKNGLFGNLIALSLGLTPNFKSNFDLAEDAKLQLSKDTYDDDLDNLLAQIGDQYADLFLAAKNLSDAILLSDILRVNTEITKAPLSASMIKRYDEHHQDLTLLKALVRQQLPEKYKEIFFDQSKNGYAGYIDGGASQEEFYKFIKPILEKMDGTEELLVKLNREDLLRKQRTFDNGSIPHQIHLGELHAILRRQEDFYPFLKDNREKIEKILTFRIPYYVGPLARGNSRFAWMTRKSEETITPWNFEEVVDKGASAQSFIERMTNFDKNLPNEKVLPKHSLLYEYFTVYNELTKVKYVTEGMRKPAFLSGEQKKAIVDLLFKTNRKVTVKQLKEDYFKKIECFDSVEISGVEDRFNASLGTYHDLLKIIKDKDFLDNEENEDILEDIVLTLTLFEDREMIEERLKTYAHLFDDKVMKQLKRRRYTGWGRLSRKLINGIRDKQSGKTILDFLKSDGFANRNFMQLIHDDSLTFKEDIQKAQVSGQGDSLHEHIANLAGSPAIKKGILQTVKVVDELVKVMGRHKPENIVIEMARENQTTQKGQKNSRERMKRIEEGIKELGSQILKEHPVENTQLQNEKLYLYYLQNGRDMYVDQELDINRLSDYDVDHIVPQSFLKDDSIDNKVLTRSDKARGKSDNVPSEEVVKKMKNYWRQLLNAKLITQRKFDNLTKAERGGLSELDKAGFIKRQLVETRQITKHVAQILDSRMNTKYDENDKLIREVKVITLKSKLVSDFRKDFQFYKVREINNYHHAHDAYLNAVVGTALIKKYPKLESEFVYGDYKVYDVRKMIAKSEQEIGKATAKYFFYSNIMNFFKTEITLANGEIRKRPLIETNGETGEIVWDKGRDFATVRKVLSMPQVNIVKKTEVQTGGFSKESILPKRNSDKLIARKKDWDPKKYGGFDSPTVAYSVLVVAKVEKGKSKKLKSVKELLGITIMERSSFEKNPIDFLEAKGYKEVKKDLIIKLPKYSLFELENGRKRMLASAGELQKGNELALPSKYVNFLYLASHYEKLKGSPEDNEQKQLFVEQHKHYLDEIIEQISEFSKRVILADANLDKVLSAYNKHRDKPIREQAENIIHLFTLTNLGAPAAFKYFDTTIDRKRYTSTKEVLDATLIHQSITGLYETRIDLSQLGGDGGGGSPAPGGTVSLQDEHRLFDIPVTTSLPDVWLQDFPQAWAETGGLGRAKCQAPIIIDLKPTAVPVSIKQYPMSLEAHMGIRQHIIKFLELGVLRPCRSPWNTPLLPVKKPGTQDYRPVQDLREINKRTVDIHPTVPNPYNLLSTLKPDYSWYTVLDLKDAFFCLPLAPQSQELFAFEWKDPERGISGQLTWTRLPQGFKNSPTLFNEALHRDLTDFRTQHPEVTLLQYVDDLLLAAPTKKACTQGTRHLLQELGEKGYRASAKKAQICQTKVTYLGYILSEGKRWLTPGRIETVARIPPPRNPREVREFLGKAGFCRLFIPGFAELAAPLYALTKPSTPFTWQTEHQLAFEALKKALLSAPALGLPDTSKPFTLFLDERQGIAKGVLTQKLGPWKRPVAYLSKKLDPVAAGWPPCLRIMAATAMLVKDSAKLTLGQPLTVITPHTLEAIVRQPPDRWITNARLTHYQALLLDTDRVQFGPPVTLNPATLLPVPENQPSPHDCRQVLAETHGTREDLKDQELPDADHTWYTDGSSYLDSGTRRAGAAVVDGHNTIWAQSLPPGTSAQKAELIALTKALELSKGKKANIYTDSRYAFATAHTHGSIYERRGWLTSEGKEIKNKAEIIALLKALFLPQEVAIIHCPGHQKGQDPVAVGNRQADRVARQAAMAEVLTLATEPDNTSHITAGKRTADGSEFEKRTADGSEFESPKKKAKVE

SEQ ID NO: 2022 - protein, 2102 aa, synthetic construct
MPAAKRVKLDGGDKKYSIGLDIGTNSVGWAVITDEYKVPSKKFKVLGNTDRHSIKKNLIGALLFDSGETAEATRLKRTARRRYTRRKNRICYLQEIFSNEMAKVDDSFFHRLEESFLVEEDKKHERHPIFGNIVDEVAYHEKYPTIYHLRKKLVDSTDKADLRLIYLALAHMIKFRGHFLIEGDLNPDNSDVDKLFIQLVQTYNQLFEENPINASGVDAKAILSARLSKSRRLENLIAQLPGEKKNGLFGNLIALSLGLTPNFKSNFDLAEDAKLQLSKDTYDDDLDNLLAQIGDQYADLFLAAKNLSDAILLSDILRVNTEITKAPLSASMIKRYDEHHQDLTLLKALVRQQLPEKYKEIFFDQSKNGYAGYIDGGASQEEFYKFIKPILEKMDGTEELLVKLNREDLLRKQRTFDNGSIPHQIHLGELHAILRRQEDFYPFLKDNREKIEKILTFRIPYYVGPLARGNSRFAWMTRKSEETITPWNFEEVVDKGASAQSFIERMTNFDKNLPNEKVLPKHSLLYEYFTVYNELTKVKYVTEGMRKPAFLSGEQKKAIVDLLFKTNRKVTVKQLKEDYFKKIECFDSVEISGVEDRFNASLGTYHDLLKIIKDKDFLDNEENEDILEDIVLTLTLFEDREMIEERLKTYAHLFDDKVMKQLKRRRYTGWGRLSRKLINGIRDKQSGKTILDFLKSDGFANRNFMQLIHDDSLTFKEDIQKAQVSGQGDSLHEHIANLAGSPAIKKGILQTVKVVDELVKVMGRHKPENIVIEMARENQTTQKGQKNSRERMKRIEEGIKELGSQILKEHPVENTQLQNEKLYLYYLQNGRDMYVDQELDINRLSDYDVDHIVPQSFLKDDSIDNKVLTRSDKARGKSDNVPSEEVVKKMKNYWRQLLNAKLITQRKFDNLTKAERGGLSELDKAGFIKRQLVETRQITKHVAQILDSRMNTKYDENDKLIREVKVITLKSKLVSDFRKDFQFYKVREINNYHHAHDAYLNAVVGTALIKKYPKLESEFVYGDYKVYDVRKMIAKSEQEIGKATAKYFFYSNIMNFFKTEITLANGEIRKRPLIETNGETGEIVWDKGRDFATVRKVLSMPQVNIVKKTEVQTGGFSKESILPKRNSDKLIARKKDWDPKKYGGFDSPTVAYSVLVVAKVEKGKSKKLKSVKELLGITIMERSSFEKNPIDFLEAKGYKEVKKDLIIKLPKYSLFELENGRKRMLASAGELQKGNELALPSKYVNFLYLASHYEKLKGSPEDNEQKQLFVEQHKHYLDEIIEQISEFSKRVILADANLDKVLSAYNKHRDKPIREQAENIIHLFTLTNLGAPAAFKYFDTTIDRKRYTSTKEVLDATLIHQSITGLYETRIDLSQLGGDGGEAAAKPAPGSSGGTVSLQDEHRLFDIPVTTSLPDVWLQDFPQAWAETGGLGRAKCQAPIIIDLKPTAVPVSIKQYPMSLEAHMGIRQHIIKFLELGVLRPCRSPWNTPLLPVKKPGTQDYRPVQDLREINKRTVDIHPTVPNPYNLLSTLKPDYSWYTVLDLKDAFFCLPLAPQSQELFAFEWKDPERGISGQLTWTRLPQGFKNSPTLFNEALHRDLTDFRTQHPEVTLLQYVDDLLLAAPTKKACTQGTRHLLQELGEKGYRASAKKAQICQTKVTYLGYILSEGKRWLTPGRIETVARIPPPRNPREVREFLGKAGFCRLFIPGFAELAAPLYALTKPSTPFTWQTEHQLAFEALKKALLSAPALGLPDTSKPFTLFLDERQGIAKGVLTQKLGPWKRPVAYLSKKLDPVAAGWPPCLRIMAATAMLVKDSAKLTLGQPLTVITPHTLEAIVRQPPDRWITNARLTHYQALLLDTDRVQFGPPVTLNPATLLPVPENQPSPHDCRQVLAETHGTREDLKDQELPDADHTWYTDGSSYLDSGTRRAGAAVVDGHNTIWAQSLPPGTSAQKAELIALTKALELSKGKKANIYTDSRYAFATAHTHGSIYERRGWLTSEGKEIKNKAEIIALLKALFLPQEVAIIHCPGHQKGQDPVAVGNRQADRVARQAAMAEVLTLATEPDNTSHITAGKRTADGSEFEKRTADGSEFESPKKKAKVE

SEQ ID NO: 2023 - protein, 2094 aa, synthetic construct
MPAAKRVKLDGGDKKYSIGLDIGTNSVGWAVITDEYKVPSKKFKVLGNTDRHSIKKNLIGALLFDSGETAEATRLKRTARRRYTRRKNRICYLQEIFSNEMAKVDDSFFHRLEESFLVEEDKKHERHPIFGNIVDEVAYHEKYPTIYHLRKKLVDSTDKADLRLIYLALAHMIKFRGHFLIEGDLNPDNSDVDKLFIQLVQTYNQLFEENPINASGVDAKAILSARLSKSRRLENLIAQLPGEKKNGLFGNLIALSLGLTPNFKSNFDLAEDAKLQLSKDTYDDDLDNLLAQIGDQYADLFLAAKNLSDAILLSDILRVNTEITKAPLSASMIKRYDEHHQDLTLLKALVRQQLPEKYKEIFFDQSKNGYAGYIDGGASQEEFYKFIKPILEKMDGTEELLVKLNREDLLRKQRTFDNGSIPHQIHLGELHAILRRQEDFYPFLKDNREKIEKILTFRIPYYVGPLARGNSRFAWMTRKSEETITPWNFEEVVDKGASAQSFIERMTNFDKNLPNEKVLPKHSLLYEYFTVYNELTKVKYVTEGMRKPAFLSGEQKKAIVDLLFKTNRKVTVKQLKEDYFKKIECFDSVEISGVEDRFNASLGTYHDLLKIIKDKDFLDNEENEDILEDIVLTLTLFEDREMIEERLKTYAHLFDDKVMKQLKRRRYTGWGRLSRKLINGIRDKQSGKTILDFLKSDGFANRNFMQLIHDDSLTFKEDIQKAQVSGQGDSLHEHIANLAGSPAIKKGILQTVKVVDELVKVMGRHKPENIVIEMARENQTTQKGQKNSRERMKRIEEGIKELGSQILKEHPVENTQLQNEKLYLYYLQNGRDMYVDQELDINRLSDYDVDHIVPQSFLKDDSIDNKVLTRSDKARGKSDNVPSEEVVKKMKNYWRQLLNAKLITQRKFDNLTKAERGGLSELDKAGFIKRQLVETRQITKHVAQILDSRMNTKYDENDKLIREVKVITLKSKLVSDFRKDFQFYKVREINNYHHAHDAYLNAVVGTALIKKYPKLESEFVYGDYKVYDVRKMIAKSEQEIGKATAKYFFYSNIMNFFKTEITLANGEIRKRPLIETNGETGEIVWDKGRDFATVRKVLSMPQVNIVKKTEVQTGGFSKESILPKRNSDKLIARKKDWDPKKYGGFDSPTVAYSVLVVAKVEKGKSKKLKSVKELLGITIMERSSFEKNPIDFLEAKGYKEVKKDLIIKLPKYSLFELENGRKRMLASAGELQKGNELALPSKYVNFLYLASHYEKLKGSPEDNEQKQLFVEQHKHYLDEIIEQISEFSKRVILADANLDKVLSAYNKHRDKPIREQAENIIHLFTLTNLGAPAAFKYFDTTIDRKRYTSTKEVLDATLIHQSITGLYETRIDLSQLGGDGGPAPGGTVSLQDEHRLFDIPVTTSLPDVWLQDFPQAWAETGGLGRAKCQAPIIIDLKPTAVPVSIKQYPMSLEAHMGIRQHIIKFLELGVLRPCRSPWNTPLLPVKKPGTQDYRPVQDLREINKRTVDIHPTVPNPYNLLSTLKPDYSWYTVLDLKDAFFCLPLAPQSQELFAFEWKDPERGISGQLTWTRLPQGFKNSPTLFNEALHRDLTDFRTQHPEVTLLQYVDDLLLAAPTKKACTQGTRHLLQELGEKGYRASAKKAQICQTKVTYLGYILSEGKRWLTPGRIETVARIPPPRNPREVREFLGKAGFCRLFIPGFAELAAPLYALTKPSTPFTWQTEHQLAFEALKKALLSAPALGLPDTSKPFTLFLDERQGIAKGVLTQKLGPWKRPVAYLSKKLDPVAAGWPPCLRIMAATAMLVKDSAKLTLGQPLTVITPHTLEAIVRQPPDRWITNARLTHYQALLLDTDRVQFGPPVTLNPATLLPVPENQPSPHDCRQVLAETHGTREDLKDQELPDADHTWYTDGSSYLDSGTRRAGAAVVDGHNTIWAQSLPPGTSAQKAELIALTKALELSKGKKANIYTDSRYAFATAHTHGSIYERRGWLTSEGKEIKNKAEIIALLKALFLPQEVAIIHCPGHQKGQDPVAVGNRQADRVARQAAMAEVLTLATEPDNTSHITAGKRTADGSEFEKRTADGSEFESPKKKAKVE

SEQ ID NO: 2024 - protein, 2097 aa, synthetic construct
MPAAKRVKLDGGDKKYSIGLDIGTNSVGWAVITDEYKVPSKKFKVLGNTDRHSIKKNLIGALLFDSGETAEATRLKRTARRRYTRRKNRICYLQEIFSNEMAKVDDSFFHRLEESFLVEEDKKHERHPIFGNIVDEVAYHEKYPTIYHLRKKLVDSTDKADLRLIYLALAHMIKFRGHFLIEGDLNPDNSDVDKLFIQLVQTYNQLFEENPINASGVDAKAILSARLSKSRRLENLIAQLPGEKKNGLFGNLIALSLGLTPNFKSNFDLAEDAKLQLSKDTYDDDLDNLLAQIGDQYADLFLAAKNLSDAILLSDILRVNTEITKAPLSASMIKRYDEHHQDLTLLKALVRQQLPEKYKEIFFDQSKNGYAGYIDGGASQEEFYKFIKPILEKMDGTEELLVKLNREDLLRKQRTFDNGSIPHQIHLGELHAILRRQEDFYPFLKDNREKIEKILTFRIPYYVGPLARGNSRFAWMTRKSEETITPWNFEEVVDKGASAQSFIERMTNFDKNLPNEKVLPKHSLLYEYFTVYNELTKVKYVTEGMRKPAFLSGEQKKAIVDLLFKTNRKVTVKQLKEDYFKKIECFDSVEISGVEDRFNASLGTYHDLLKIIKDKDFLDNEENEDILEDIVLTLTLFEDREMIEERLKTYAHLFDDKVMKQLKRRRYTGWGRLSRKLINGIRDKQSGKTILDFLKSDGFANRNFMQLIHDDSLTFKEDIQKAQVSGQGDSLHEHIANLAGSPAIKKGILQTVKVVDELVKVMGRHKPENIVIEMARENQTTQKGQKNSRERMKRIEEGIKELGSQILKEHPVENTQLQNEKLYLYYLQNGRDMYVDQELDINRLSDYDVDHIVPQSFLKDDSIDNKVLTRSDKARGKSDNVPSEEVVKKMKNYWRQLLNAKLITQRKFDNLTKAERGGLSELDKAGFIKRQLVETRQITKHVAQILDSRMNTKYDENDKLIREVKVITLKSKLVSDFRKDFQFYKVREINNYHHAHDAYLNAVVGTALIKKYPKLESEFVYGDYKVYDVRKMIAKSEQEIGKATAKYFFYSNIMNFFKTEITLANGEIRKRPLIETNGETGEIVWDKGRDFATVRKVLSMPQVNIVKKTEVQTGGFSKESILPKRNSDKLIARKKDWDPKKYGGFDSPTVAYSVLVVAKVEKGKSKKLKSVKELLGITIMERSSFEKNPIDFLEAKGYKEVKKDLIIKLPKYSLFELENGRKRMLASAGELQKGNELALPSKYVNFLYLASHYEKLKGSPEDNEQKQLFVEQHKHYLDEIIEQISEFSKRVILADANLDKVLSAYNKHRDKPIREQAENIIHLFTLTNLGAPAAFKYFDTTIDRKRYTSTKEVLDATLIHQSITGLYETRIDLSQLGGDGGGGSGGSGGTVSLQDEHRLFDIPVTTSLPDVWLQDFPQAWAETGGLGRAKCQAPIIIDLKPTAVPVSIKQYPMSLEAHMGIRQHIIKFLELGVLRPCRSPWNTPLLPVKKPGTQDYRPVQDLREINKRTVDIHPTVPNPYNLLSTLKPDYSWYTVLDLKDAFFCLPLAPQSQELFAFEWKDPERGISGQLTWTRLPQGFKNSPTLFNEALHRDLTDFRTQHPEVTLLQYVDDLLLAAPTKKACTQGTRHLLQELGEKGYRASAKKAQICQTKVTYLGYILSEGKRWLTPGRIETVARIPPPRNPREVREFLGKAGFCRLFIPGFAELAAPLYALTKPSTPFTWQTEHQLAFEALKKALLSAPALGLPDTSKPFTLFLDERQGIAKGVLTQKLGPWKRPVAYLSKKLDPVAAGWPPCLRIMAATAMLVKDSAKLTLGQPLTVITPHTLEAIVRQPPDRWITNARLTHYQALLLDTDRVQFGPPVTLNPATLLPVPENQPSPHDCRQVLAETHGTREDLKDQELPDADHTWYTDGSSYLDSGTRRAGAAVVDGHNTIWAQSLPPGTSAQKAELIALTKALELSKGKKANIYTDSRYAFATAHTHGSIYERRGWLTSEGKEIKNKAEIIALLKALFLPQEVAIIHCPGHQKGQDPVAVGNRQADRVARQAAMAEVLTLATEPDNTSHITAGKRTADGSEFEKRTADGSEFESPKKKAKVE

SEQ ID NO: 2025 - protein, 2102 aa, synthetic construct
MPAAKRVKLDGGDKKYSIGLDIGTNSVGWAVITDEYKVPSKKFKVLGNTDRHSIKKNLIGALLFDSGETAEATRLKRTARRRYTRRKNRICYLQEIFSNEMAKVDDSFFHRLEESFLVEEDKKHERHPIFGNIVDEVAYHEKYPTIYHLRKKLVDSTDKADLRLIYLALAHMIKFRGHFLIEGDLNPDNSDVDKLFIQLVQTYNQLFEENPINASGVDAKAILSARLSKSRRLENLIAQLPGEKKNGLFGNLIALSLGLTPNFKSNFDLAEDAKLQLSKDTYDDDLDNLLAQIGDQYADLFLAAKNLSDAILLSDILRVNTEITKAPLSASMIKRYDEHHQDLTLLKALVRQQLPEKYKEIFFDQSKNGYAGYIDGGASQEEFYKFIKPILEKMDGTEELLVKLNREDLLRKQRTFDNGSIPHQIHLGELHAILRRQEDFYPFLKDNREKIEKILTFRIPYYVGPLARGNSRFAWMTRKSEETITPWNFEEVVDKGASAQSFIERMTNFDKNLPNEKVLPKHSLLYEYFTVYNELTKVKYVTEGMRKPAFLSGEQKKAIVDLLFKTNRKVTVKQLKEDYFKKIECFDSVEISGVEDRFNASLGTYHDLLKIIKDKDFLDNEENEDILEDIVLTLTLFEDREMIEERLKTYAHLFDDKVMKQLKRRRYTGWGRLSRKLINGIRDKQSGKTILDFLKSDGFANRNFMQLIHDDSLTFKEDIQKAQVSGQGDSLHEHIANLAGSPAIKKGILQTVKVVDELVKVMGRHKPENIVIEMARENQTTQKGQKNSRERMKRIEEGIKELGSQILKEHPVENTQLQNEKLYLYYLQNGRDMYVDQELDINRLSDYDVDHIVPQSFLKDDSIDNKVLTRSDKARGKSDNVPSEEVVKKMKNYWRQLLNAKLITQRKFDNLTKAERGGLSELDKAGFIKRQLVETRQITKHVAQILDSRMNTKYDENDKLIREVKVITLKSKLVSDFRKDFQFYKVREINNYHHAHDAYLNAVVGTALIKKYPKLESEFVYGDYKVYDVRKMIAKSEQEIGKATAKYFFYSNIMNFFKTEITLANGEIRKRPLIETNGETGEIVWDKGRDFATVRKVLSMPQVNIVKKTEVQTGGFSKESILPKRNSDKLIARKKDWDPKKYGGFDSPTVAYSVLVVAKVEKGKSKKLKSVKELLGITIMERSSFEKNPIDFLEAKGYKEVKKDLIIKLPKYSLFELENGRKRMLASAGELQKGNELALPSKYVNFLYLASHYEKLKGSPEDNEQKQLFVEQHKHYLDEIIEQISEFSKRVILADANLDKVLSAYNKHRDKPIREQAENIIHLFTLTNLGAPAAFKYFDTTIDRKRYTSTKEVLDATLIHQSITGLYETRIDLSQLGGDGGGSSGGSEAAAKGGTVSLQDEHRLFDIPVTTSLPDVWLQDFPQAWAETGGLGRAKCQAPIIIDLKPTAVPVSIKQYPMSLEAHMGIRQHIIKFLELGVLRPCRSPWNTPLLPVKKPGTQDYRPVQDLREINKRTVDIHPTVPNPYNLLSTLKPDYSWYTVLDLKDAFFCLPLAPQSQELFAFEWKDPERGISGQLTWTRLPQGFKNSPTLFNEALHRDLTDFRTQHPEVTLLQYVDDLLLAAPTKKACTQGTRHLLQELGEKGYRASAKKAQICQTKVTYLGYILSEGKRWLTPGRIETVARIPPPRNPREVREFLGKAGFCRLFIPGFAELAAPLYALTKPSTPFTWQTEHQLAFEALKKALLSAPALGLPDTSKPFTLFLDERQGIAKGVLTQKLGPWKRPVAYLSKKLDPVAAGWPPCLRIMAATAMLVKDSAKLTLGQPLTVITPHTLEAIVRQPPDRWITNARLTHYQALLLDTDRVQFGPPVTLNPATLLPVPENQPSPHDCRQVLAETHGTREDLKDQELPDADHTWYTDGSSYLDSGTRRAGAAVVDGHNTIWAQSLPPGTSAQKAELIALTKALELSKGKKANIYTDSRYAFATAHTHGSIYERRGWLTSEGKEIKNKAEIIALLKALFLPQEVAIIHCPGHQKGQDPVAVGNRQADRVARQAAMAEVLTLATEPDNTSHITAGKRTADGSEFEKRTADGSEFESPKKKAKVE

SEQ ID NO: 2026 - protein, 2100 aa, synthetic construct
MPAAKRVKLDGGDKKYSIGLDIGTNSVGWAVITDEYKVPSKKFKVLGNTDRHSIKKNLIGALLFDSGETAEATRLKRTARRRYTRRKNRICYLQEIFSNEMAKVDDSFFHRLEESFLVEEDKKHERHPIFGNIVDEVAYHEKYPTIYHLRKKLVDSTDKADLRLIYLALAHMIKFRGHFLIEGDLNPDNSDVDKLFIQLVQTYNQLFEENPINASGVDAKAILSARLSKSRRLENLIAQLPGEKKNGLFGNLIALSLGLTPNFKSNFDLAEDAKLQLSKDTYDDDLDNLLAQIGDQYADLFLAAKNLSDAILLSDILRVNTEITKAPLSASMIKRYDEHHQDLTLLKALVRQQLPEKYKEIFFDQSKNGYAGYIDGGASQEEFYKFIKPILEKMDGTEELLVKLNREDLLRKQRTFDNGSIPHQIHLGELHAILRRQEDFYPFLKDNREKIEKILTFRIPYYVGPLARGNSRFAWMTRKSEETITPWNFEEVVDKGASAQSFIERMTNFDKNLPNEKVLPKHSLLYEYFTVYNELTKVKYVTEGMRKPAFLSGEQKKAIVDLLFKTNRKVTVKQLKEDYFKKIECFDSVEISGVEDRFNASLGTYHDLLKIIKDKDFLDNEENEDILEDIVLTLTLFEDREMIEERLKTYAHLFDDKVMKQLKRRRYTGWGRLSRKLINGIRDKQSGKTILDFLKSDGFANRNFMQLIHDDSLTFKEDIQKAQVSGQGDSLHEHIANLAGSPAIKKGILQTVKVVDELVKVMGRHKPENIVIEMARENQTTQKGQKNSRERMKRIEEGIKELGSQILKEHPVENTQLQNEKLYLYYLQNGRDMYVDQELDINRLSDYDVDHIVPQSFLKDDSIDNKVLTRSDKARGKSDNVPSEEVVKKMKNYWRQLLNAKLITQRKFDNLTKAERGGLSELDKAGFIKRQLVETRQITKHVAQILDSRMNTKYDENDKLIREVKVITLKSKLVSDFRKDFQFYKVREINNYHHAHDAYLNAVVGTALIKKYPKLESEFVYGDYKVYDVRKMIAKSEQEIGKATAKYFFYSNIMNFFKTEITLANGEIRKRPLIETNGETGEIVWDKGRDFATVRKVLSMPQVNIVKKTEVQTGGFSKESILPKRNSDKLIARKKDWDPKKYGGFDSPTVAYSVLVVAKVEKGKSKKLKSVKELLGITIMERSSFEKNPIDFLEAKGYKEVKKDLIIKLPKYSLFELENGRKRMLASAGELQKGNELALPSKYVNFLYLASHYEKLKGSPEDNEQKQLFVEQHKHYLDEIIEQISEFSKRVILADANLDKVLSAYNKHRDKPIREQAENIIHLFTLTNLGAPAAFKYFDTTIDRKRYTSTKEVLDATLIHQSITGLYETRIDLSQLGGDGGGGGGGSGSSGGTVSLQDEHRLFDIPVTTSLPDVWLQDFPQAWAETGGLGRAKCQAPIIIDLKPTAVPVSIKQYPMSLEAHMGIRQHIIKFLELGVLRPCRSPWNTPLLPVKKPGTQDYRPVQDLREINKRTVDIHPTVPNPYNLLSTLKPDYSWYTVLDLKDAFFCLPLAPQSQELFAFEWKDPERGISGQLTWTRLPQGFKNSPTLFNEALHRDLTDFRTQHPEVTLLQYVDDLLLAAPTKKACTQGTRHLLQELGEKGYRASAKKAQICQTKVTYLGYILSEGKRWLTPGRIETVARIPPPRNPREVREFLGKAGFCRLFIPGFAELAAPLYALTKPSTPFTWQTEHQLAFEALKKALLSAPALGLPDTSKPFTLFLDERQGIAKGVLTQKLGPWKRPVAYLSKKLDPVAAGWPPCLRIMAATAMLVKDSAKLTLGQPLTVITPHTLEAIVRQPPDRWITNARLTHYQALLLDTDRVQFGPPVTLNPATLLPVPENQPSPHDCRQVLAETHGTREDLKDQELPDADHTWYTDGSSYLDSGTRRAGAAVVDGHNTIWAQSLPPGTSAQKAELIALTKALELSKGKKANIYTDSRYAFATAHTHGSIYERRGWLTSEGKEIKNKAEIIALLKALFLPQEVAIIHCPGHQKGQDPVAVGNRQADRVARQAAMAEVLTLATEPDNTSHITAGKRTADGSEFEKRTADGSEFESPKKKAKVE

SEQ ID NO: 2027 - protein, 2102 aa, synthetic construct
MPAAKRVKLDGGDKKYSIGLDIGTNSVGWAVITDEYKVPSKKFKVLGNTDRHSIKKNLIGALLFDSGETAEATRLKRTARRRYTRRKNRICYLQEIFSNEMAKVDDSFFHRLEESFLVEEDKKHERHPIFGNIVDEVAYHEKYPTIYHLRKKLVDSTDKADLRLIYLALAHMIKFRGHFLIEGDLNPDNSDVDKLFIQLVQTYNQLFEENPINASGVDAKAILSARLSKSRRLENLIAQLPGEKKNGLFGNLIALSLGLTPNFKSNFDLAEDAKLQLSKDTYDDDLDNLLAQIGDQYADLFLAAKNLSDAILLSDILRVNTEITKAPLSASMIKRYDEHHQDLTLLKALVRQQLPEKYKEIFFDQSKNGYAGYIDGGASQEEFYKFIKPILEKMDGTEELLVKLNREDLLRKQRTFDNGSIPHQIHLGELHAILRRQEDFYPFLKDNREKIEKILTFRIPYYVGPLARGNSRFAWMTRKSEETITPWNFEEVVDKGASAQSFIERMTNFDKNLPNEKVLPKHSLLYEYFTVYNELTKVKYVTEGMRKPAFLSGEQKKAIVDLLFKTNRKVTVKQLKEDYFKKIECFDSVEISGVEDRFNASLGTYHDLLKIIKDKDFLDNEENEDILEDIVLTLTLFEDREMIEERLKTYAHLFDDKVMKQLKRRRYTGWGRLSRKLINGIRDKQSGKTILDFLKSDGFANRNFMQLIHDDSLTFKEDIQKAQVSGQGDSLHEHIANLAGSPAIKKGILQTVKVVDELVKVMGRHKPENIVIEMARENQTTQKGQKNSRERMKRIEEGIKELGSQILKEHPVENTQLQNEKLYLYYLQNGRDMYVDQELDINRLSDYDVDHIVPQSFLKDDSIDNKVLTRSDKARGKSDNVPSEEVVKKMKNYWRQLLNAKLITQRKFDNLTKAERGGLSELDKAGFIKRQLVETRQITKHVAQILDSRMNTKYDENDKLIREVKVITLKSKLVSDFRKDFQFYKVREINNYHHAHDAYLNAVVGTALIKKYPKLESEFVYGDYKVYDVRKMIAKSEQEIGKATAKYFFYSNIMNFFKTEITLANGEIRKRPLIETNGETGEIVWDKGRDFATVRKVLSMPQVNIVKKTEVQTGGFSKESILPKRNSDKLIARKKDWDPKKYGGFDSPTVAYSVLVVAKVEKGKSKKLKSVKELLGITIMERSSFEKNPIDFLEAKGYKEVKKDLIIKLPKYSLFELENGRKRMLASAGELQKGNELALPSKYVNFLYLASHYEKLKGSPEDNEQKQLFVEQHKHYLDEIIEQISEFSKRVILADANLDKVLSAYNKHRDKPIREQAENIIHLFTLTNLGAPAAFKYFDTTIDRKRYTSTKEVLDATLIHQSITGLYETRIDLSQLGGDGGEAAAKGGSPAPGGTVSLQDEHRLFDIPVTTSLPDVWLQDFPQAWAETGGLGRAKCQAPIIIDLKPTAVPVSIKQYPMSLEAHMGIRQHIIKFLELGVLRPCRSPWNTPLLPVKKPGTQDYRPVQDLREINKRTVDIHPTVPNPYNLLSTLKPDYSWYTVLDLKDAFFCLPLAPQSQELFAFEWKDPERGISGQLTWTRLPQGFKNSPTLFNEALHRDLTDFRTQHPEVTLLQYVDDLLLAAPTKKACTQGTRHLLQELGEKGYRASAKKAQICQTKVTYLGYILSEGKRWLTPGRIETVARIPPPRNPREVREFLGKAGFCRLFIPGFAELAAPLYALTKPSTPFTWQTEHQLAFEALKKALLSAPALGLPDTSKPFTLFLDERQGIAKGVLTQKLGPWKRPVAYLSKKLDPVAAGWPPCLRIMAATAMLVKDSAKLTLGQPLTVITPHTLEAIVRQPPDRWITNARLTHYQALLLDTDRVQFGPPVTLNPATLLPVPENQPSPHDCRQVLAETHGTREDLKDQELPDADHTWYTDGSSYLDSGTRRAGAAVVDGHNTIWAQSLPPGTSAQKAELIALTKALELSKGKKANIYTDSRYAFATAHTHGSIYERRGWLTSEGKEIKNKAEIIALLKALFLPQEVAIIHCPGHQKGQDPVAVGNRQADRVARQAAMAEVLTLATEPDNTSHITAGKRTADGSEFEKRTADGSEFESPKKKAKVE

SEQ ID NO: 2028 - protein, 2102 aa, synthetic construct
MPAAKRVKLDGGDKKYSIGLDIGTNSVGWAVITDEYKVPSKKFKVLGNTDRHSIKKNLIGALLFDSGETAEATRLKRTARRRYTRRKNRICYLQEIFSNEMAKVDDSFFHRLEESFLVEEDKKHERHPIFGNIVDEVAYHEKYPTIYHLRKKLVDSTDKADLRLIYLALAHMIKFRGHFLIEGDLNPDNSDVDKLFIQLVQTYNQLFEENPINASGVDAKAILSARLSKSRRLENLIAQLPGEKKNGLFGNLIALSLGLTPNFKSNFDLAEDAKLQLSKDTYDDDLDNLLAQIGDQYADLFLAAKNLSDAILLSDILRVNTEITKAPLSASMIKRYDEHHQDLTLLKALVRQQLPEKYKEIFFDQSKNGYAGYIDGGASQEEFYKFIKPILEKMDGTEELLVKLNREDLLRKQRTFDNGSIPHQIHLGELHAILRRQEDFYPFLKDNREKIEKILTFRIPYYVGPLARGNSRFAWMTRKSEETITPWNFEEVVDKGASAQSFIERMTNFDKNLPNEKVLPKHSLLYEYFTVYNELTKVKYVTEGMRKPAFLSGEQKKAIVDLLFKTNRKVTVKQLKEDYFKKIECFDSVEISGVEDRFNASLGTYHDLLKIIKDKDFLDNEENEDILEDIVLTLTLFEDREMIEERLKTYAHLFDDKVMKQLKRRRYTGWGRLSRKLINGIRDKQSGKTILDFLKSDGFANRNFMQLIHDDSLTFKEDIQKAQVSGQGDSLHEHIANLAGSPAIKKGILQTVKVVDELVKVMGRHKPENIVIEMARENQTTQKGQKNSRERMKRIEEGIKELGSQILKEHPVENTQLQNEKLYLYYLQNGRDMYVDQELDINRLSDYDVDHIVPQSFLKDDSIDNKVLTRSDKARGKSDNVPSEEVVKKMKNYWRQLLNAKLITQRKFDNLTKAERGGLSELDKAGFIKRQLVETRQITKHVAQILDSRMNTKYDENDKLIREVKVITLKSKLVSDFRKDFQFYKVREINNYHHAHDAYLNAVVGTALIKKYPKLESEFVYGDYKVYDVRKMIAKSEQEIGKATAKYFFYSNIMNFFKTEITLANGEIRKRPLIETNGETGEIVWDKGRDFATVRKVLSMPQVNIVKKTEVQTGGFSKESILPKRNSDKLIARKKDWDPKKYGGFDSPTVAYSVLVVAKVEKGKSKKLKSVKELLGITIMERSSFEKNPIDFLEAKGYKEVKKDLIIKLPKYSLFELENGRKRMLASAGELQKGNELALPSKYVNFLYLASHYEKLKGSPEDNEQKQLFVEQHKHYLDEIIEQISEFSKRVILADANLDKVLSAYNKHRDKPIREQAENIIHLFTLTNLGAPAAFKYFDTTIDRKRYTSTKEVLDATLIHQSITGLYETRIDLSQLGGDGGEAAAKPAPGGSGGTVSLQDEHRLFDIPVTTSLPDVWLQDFPQAWAETGGLGRAKCQAPIIIDLKPTAVPVSIKQYPMSLEAHMGIRQHIIKFLELGVLRPCRSPWNTPLLPVKKPGTQDYRPVQDLREINKRTVDIHPTVPNPYNLLSTLKPDYSWYTVLDLKDAFFCLPLAPQSQELFAFEWKDPERGISGQLTWTRLPQGFKNSPTLFNEALHRDLTDFRTQHPEVTLLQYVDDLLLAAPTKKACTQGTRHLLQELGEKGYRASAKKAQICQTKVTYLGYILSEGKRWLTPGRIETVARIPPPRNPREVREFLGKAGFCRLFIPGFAELAAPLYALTKPSTPFTWQTEHQLAFEALKKALLSAPALGLPDTSKPFTLFLDERQGIAKGVLTQKLGPWKRPVAYLSKKLDPVAAGWPPCLRIMAATAMLVKDSAKLTLGQPLTVITPHTLEAIVRQPPDRWITNARLTHYQALLLDTDRVQFGPPVTLNPATLLPVPENQPSPHDCRQVLAETHGTREDLKDQELPDADHTWYTDGSSYLDSGTRRAGAAVVDGHNTIWAQSLPPGTSAQKAELIALTKALELSKGKKANIYTDSRYAFATAHTHGSIYERRGWLTSEGKEIKNKAEIIALLKALFLPQEVAIIHCPGHQKGQDPVAVGNRQADRVARQAAMAEVLTLATEPDNTSHITAGKRTADGSEFEKRTADGSEFESPKKKAKVE

SEQ ID NO: 2029 - protein, 2097 aa, synthetic construct
MPAAKRVKLDGGDKKYSIGLDIGTNSVGWAVITDEYKVPSKKFKVLGNTDRHSIKKNLIGALLFDSGETAEATRLKRTARRRYTRRKNRICYLQEIFSNEMAKVDDSFFHRLEESFLVEEDKKHERHPIFGNIVDEVAYHEKYPTIYHLRKKLVDSTDKADLRLIYLALAHMIKFRGHFLIEGDLNPDNSDVDKLFIQLVQTYNQLFEENPINASGVDAKAILSARLSKSRRLENLIAQLPGEKKNGLFGNLIALSLGLTPNFKSNFDLAEDAKLQLSKDTYDDDLDNLLAQIGDQYADLFLAAKNLSDAILLSDILRVNTEITKAPLSASMIKRYDEHHQDLTLLKALVRQQLPEKYKEIFFDQSKNGYAGYIDGGASQEEFYKFIKPILEKMDGTEELLVKLNREDLLRKQRTFDNGSIPHQIHLGELHAILRRQEDFYPFLKDNREKIEKILTFRIPYYVGPLARGNSRFAWMTRKSEETITPWNFEEVVDKGASAQSFIERMTNFDKNLPNEKVLPKHSLLYEYFTVYNELTKVKYVTEGMRKPAFLSGEQKKAIVDLLFKTNRKVTVKQLKEDYFKKIECFDSVEISGVEDRFNASLGTYHDLLKIIKDKDFLDNEENEDILEDIVLTLTLFEDREMIEERLKTYAHLFDDKVMKQLKRRRYTGWGRLSRKLINGIRDKQSGKTILDFLKSDGFANRNFMQLIHDDSLTFKEDIQKAQVSGQGDSLHEHIANLAGSPAIKKGILQTVKVVDELVKVMGRHKPENIVIEMARENQTTQKGQKNSRERMKRIEEGIKELGSQILKEHPVENTQLQNEKLYLYYLQNGRDMYVDQELDINRLSDYDVDHIVPQSFLKDDSIDNKVLTRSDKARGKSDNVPSEEVVKKMKNYWRQLLNAKLITQRKFDNLTKAERGGLSELDKAGFIKRQLVETRQITKHVAQILDSRMNTKYDENDKLIREVKVITLKSKLVSDFRKDFQFYKVREINNYHHAHDAYLNAVVGTALIKKYPKLESEFVYGDYKVYDVRKMIAKSEQEIGKATAKYFFYSNIMNFFKTEITLANGEIRKRPLIETNGETGEIVWDKGRDFATVRKVLSMPQVNIVKKTEVQTGGFSKESILPKRNSDKLIARKKDWDPKKYGGFDSPTVAYSVLVVAKVEKGKSKKLKSVKELLGITIMERSSFEKNPIDFLEAKGYKEVKKDLIIKLPKYSLFELENGRKRMLASAGELQKGNELALPSKYVNFLYLASHYEKLKGSPEDNEQKQLFVEQHKHYLDEIIEQISEFSKRVILADANLDKVLSAYNKHRDKPIREQAENIIHLFTLTNLGAPAAFKYFDTTIDRKRYTSTKEVLDATLIHQSITGLYETRIDLSQLGGDGGGGGGGSGGTVSLQDEHRLFDIPVTTSLPDVWLQDFPQAWAETGGLGRAKCQAPIIIDLKPTAVPVSIKQYPMSLEAHMGIRQHIIKFLELGVLRPCRSPWNTPLLPVKKPGTQDYRPVQDLREINKRTVDIHPTVPNPYNLLSTLKPDYSWYTVLDLKDAFFCLPLAPQSQELFAFEWKDPERGISGQLTWTRLPQGFKNSPTLFNEALHRDLTDFRTQHPEVTLLQYVDDLLLAAPTKKACTQGTRHLLQELGEKGYRASAKKAQICQTKVTYLGYILSEGKRWLTPGRIETVARIPPPRNPREVREFLGKAGFCRLFIPGFAELAAPLYALTKPSTPFTWQTEHQLAFEALKKALLSAPALGLPDTSKPFTLFLDERQGIAKGVLTQKLGPWKRPVAYLSKKLDPVAAGWPPCLRIMAATAMLVKDSAKLTLGQPLTVITPHTLEAIVRQPPDRWITNARLTHYQALLLDTDRVQFGPPVTLNPATLLPVPENQPSPHDCRQVLAETHGTREDLKDQELPDADHTWYTDGSSYLDSGTRRAGAAVVDGHNTIWAQSLPPGTSAQKAELIALTKALELSKGKKANIYTDSRYAFATAHTHGSIYERRGWLTSEGKEIKNKAEIIALLKALFLPQEVAIIHCPGHQKGQDPVAVGNRQADRVARQAAMAEVLTLATEPDNTSHITAGKRTADGSEFEKRTADGSEFESPKKKAKVE

SEQ ID NO: 2030 - protein, 2100 aa, synthetic construct
MPAAKRVKLDGGDKKYSIGLDIGTNSVGWAVITDEYKVPSKKFKVLGNTDRHSIKKNLIGALLFDSGETAEATRLKRTARRRYTRRKNRICYLQEIFSNEMAKVDDSFFHRLEESFLVEEDKKHERHPIFGNIVDEVAYHEKYPTIYHLRKKLVDSTDKADLRLIYLALAHMIKFRGHFLIEGDLNPDNSDVDKLFIQLVQTYNQLFEENPINASGVDAKAILSARLSKSRRLENLIAQLPGEKKNGLFGNLIALSLGLTPNFKSNFDLAEDAKLQLSKDTYDDDLDNLLAQIGDQYADLFLAAKNLSDAILLSDILRVNTEITKAPLSASMIKRYDEHHQDLTLLKALVRQQLPEKYKEIFFDQSKNGYAGYIDGGASQEEFYKFIKPILEKMDGTEELLVKLNREDLLRKQRTFDNGSIPHQIHLGELHAILRRQEDFYPFLKDNREKIEKILTFRIPYYVGPLARGNSRFAWMTRKSEETITPWNFEEVVDKGASAQSFIERMTNFDKNLPNEKVLPKHSLLYEYFTVYNELTKVKYVTEGMRKPAFLSGEQKKAIVDLLFKTNRKVTVKQLKEDYFKKIECFDSVEISGVEDRFNASLGTYHDLLKIIKDKDFLDNEENEDILEDIVLTLTLFEDREMIEERLKTYAHLFDDKVMKQLKRRRYTGWGRLSRKLINGIRDKQSGKTILDFLKSDGFANRNFMQLIHDDSLTFKEDIQKAQVSGQGDSLHEHIANLAGSPAIKKGILQTVKVVDELVKVMGRHKPENIVIEMARENQTTQKGQKNSRERMKRIEEGIKELGSQILKEHPVENTQLQNEKLYLYYLQNGRDMYVDQELDINRLSDYDVDHIVPQSFLKDDSIDNKVLTRSDKARGKSDNVPSEEVVKKMKNYWRQLLNAKLITQRKFDNLTKAERGGLSELDKAGFIKRQLVETRQITKHVAQILDSRMNTKYDENDKLIREVKVITLKSKLVSDFRKDFQFYKVREINNYHHAHDAYLNAVVGTALIKKYPKLESEFVYGDYKVYDVRKMIAKSEQEIGKATAKYFFYSNIMNFFKTEITLANGEIRKRPLIETNGETGEIVWDKGRDFATVRKVLSMPQVNIVKKTEVQTGGFSKESILPKRNSDKLIARKKDWDPKKYGGFDSPTVAYSVLVVAKVEKGKSKKLKSVKELLGITIMERSSFEKNPIDFLEAKGYKEVKKDLIIKLPKYSLFELENGRKRMLASAGELQKGNELALPSKYVNFLYLASHYEKLKGSPEDNEQKQLFVEQHKHYLDEIIEQISEFSKRVILADANLDKVLSAYNKHRDKPIREQAENIIHLFTLTNLGAPAAFKYFDTTIDRKRYTSTKEVLDATLIHQSITGLYETRIDLSQLGGDGGGGSGGSGGSGGTVSLQDEHRLFDIPVTTSLPDVWLQDFPQAWAETGGLGRAKCQAPIIIDLKPTAVPVSIKQYPMSLEAHMGIRQHIIKFLELGVLRPCRSPWNTPLLPVKKPGTQDYRPVQDLREINKRTVDIHPTVPNPYNLLSTLKPDYSWYTVLDLKDAFFCLPLAPQSQELFAFEWKDPERGISGQLTWTRLPQGFKNSPTLFNEALHRDLTDFRTQHPEVTLLQYVDDLLLAAPTKKACTQGTRHLLQELGEKGYRASAKKAQICQTKVTYLGYILSEGKRWLTPGRIETVARIPPPRNPREVREFLGKAGFCRLFIPGFAELAAPLYALTKPSTPFTWQTEHQLAFEALKKALLSAPALGLPDTSKPFTLFLDERQGIAKGVLTQKLGPWKRPVAYLSKKLDPVAAGWPPCLRIMAATAMLVKDSAKLTLGQPLTVITPHTLEAIVRQPPDRWITNARLTHYQALLLDTDRVQFGPPVTLNPATLLPVPENQPSPHDCRQVLAETHGTREDLKDQELPDADHTWYTDGSSYLDSGTRRAGAAVVDGHNTIWAQSLPPGTSAQKAELIALTKALELSKGKKANIYTDSRYAFATAHTHGSIYERRGWLTSEGKEIKNKAEIIALLKALFLPQEVAIIHCPGHQKGQDPVAVGNRQADRVARQAAMAEVLTLATEPDNTSHITAGKRTADGSEFEKRTADGSEFESPKKKAKVE

SEQ ID NO: 2031 - protein, 2097 aa, synthetic construct
MPAAKRVKLDGGDKKYSIGLDIGTNSVGWAVITDEYKVPSKKFKVLGNTDRHSIKKNLIGALLFDSGETAEATRLKRTARRRYTRRKNRICYLQEIFSNEMAKVDDSFFHRLEESFLVEEDKKHERHPIFGNIVDEVAYHEKYPTIYHLRKKLVDSTDKADLRLIYLALAHMIKFRGHFLIEGDLNPDNSDVDKLFIQLVQTYNQLFEENPINASGVDAKAILSARLSKSRRLENLIAQLPGEKKNGLFGNLIALSLGLTPNFKSNFDLAEDAKLQLSKDTYDDDLDNLLAQIGDQYADLFLAAKNLSDAILLSDILRVNTEITKAPLSASMIKRYDEHHQDLTLLKALVRQQLPEKYKEIFFDQSKNGYAGYIDGGASQEEFYKFIKPILEKMDGTEELLVKLNREDLLRKQRTFDNGSIPHQIHLGELHAILRRQEDFYPFLKDNREKIEKILTFRIPYYVGPLARGNSRFAWMTRKSEETITPWNFEEVVDKGASAQSFIERMTNFDKNLPNEKVLPKHSLLYEYFTVYNELTKVKYVTEGMRKPAFLSGEQKKAIVDLLFKTNRKVTVKQLKEDYFKKIECFDSVEISGVEDRFNASLGTYHDLLKIIKDKDFLDNEENEDILEDIVLTLTLFEDREMIEERLKTYAHLFDDKVMKQLKRRRYTGWGRLSRKLINGIRDKQSGKTILDFLKSDGFANRNFMQLIHDDSLTFKEDIQKAQVSGQGDSLHEHIANLAGSPAIKKGILQTVKVVDELVKVMGRHKPENIVIEMARENQTTQKGQKNSRERMKRIEEGIKELGSQILKEHPVENTQLQNEKLYLYYLQNGRDMYVDQELDINRLSDYDVDHIVPQSFLKDDSIDNKVLTRSDKARGKSDNVPSEEVVKKMKNYWRQLLNAKLITQRKFDNLTKAERGGLSELDKAGFIKRQLVETRQITKHVAQILDSRMNTKYDENDKLIREVKVITLKSKLVSDFRKDFQFYKVREINNYHHAHDAYLNAVVGTALIKKYPKLESEFVYGDYKVYDVRKMIAKSEQEIGKATAKYFFYSNIMNFFKTEITLANGEIRKRPLIETNGETGEIVWDKGRDFATVRKVLSMPQVNIVKKTEVQTGGFSKESILPKRNSDKLIARKKDWDPKKYGGFDSPTVAYSVLVVAKVEKGKSKKLKSVKELLGITIMERSSFEKNPIDFLEAKGYKEVKKDLIIKLPKYSLFELENGRKRMLASAGELQKGNELALPSKYVNFLYLASHYEKLKGSPEDNEQKQLFVEQHKHYLDEIIEQISEFSKRVILADANLDKVLSAYNKHRDKPIREQAENIIHLFTLTNLGAPAAFKYFDTTIDRKRYTSTKEVLDATLIHQSITGLYETRIDLSQLGGDGGGGSGSSGGTVSLQDEHRLFDIPVTTSLPDVWLQDFPQAWAETGGLGRAKCQAPIIIDLKPTAVPVSIKQYPMSLEAHMGIRQHIIKFLELGVLRPCRSPWNTPLLPVKKPGTQDYRPVQDLREINKRTVDIHPTVPNPYNLLSTLKPDYSWYTVLDLKDAFFCLPLAPQSQELFAFEWKDPERGISGQLTWTRLPQGFKNSPTLFNEALHRDLTDFRTQHPEVTLLQYVDDLLLAAPTKKACTQGTRHLLQELGEKGYRASAKKAQICQTKVTYLGYILSEGKRWLTPGRIETVARIPPPRNPREVREFLGKAGFCRLFIPGFAELAAPLYALTKPSTPFTWQTEHQLAFEALKKALLSAPALGLPDTSKPFTLFLDERQGIAKGVLTQKLGPWKRPVAYLSKKLDPVAAGWPPCLRIMAATAMLVKDSAKLTLGQPLTVITPHTLEAIVRQPPDRWITNARLTHYQALLLDTDRVQFGPPVTLNPATLLPVPENQPSPHDCRQVLAETHGTREDLKDQELPDADHTWYTDGSSYLDSGTRRAGAAVVDGHNTIWAQSLPPGTSAQKAELIALTKALELSKGKKANIYTDSRYAFATAHTHGSIYERRGWLTSEGKEIKNKAEIIALLKALFLPQEVAIIHCPGHQKGQDPVAVGNRQADRVARQAAMAEVLTLATEPDNTSHITAGKRTADGSEFEKRTADGSEFESPKKKAKVE

SEQ ID NO: 2032 - protein, 2097 aa, synthetic construct
MPAAKRVKLDGGDKKYSIGLDIGTNSVGWAVITDEYKVPSKKFKVLGNTDRHSIKKNLIGALLFDSGETAEATRLKRTARRRYTRRKNRICYLQEIFSNEMAKVDDSFFHRLEESFLVEEDKKHERHPIFGNIVDEVAYHEKYPTIYHLRKKLVDSTDKADLRLIYLALAHMIKFRGHFLIEGDLNPDNSDVDKLFIQLVQTYNQLFEENPINASGVDAKAILSARLSKSRRLENLIAQLPGEKKNGLFGNLIALSLGLTPNFKSNFDLAEDAKLQLSKDTYDDDLDNLLAQIGDQYADLFLAAKNLSDAILLSDILRVNTEITKAPLSASMIKRYDEHHQDLTLLKALVRQQLPEKYKEIFFDQSKNGYAGYIDGGASQEEFYKFIKPILEKMDGTEELLVKLNREDLLRKQRTFDNGSIPHQIHLGELHAILRRQEDFYPFLKDNREKIEKILTFRIPYYVGPLARGNSRFAWMTRKSEETITPWNFEEVVDKGASAQSFIERMTNFDKNLPNEKVLPKHSLLYEYFTVYNELTKVKYVTEGMRKPAFLSGEQKKAIVDLLFKTNRKVTVKQLKEDYFKKIECFDSVEISGVEDRFNASLGTYHDLLKIIKDKDFLDNEENEDILEDIVLTLTLFEDREMIEERLKTYAHLFDDKVMKQLKRRRYTGWGRLSRKLINGIRDKQSGKTILDFLKSDGFANRNFMQLIHDDSLTFKEDIQKAQVSGQGDSLHEHIANLAGSPAIKKGILQTVKVVDELVKVMGRHKPENIVIEMARENQTTQKGQKNSRERMKRIEEGIKELGSQILKEHPVENTQLQNEKLYLYYLQNGRDMYVDQELDINRLSDYDVDHIVPQSFLKDDSIDNKVLTRSDKARGKSDNVPSEEVVKKMKNYWRQLLNAKLITQRKFDNLTKAERGGLSELDKAGFIKRQLVETRQITKHVAQILDSRMNTKYDENDKLIREVKVITLKSKLVSDFRKDFQFYKVREINNYHHAHDAYLNAVVGTALIKKYPKLESEFVYGDYKVYDVRKMIAKSEQEIGKATAKYFFYSNIMNFFKTEITLANGEIRKRPLIETNGETGEIVWDKGRDFATVRKVLSMPQVNIVKKTEVQTGGFSKESILPKRNSDKLIARKKDWDPKKYGGFDSPTVAYSVLVVAKVEKGKSKKLKSVKELLGITIMERSSFEKNPIDFLEAKGYKEVKKDLIIKLPKYSLFELENGRKRMLASAGELQKGNELALPSKYVNFLYLASHYEKLKGSPEDNEQKQLFVEQHKHYLDEIIEQISEFSKRVILADANLDKVLSAYNKHRDKPIREQAENIIHLFTLTNLGAPAAFKYFDTTIDRKRYTSTKEVLDATLIHQSITGLYETRIDLSQLGGDGGPAPGGSGGTVSLQDEHRLFDIPVTTSLPDVWLQDFPQAWAETGGLGRAKCQAPIIIDLKPTAVPVSIKQYPMSLEAHMGIRQHIIKFLELGVLRPCRSPWNTPLLPVKKPGTQDYRPVQDLREINKRTVDIHPTVPNPYNLLSTLKPDYSWYTVLDLKDAFFCLPLAPQSQELFAFEWKDPERGISGQLTWTRLPQGFKNSPTLFNEALHRDLTDFRTQHPEVTLLQYVDDLLLAAPTKKACTQGTRHLLQELGEKGYRASAKKAQICQTKVTYLGYILSEGKRWLTPGRIETVARIPPPRNPREVREFLGKAGFCRLFIPGFAELAAPLYALTKPSTPFTWQTEHQLAFEALKKALLSAPALGLPDTSKPFTLFLDERQGIAKGVLTQKLGPWKRPVAYLSKKLDPVAAGWPPCLRIMAATAMLVKDSAKLTLGQPLTVITPHTLEAIVRQPPDRWITNARLTHYQALLLDTDRVQFGPPVTLNPATLLPVPENQPSPHDCRQVLAETHGTREDLKDQELPDADHTWYTDGSSYLDSGTRRAGAAVVDGHNTIWAQSLPPGTSAQKAELIALTKALELSKGKKANIYTDSRYAFATAHTHGSIYERRGWLTSEGKEIKNKAEIIALLKALFLPQEVAIIHCPGHQKGQDPVAVGNRQADRVARQAAMAEVLTLATEPDNTSHITAGKRTADGSEFEKRTADGSEFESPKKKAKVE

SEQ ID NO: 2033 - protein, 2094 aa, synthetic construct
MPAAKRVKLDGGDKKYSIGLDIGTNSVGWAVITDEYKVPSKKFKVLGNTDRHSIKKNLIGALLFDSGETAEATRLKRTARRRYTRRKNRICYLQEIFSNEMAKVDDSFFHRLEESFLVEEDKKHERHPIFGNIVDEVAYHEKYPTIYHLRKKLVDSTDKADLRLIYLALAHMIKFRGHFLIEGDLNPDNSDVDKLFIQLVQTYNQLFEENPINASGVDAKAILSARLSKSRRLENLIAQLPGEKKNGLFGNLIALSLGLTPNFKSNFDLAEDAKLQLSKDTYDDDLDNLLAQIGDQYADLFLAAKNLSDAILLSDILRVNTEITKAPLSASMIKRYDEHHQDLTLLKALVRQQLPEKYKEIFFDQSKNGYAGYIDGGASQEEFYKFIKPILEKMDGTEELLVKLNREDLLRKQRTFDNGSIPHQIHLGELHAILRRQEDFYPFLKDNREKIEKILTFRIPYYVGPLARGNSRFAWMTRKSEETITPWNFEEVVDKGASAQSFIERMTNFDKNLPNEKVLPKHSLLYEYFTVYNELTKVKYVTEGMRKPAFLSGEQKKAIVDLLFKTNRKVTVKQLKEDYFKKIECFDSVEISGVEDRFNASLGTYHDLLKIIKDKDFLDNEENEDILEDIVLTLTLFEDREMIEERLKTYAHLFDDKVMKQLKRRRYTGWGRLSRKLINGIRDKQSGKTILDFLKSDGFANRNFMQLIHDDSLTFKEDIQKAQVSGQGDSLHEHIANLAGSPAIKKGILQTVKVVDELVKVMGRHKPENIVIEMARENQTTQKGQKNSRERMKRIEEGIKELGSQILKEHPVENTQLQNEKLYLYYLQNGRDMYVDQELDINRLSDYDVDHIVPQSFLKDDSIDNKVLTRSDKARGKSDNVPSEEVVKKMKNYWRQLLNAKLITQRKFDNLTKAERGGLSELDKAGFIKRQLVETRQITKHVAQILDSRMNTKYDENDKLIREVKVITLKSKLVSDFRKDFQFYKVREINNYHHAHDAYLNAVVGTALIKKYPKLESEFVYGDYKVYDVRKMIAKSEQEIGKATAKYFFYSNIMNFFKTEITLANGEIRKRPLIETNGETGEIVWDKGRDFATVRKVLSMPQVNIVKKTEVQTGGFSKESILPKRNSDKLIARKKDWDPKKYGGFDSPTVAYSVLVVAKVEKGKSKKLKSVKELLGITIMERSSFEKNPIDFLEAKGYKEVKKDLIIKLPKYSLFELENGRKRMLASAGELQKGNELALPSKYVNFLYLASHYEKLKGSPEDNEQKQLFVEQHKHYLDEIIEQISEFSKRVILADANLDKVLSAYNKHRDKPIREQAENIIHLFTLTNLGAPAAFKYFDTTIDRKRYTSTKEVLDATLIHQSITGLYETRIDLSQLGGDGGGSSGGTVSLQDEHRLFDIPVTTSLPDVWLQDFPQAWAETGGLGRAKCQAPIIIDLKPTAVPVSIKQYPMSLEAHMGIRQHIIKFLELGVLRPCRSPWNTPLLPVKKPGTQDYRPVQDLREINKRTVDIHPTVPNPYNLLSTLKPDYSWYTVLDLKDAFFCLPLAPQSQELFAFEWKDPERGISGQLTWTRLPQGFKNSPTLFNEALHRDLTDFRTQHPEVTLLQYVDDLLLAAPTKKACTQGTRHLLQELGEKGYRASAKKAQICQTKVTYLGYILSEGKRWLTPGRIETVARIPPPRNPREVREFLGKAGFCRLFIPGFAELAAPLYALTKPSTPFTWQTEHQLAFEALKKALLSAPALGLPDTSKPFTLFLDERQGIAKGVLTQKLGPWKRPVAYLSKKLDPVAAGWPPCLRIMAATAMLVKDSAKLTLGQPLTVITPHTLEAIVRQPPDRWITNARLTHYQALLLDTDRVQFGPPVTLNPATLLPVPENQPSPHDCRQVLAETHGTREDLKDQELPDADHTWYTDGSSYLDSGTRRAGAAVVDGHNTIWAQSLPPGTSAQKAELIALTKALELSKGKKANIYTDSRYAFATAHTHGSIYERRGWLTSEGKEIKNKAEIIALLKALFLPQEVAIIHCPGHQKGQDPVAVGNRQADRVARQAAMAEVLTLATEPDNTSHITAGKRTADGSEFEKRTADGSEFESPKKKAKVE

SEQ ID NO: 2034 - protein, 2100 aa, synthetic construct
MPAAKRVKLDGGDKKYSIGLDIGTNSVGWAVITDEYKVPSKKFKVLGNTDRHSIKKNLIGALLFDSGETAEATRLKRTARRRYTRRKNRICYLQEIFSNEMAKVDDSFFHRLEESFLVEEDKKHERHPIFGNIVDEVAYHEKYPTIYHLRKKLVDSTDKADLRLIYLALAHMIKFRGHFLIEGDLNPDNSDVDKLFIQLVQTYNQLFEENPINASGVDAKAILSARLSKSRRLENLIAQLPGEKKNGLFGNLIALSLGLTPNFKSNFDLAEDAKLQLSKDTYDDDLDNLLAQIGDQYADLFLAAKNLSDAILLSDILRVNTEITKAPLSASMIKRYDEHHQDLTLLKALVRQQLPEKYKEIFFDQSKNGYAGYIDGGASQEEFYKFIKPILEKMDGTEELLVKLNREDLLRKQRTFDNGSIPHQIHLGELHAILRRQEDFYPFLKDNREKIEKILTFRIPYYVGPLARGNSRFAWMTRKSEETITPWNFEEVVDKGASAQSFIERMTNFDKNLPNEKVLPKHSLLYEYFTVYNELTKVKYVTEGMRKPAFLSGEQKKAIVDLLFKTNRKVTVKQLKEDYFKKIECFDSVEISGVEDRFNASLGTYHDLLKIIKDKDFLDNEENEDILEDIVLTLTLFEDREMIEERLKTYAHLFDDKVMKQLKRRRYTGWGRLSRKLINGIRDKQSGKTILDFLKSDGFANRNFMQLIHDDSLTFKEDIQKAQVSGQGDSLHEHIANLAGSPAIKKGILQTVKVVDELVKVMGRHKPENIVIEMARENQTTQKGQKNSRERMKRIEEGIKELGSQILKEHPVENTQLQNEKLYLYYLQNGRDMYVDQELDINRLSDYDVDHIVPQSFLKDDSIDNKVLTRSDKARGKSDNVPSEEVVKKMKNYWRQLLNAKLITQRKFDNLTKAERGGLSELDKAGFIKRQLVETRQITKHVAQILDSRMNTKYDENDKLIREVKVITLKSKLVSDFRKDFQFYKVREINNYHHAHDAYLNAVVGTALIKKYPKLESEFVYGDYKVYDVRKMIAKSEQEIGKATAKYFFYSNIMNFFKTEITLANGEIRKRPLIETNGETGEIVWDKGRDFATVRKVLSMPQVNIVKKTEVQTGGFSKESILPKRNSDKLIARKKDWDPKKYGGFDSPTVAYSVLVVAKVEKGKSKKLKSVKELLGITIMERSSFEKNPIDFLEAKGYKEVKKDLIIKLPKYSLFELENGRKRMLASAGELQKGNELALPSKYVNFLYLASHYEKLKGSPEDNEQKQLFVEQHKHYLDEIIEQISEFSKRVILADANLDKVLSAYNKHRDKPIREQAENIIHLFTLTNLGAPAAFKYFDTTIDRKRYTSTKEVLDATLIHQSITGLYETRIDLSQLGGDGGGGGGGSPAPGGTVSLQDEHRLFDIPVTTSLPDVWLQDFPQAWAETGGLGRAKCQAPIIIDLKPTAVPVSIKQYPMSLEAHMGIRQHIIKFLELGVLRPCRSPWNTPLLPVKKPGTQDYRPVQDLREINKRTVDIHPTVPNPYNLLSTLKPDYSWYTVLDLKDAFFCLPLAPQSQELFAFEWKDPERGISGQLTWTRLPQGFKNSPTLFNEALHRDLTDFRTQHPEVTLLQYVDDLLLAAPTKKACTQGTRHLLQELGEKGYRASAKKAQICQTKVTYLGYILSEGKRWLTPGRIETVARIPPPRNPREVREFLGKAGFCRLFIPGFAELAAPLYALTKPSTPFTWQTEHQLAFEALKKALLSAPALGLPDTSKPFTLFLDERQGIAKGVLTQKLGPWKRPVAYLSKKLDPVAAGWPPCLRIMAATAMLVKDSAKLTLGQPLTVITPHTLEAIVRQPPDRWITNARLTHYQALLLDTDRVQFGPPVTLNPATLLPVPENQPSPHDCRQVLAETHGTREDLKDQELPDADHTWYTDGSSYLDSGTRRAGAAVVDGHNTIWAQSLPPGTSAQKAELIALTKALELSKGKKANIYTDSRYAFATAHTHGSIYERRGWLTSEGKEIKNKAEIIALLKALFLPQEVAIIHCPGHQKGQDPVAVGNRQADRVARQAAMAEVLTLATEPDNTSHITAGKRTADGSEFEKRTADGSEFESPKKKAKVE

SEQ ID NO: 2035 - protein, 2109 aa, synthetic construct
MPAAKRVKLDGGDKKYSIGLDIGTNSVGWAVITDEYKVPSKKFKVLGNTDRHSIKKNLIGALLFDSGETAEATRLKRTARRRYTRRKNRICYLQEIFSNEMAKVDDSFFHRLEESFLVEEDKKHERHPIFGNIVDEVAYHEKYPTIYHLRKKLVDSTDKADLRLIYLALAHMIKFRGHFLIEGDLNPDNSDVDKLFIQLVQTYNQLFEENPINASGVDAKAILSARLSKSRRLENLIAQLPGEKKNGLFGNLIALSLGLTPNFKSNFDLAEDAKLQLSKDTYDDDLDNLLAQIGDQYADLFLAAKNLSDAILLSDILRVNTEITKAPLSASMIKRYDEHHQDLTLLKALVRQQLPEKYKEIFFDQSKNGYAGYIDGGASQEEFYKFIKPILEKMDGTEELLVKLNREDLLRKQRTFDNGSIPHQIHLGELHAILRRQEDFYPFLKDNREKIEKILTFRIPYYVGPLARGNSRFAWMTRKSEETITPWNFEEVVDKGASAQSFIERMTNFDKNLPNEKVLPKHSLLYEYFTVYNELTKVKYVTEGMRKPAFLSGEQKKAIVDLLFKTNRKVTVKQLKEDYFKKIECFDSVEISGVEDRFNASLGTYHDLLKIIKDKDFLDNEENEDILEDIVLTLTLFEDREMIEERLKTYAHLFDDKVMKQLKRRRYTGWGRLSRKLINGIRDKQSGKTILDFLKSDGFANRNFMQLIHDDSLTFKEDIQKAQVSGQGDSLHEHIANLAGSPAIKKGILQTVKVVDELVKVMGRHKPENIVIEMARENQTTQKGQKNSRERMKRIEEGIKELGSQILKEHPVENTQLQNEKLYLYYLQNGRDMYVDQELDINRLSDYDVDHIVPQSFLKDDSIDNKVLTRSDKARGKSDNVPSEEVVKKMKNYWRQLLNAKLITQRKFDNLTKAERGGLSELDKAGFIKRQLVETRQITKHVAQILDSRMNTKYDENDKLIREVKVITLKSKLVSDFRKDFQFYKVREINNYHHAHDAYLNAVVGTALIKKYPKLESEFVYGDYKVYDVRKMIAKSEQEIGKATAKYFFYSNIMNFFKTEITLANGEIRKRPLIETNGETGEIVWDKGRDFATVRKVLSMPQVNIVKKTEVQTGGFSKESILPKRNSDKLIARKKDWDPKKYGGFDSPTVAYSVLVVAKVEKGKSKKLKSVKELLGITIMERSSFEKNPIDFLEAKGYKEVKKDLIIKLPKYSLFELENGRKRMLASAGELQKGNELALPSKYVNFLYLASHYEKLKGSPEDNEQKQLFVEQHKHYLDEIIEQISEFSKRVILADANLDKVLSAYNKHRDKPIREQAENIIHLFTLTNLGAPAAFKYFDTTIDRKRYTSTKEVLDATLIHQSITGLYETRIDLSQLGGDGGGSSGSSGSSGSSGSSGSSGGTVSLQDEHRLFDIPVTTSLPDVWLQDFPQAWAETGGLGRAKCQAPIIIDLKPTAVPVSIKQYPMSLEAHMGIRQHIIKFLELGVLRPCRSPWNTPLLPVKKPGTQDYRPVQDLREINKRTVDIHPTVPNPYNLLSTLKPDYSWYTVLDLKDAFFCLPLAPQSQELFAFEWKDPERGISGQLTWTRLPQGFKNSPTLFNEALHRDLTDFRTQHPEVTLLQYVDDLLLAAPTKKACTQGTRHLLQELGEKGYRASAKKAQICQTKVTYLGYILSEGKRWLTPGRIETVARIPPPRNPREVREFLGKAGFCRLFIPGFAELAAPLYALTKPSTPFTWQTEHQLAFEALKKALLSAPALGLPDTSKPFTLFLDERQGIAKGVLTQKLGPWKRPVAYLSKKLDPVAAGWPPCLRIMAATAMLVKDSAKLTLGQPLTVITPHTLEAIVRQPPDRWITNARLTHYQALLLDTDRVQFGPPVTLNPATLLPVPENQPSPHDCRQVLAETHGTREDLKDQELPDADHTWYTDGSSYLDSGTRRAGAAVVDGHNTIWAQSLPPGTSAQKAELIALTKALELSKGKKANIYTDSRYAFATAHTHGSIYERRGWLTSEGKEIKNKAEIIALLKALFLPQEVAIIHCPGHQKGQDPVAVGNRQADRVARQAAMAEVLTLATEPDNTSHITAGKRTADGSEFEKRTADGSEFESPKKKAKVE

SEQ ID NO: 2036 - protein, 2097 aa, synthetic construct
MPAAKRVKLDGGDKKYSIGLDIGTNSVGWAVITDEYKVPSKKFKVLGNTDRHSIKKNLIGALLFDSGETAEATRLKRTARRRYTRRKNRICYLQEIFSNEMAKVDDSFFHRLEESFLVEEDKKHERHPIFGNIVDEVAYHEKYPTIYHLRKKLVDSTDKADLRLIYLALAHMIKFRGHFLIEGDLNPDNSDVDKLFIQLVQTYNQLFEENPINASGVDAKAILSARLSKSRRLENLIAQLPGEKKNGLFGNLIALSLGLTPNFKSNFDLAEDAKLQLSKDTYDDDLDNLLAQIGDQYADLFLAAKNLSDAILLSDILRVNTEITKAPLSASMIKRYDEHHQDLTLLKALVRQQLPEKYKEIFFDQSKNGYAGYIDGGASQEEFYKFIKPILEKMDGTEELLVKLNREDLLRKQRTFDNGSIPHQIHLGELHAILRRQEDFYPFLKDNREKIEKILTFRIPYYVGPLARGNSRFAWMTRKSEETITPWNFEEVVDKGASAQSFIERMTNFDKNLPNEKVLPKHSLLYEYFTVYNELTKVKYVTEGMRKPAFLSGEQKKAIVDLLFKTNRKVTVKQLKEDYFKKIECFDSVEISGVEDRFNASLGTYHDLLKIIKDKDFLDNEENEDILEDIVLTLTLFEDREMIEERLKTYAHLFDDKVMKQLKRRRYTGWGRLSRKLINGIRDKQSGKTILDFLKSDGFANRNFMQLIHDDSLTFKEDIQKAQVSGQGDSLHEHIANLAGSPAIKKGILQTVKVVDELVKVMGRHKPENIVIEMARENQTTQKGQKNSRERMKRIEEGIKELGSQILKEHPVENTQLQNEKLYLYYLQNGRDMYVDQELDINRLSDYDVDHIVPQSFLKDDSIDNKVLTRSDKARGKSDNVPSEEVVKKMKNYWRQLLNAKLITQRKFDNLTKAERGGLSELDKAGFIKRQLVETRQITKHVAQILDSRMNTKYDENDKLIREVKVITLKSKLVSDFRKDFQFYKVREINNYHHAHDAYLNAVVGTALIKKYPKLESEFVYGDYKVYDVRKMIAKSEQEIGKATAKYFFYSNIMNFFKTEITLANGEIRKRPLIETNGETGEIVWDKGRDFATVRKVLSMPQVNIVKKTEVQTGGFSKESILPKRNSDKLIARKKDWDPKKYGGFDSPTVAYSVLVVAKVEKGKSKKLKSVKELLGITIMERSSFEKNPIDFLEAKGYKEVKKDLIIKLPKYSLFELENGRKRMLASAGELQKGNELALPSKYVNFLYLASHYEKLKGSPEDNEQKQLFVEQHKHYLDEIIEQISEFSKRVILADANLDKVLSAYNKHRDKPIREQAENIIHLFTLTNLGAPAAFKYFDTTIDRKRYTSTKEVLDATLIHQSITGLYETRIDLSQLGGDGGPAPGSSGGTVSLQDEHRLFDIPVTTSLPDVWLQDFPQAWAETGGLGRAKCQAPIIIDLKPTAVPVSIKQYPMSLEAHMGIRQHIIKFLELGVLRPCRSPWNTPLLPVKKPGTQDYRPVQDLREINKRTVDIHPTVPNPYNLLSTLKPDYSWYTVLDLKDAFFCLPLAPQSQELFAFEWKDPERGISGQLTWTRLPQGFKNSPTLFNEALHRDLTDFRTQHPEVTLLQYVDDLLLAAPTKKACTQGTRHLLQELGEKGYRASAKKAQICQTKVTYLGYILSEGKRWLTPGRIETVARIPPPRNPREVREFLGKAGFCRLFIPGFAELAAPLYALTKPSTPFTWQTEHQLAFEALKKALLSAPALGLPDTSKPFTLFLDERQGIAKGVLTQKLGPWKRPVAYLSKKLDPVAAGWPPCLRIMAATAMLVKDSAKLTLGQPLTVITPHTLEAIVRQPPDRWITNARLTHYQALLLDTDRVQFGPPVTLNPATLLPVPENQPSPHDCRQVLAETHGTREDLKDQELPDADHTWYTDGSSYLDSGTRRAGAAVVDGHNTIWAQSLPPGTSAQKAELIALTKALELSKGKKANIYTDSRYAFATAHTHGSIYERRGWLTSEGKEIKNKAEIIALLKALFLPQEVAIIHCPGHQKGQDPVAVGNRQADRVARQAAMAEVLTLATEPDNTSHITAGKRTADGSEFEKRTADGSEFESPKKKAKVE

SEQ ID NO: 2037 - protein, 2102 aa, synthetic construct
MPAAKRVKLDGGDKKYSIGLDIGTNSVGWAVITDEYKVPSKKFKVLGNTDRHSIKKNLIGALLFDSGETAEATRLKRTARRRYTRRKNRICYLQEIFSNEMAKVDDSFFHRLEESFLVEEDKKHERHPIFGNIVDEVAYHEKYPTIYHLRKKLVDSTDKADLRLIYLALAHMIKFRGHFLIEGDLNPDNSDVDKLFIQLVQTYNQLFEENPINASGVDAKAILSARLSKSRRLENLIAQLPGEKKNGLFGNLIALSLGLTPNFKSNFDLAEDAKLQLSKDTYDDDLDNLLAQIGDQYADLFLAAKNLSDAILLSDILRVNTEITKAPLSASMIKRYDEHHQDLTLLKALVRQQLPEKYKEIFFDQSKNGYAGYIDGGASQEEFYKFIKPILEKMDGTEELLVKLNREDLLRKQRTFDNGSIPHQIHLGELHAILRRQEDFYPFLKDNREKIEKILTFRIPYYVGPLARGNSRFAWMTRKSEETITPWNFEEVVDKGASAQSFIERMTNFDKNLPNEKVLPKHSLLYEYFTVYNELTKVKYVTEGMRKPAFLSGEQKKAIVDLLFKTNRKVTVKQLKEDYFKKIECFDSVEISGVEDRFNASLGTYHDLLKIIKDKDFLDNEENEDILEDIVLTLTLFEDREMIEERLKTYAHLFDDKVMKQLKRRRYTGWGRLSRKLINGIRDKQSGKTILDFLKSDGFANRNFMQLIHDDSLTFKEDIQKAQVSGQGDSLHEHIANLAGSPAIKKGILQTVKVVDELVKVMGRHKPENIVIEMARENQTTQKGQKNSRERMKRIEEGIKELGSQILKEHPVENTQLQNEKLYLYYLQNGRDMYVDQELDINRLSDYDVDHIVPQSFLKDDSIDNKVLTRSDKARGKSDNVPSEEVVKKMKNYWRQLLNAKLITQRKFDNLTKAERGGLSELDKAGFIKRQLVETRQITKHVAQILDSRMNTKYDENDKLIREVKVITLKSKLVSDFRKDFQFYKVREINNYHHAHDAYLNAVVGTALIKKYPKLESEFVYGDYKVYDVRKMIAKSEQEIGKATAKYFFYSNIMNFFKTEITLANGEIRKRPLIETNGETGEIVWDKGRDFATVRKVLSMPQVNIVKKTEVQTGGFSKESILPKRNSDKLIARKKDWDPKKYGGFDSPTVAYSVLVVAKVEKGKSKKLKSVKELLGITIMERSSFEKNPIDFLEAKGYKEVKKDLIIKLPKYSLFELENGRKRMLASAGELQKGNELALPSKYVNFLYLASHYEKLKGSPEDNEQKQLFVEQHKHYLDEIIEQISEFSKRVILADANLDKVLSAYNKHRDKPIREQAENIIHLFTLTNLGAPAAFKYFDTTIDRKRYTSTKEVLDATLIHQSITGLYETRIDLSQLGGDGGGSSEAAAKPAPGGTVSLQDEHRLFDIPVTTSLPDVWLQDFPQAWAETGGLGRAKCQAPIIIDLKPTAVPVSIKQYPMSLEAHMGIRQHIIKFLELGVLRPCRSPWNTPLLPVKKPGTQDYRPVQDLREINKRTVDIHPTVPNPYNLLSTLKPDYSWYTVLDLKDAFFCLPLAPQSQELFAFEWKDPERGISGQLTWTRLPQGFKNSPTLFNEALHRDLTDFRTQHPEVTLLQYVDDLLLAAPTKKACTQGTRHLLQELGEKGYRASAKKAQICQTKVTYLGYILSEGKRWLTPGRIETVARIPPPRNPREVREFLGKAGFCRLFIPGFAELAAPLYALTKPSTPFTWQTEHQLAFEALKKALLSAPALGLPDTSKPFTLFLDERQGIAKGVLTQKLGPWKRPVAYLSKKLDPVAAGWPPCLRIMAATAMLVKDSAKLTLGQPLTVITPHTLEAIVRQPPDRWITNARLTHYQALLLDTDRVQFGPPVTLNPATLLPVPENQPSPHDCRQVLAETHGTREDLKDQELPDADHTWYTDGSSYLDSGTRRAGAAVVDGHNTIWAQSLPPGTSAQKAELIALTKALELSKGKKANIYTDSRYAFATAHTHGSIYERRGWLTSEGKEIKNKAEIIALLKALFLPQEVAIIHCPGHQKGQDPVAVGNRQADRVARQAAMAEVLTLATEPDNTSHITAGKRTADGSEFEKRTADGSEFESPKKKAKVE

SEQ ID NO: 2038 - protein, 2100 aa, synthetic construct
MPAAKRVKLDGGDKKYSIGLDIGTNSVGWAVITDEYKVPSKKFKVLGNTDRHSIKKNLIGALLFDSGETAEATRLKRTARRRYTRRKNRICYLQEIFSNEMAKVDDSFFHRLEESFLVEEDKKHERHPIFGNIVDEVAYHEKYPTIYHLRKKLVDSTDKADLRLIYLALAHMIKFRGHFLIEGDLNPDNSDVDKLFIQLVQTYNQLFEENPINASGVDAKAILSARLSKSRRLENLIAQLPGEKKNGLFGNLIALSLGLTPNFKSNFDLAEDAKLQLSKDTYDDDLDNLLAQIGDQYADLFLAAKNLSDAILLSDILRVNTEITKAPLSASMIKRYDEHHQDLTLLKALVRQQLPEKYKEIFFDQSKNGYAGYIDGGASQEEFYKFIKPILEKMDGTEELLVKLNREDLLRKQRTFDNGSIPHQIHLGELHAILRRQEDFYPFLKDNREKIEKILTFRIPYYVGPLARGNSRFAWMTRKSEETITPWNFEEVVDKGASAQSFIERMTNFDKNLPNEKVLPKHSLLYEYFTVYNELTKVKYVTEGMRKPAFLSGEQKKAIVDLLFKTNRKVTVKQLKEDYFKKIECFDSVEISGVEDRFNASLGTYHDLLKIIKDKDFLDNEENEDILEDIVLTLTLFEDREMIEERLKTYAHLFDDKVMKQLKRRRYTGWGRLSRKLINGIRDKQSGKTILDFLKSDGFANRNFMQLIHDDSLTFKEDIQKAQVSGQGDSLHEHIANLAGSPAIKKGILQTVKVVDELVKVMGRHKPENIVIEMARENQTTQKGQKNSRERMKRIEEGIKELGSQILKEHPVENTQLQNEKLYLYYLQNGRDMYVDQELDINRLSDYDVDHIVPQSFLKDDSIDNKVLTRSDKARGKSDNVPSEEVVKKMKNYWRQLLNAKLITQRKFDNLTKAERGGLSELDKAGFIKRQLVETRQITKHVAQILDSRMNTKYDENDKLIREVKVITLKSKLVSDFRKDFQFYKVREINNYHHAHDAYLNAVVGTALIKKYPKLESEFVYGDYKVYDVRKMIAKSEQEIGKATAKYFFYSNIMNFFKTEITLANGEIRKRPLIETNGETGEIVWDKGRDFATVRKVLSMPQVNIVKKTEVQTGGFSKESILPKRNSDKLIARKKDWDPKKYGGFDSPTVAYSVLVVAKVEKGKSKKLKSVKELLGITIMERSSFEKNPIDFLEAKGYKEVKKDLIIKLPKYSLFELENGRKRMLASAGELQKGNELALPSKYVNFLYLASHYEKLKGSPEDNEQKQLFVEQHKHYLDEIIEQISEFSKRVILADANLDKVLSAYNKHRDKPIREQAENIIHLFTLTNLGAPAAFKYFDTTIDRKRYTSTKEVLDATLIHQSITGLYETRIDLSQLGGDGGGGSGGGGSSGGTVSLQDEHRLFDIPVTTSLPDVWLQDFPQAWAETGGLGRAKCQAPIIIDLKPTAVPVSIKQYPMSLEAHMGIRQHIIKFLELGVLRPCRSPWNTPLLPVKKPGTQDYRPVQDLREINKRTVDIHPTVPNPYNLLSTLKPDYSWYTVLDLKDAFFCLPLAPQSQELFAFEWKDPERGISGQLTWTRLPQGFKNSPTLFNEALHRDLTDFRTQHPEVTLLQYVDDLLLAAPTKKACTQGTRHLLQELGEKGYRASAKKAQICQTKVTYLGYILSEGKRWLTPGRIETVARIPPPRNPREVREFLGKAGFCRLFIPGFAELAAPLYALTKPSTPFTWQTEHQLAFEALKKALLSAPALGLPDTSKPFTLFLDERQGIAKGVLTQKLGPWKRPVAYLSKKLDPVAAGWPPCLRIMAATAMLVKDSAKLTLGQPLTVITPHTLEAIVRQPPDRWITNARLTHYQALLLDTDRVQFGPPVTLNPATLLPVPENQPSPHDCRQVLAETHGTREDLKDQELPDADHTWYTDGSSYLDSGTRRAGAAVVDGHNTIWAQSLPPGTSAQKAELIALTKALELSKGKKANIYTDSRYAFATAHTHGSIYERRGWLTSEGKEIKNKAEIIALLKALFLPQEVAIIHCPGHQKGQDPVAVGNRQADRVARQAAMAEVLTLATEPDNTSHITAGKRTADGSEFEKRTADGSEFESPKKKAKVE

SEQ ID NO: 2039 - protein, 2102 aa, synthetic construct
MPAAKRVKLDGGDKKYSIGLDIGTNSVGWAVITDEYKVPSKKFKVLGNTDRHSIKKNLIGALLFDSGETAEATRLKRTARRRYTRRKNRICYLQEIFSNEMAKVDDSFFHRLEESFLVEEDKKHERHPIFGNIVDEVAYHEKYPTIYHLRKKLVDSTDKADLRLIYLALAHMIKFRGHFLIEGDLNPDNSDVDKLFIQLVQTYNQLFEENPINASGVDAKAILSARLSKSRRLENLIAQLPGEKKNGLFGNLIALSLGLTPNFKSNFDLAEDAKLQLSKDTYDDDLDNLLAQIGDQYADLFLAAKNLSDAILLSDILRVNTEITKAPLSASMIKRYDEHHQDLTLLKALVRQQLPEKYKEIFFDQSKNGYAGYIDGGASQEEFYKFIKPILEKMDGTEELLVKLNREDLLRKQRTFDNGSIPHQIHLGELHAILRRQEDFYPFLKDNREKIEKILTFRIPYYVGPLARGNSRFAWMTRKSEETITPWNFEEVVDKGASAQSFIERMTNFDKNLPNEKVLPKHSLLYEYFTVYNELTKVKYVTEGMRKPAFLSGEQKKAIVDLLFKTNRKVTVKQLKEDYFKKIECFDSVEISGVEDRFNASLGTYHDLLKIIKDKDFLDNEENEDILEDIVLTLTLFEDREMIEERLKTYAHLFDDKVMKQLKRRRYTGWGRLSRKLINGIRDKQSGKTILDFLKSDGFANRNFMQLIHDDSLTFKEDIQKAQVSGQGDSLHEHIANLAGSPAIKKGILQTVKVVDELVKVMGRHKPENIVIEMARENQTTQKGQKNSRERMKRIEEGIKELGSQILKEHPVENTQLQNEKLYLYYLQNGRDMYVDQELDINRLSDYDVDHIVPQSFLKDDSIDNKVLTRSDKARGKSDNVPSEEVVKKMKNYWRQLLNAKLITQRKFDNLTKAERGGLSELDKAGFIKRQLVETRQITKHVAQILDSRMNTKYDENDKLIREVKVITLKSKLVSDFRKDFQFYKVREINNYHHAHDAYLNAVVGTALIKKYPKLESEFVYGDYKVYDVRKMIAKSEQEIGKATAKYFFYSNIMNFFKTEITLANGEIRKRPLIETNGETGEIVWDKGRDFATVRKVLSMPQVNIVKKTEVQTGGFSKESILPKRNSDKLIARKKDWDPKKYGGFDSPTVAYSVLVVAKVEKGKSKKLKSVKELLGITIMERSSFEKNPIDFLEAKGYKEVKKDLIIKLPKYSLFELENGRKRMLASAGELQKGNELALPSKYVNFLYLASHYEKLKGSPEDNEQKQLFVEQHKHYLDEIIEQISEFSKRVILADANLDKVLSAYNKHRDKPIREQAENIIHLFTLTNLGAPAAFKYFDTTIDRKRYTSTKEVLDATLIHQSITGLYETRIDLSQLGGDGGEAAAKGSSPAPGGTVSLQDEHRLFDIPVTTSLPDVWLQDFPQAWAETGGLGRAKCQAPIIIDLKPTAVPVSIKQYPMSLEAHMGIRQHIIKFLELGVLRPCRSPWNTPLLPVKKPGTQDYRPVQDLREINKRTVDIHPTVPNPYNLLSTLKPDYSWYTVLDLKDAFFCLPLAPQSQELFAFEWKDPERGISGQLTWTRLPQGFKNSPTLFNEALHRDLTDFRTQHPEVTLLQYVDDLLLAAPTKKACTQGTRHLLQELGEKGYRASAKKAQICQTKVTYLGYILSEGKRWLTPGRIETVARIPPPRNPREVREFLGKAGFCRLFIPGFAELAAPLYALTKPSTPFTWQTEHQLAFEALKKALLSAPALGLPDTSKPFTLFLDERQGIAKGVLTQKLGPWKRPVAYLSKKLDPVAAGWPPCLRIMAATAMLVKDSAKLTLGQPLTVITPHTLEAIVRQPPDRWITNARLTHYQALLLDTDRVQFGPPVTLNPATLLPVPENQPSPHDCRQVLAETHGTREDLKDQELPDADHTWYTDGSSYLDSGTRRAGAAVVDGHNTIWAQSLPPGTSAQKAELIALTKALELSKGKKANIYTDSRYAFATAHTHGSIYERRGWLTSEGKEIKNKAEIIALLKALFLPQEVAIIHCPGHQKGQDPVAVGNRQADRVARQAAMAEVLTLATEPDNTSHITAGKRTADGSEFEKRTADGSEFESPKKKAKVE

SEQ ID NO: 2040 - protein, 2102 aa, synthetic construct
MPAAKRVKLDGGDKKYSIGLDIGTNSVGWAVITDEYKVPSKKFKVLGNTDRHSIKKNLIGALLFDSGETAEATRLKRTARRRYTRRKNRICYLQEIFSNEMAKVDDSFFHRLEESFLVEEDKKHERHPIFGNIVDEVAYHEKYPTIYHLRKKLVDSTDKADLRLIYLALAHMIKFRGHFLIEGDLNPDNSDVDKLFIQLVQTYNQLFEENPINASGVDAKAILSARLSKSRRLENLIAQLPGEKKNGLFGNLIALSLGLTPNFKSNFDLAEDAKLQLSKDTYDDDLDNLLAQIGDQYADLFLAAKNLSDAILLSDILRVNTEITKAPLSASMIKRYDEHHQDLTLLKALVRQQLPEKYKEIFFDQSKNGYAGYIDGGASQEEFYKFIKPILEKMDGTEELLVKLNREDLLRKQRTFDNGSIPHQIHLGELHAILRRQEDFYPFLKDNREKIEKILTFRIPYYVGPLARGNSRFAWMTRKSEETITPWNFEEVVDKGASAQSFIERMTNFDKNLPNEKVLPKHSLLYEYFTVYNELTKVKYVTEGMRKPAFLSGEQKKAIVDLLFKTNRKVTVKQLKEDYFKKIECFDSVEISGVEDRFNASLGTYHDLLKIIKDKDFLDNEENEDILEDIVLTLTLFEDREMIEERLKTYAHLFDDKVMKQLKRRRYTGWGRLSRKLINGIRDKQSGKTILDFLKSDGFANRNFMQLIHDDSLTFKEDIQKAQVSGQGDSLHEHIANLAGSPAIKKGILQTVKVVDELVKVMGRHKPENIVIEMARENQTTQKGQKNSRERMKRIEEGIKELGSQILKEHPVENTQLQNEKLYLYYLQNGRDMYVDQELDINRLSDYDVDHIVPQSFLKDDSIDNKVLTRSDKARGKSDNVPSEEVVKKMKNYWRQLLNAKLITQRKFDNLTKAERGGLSELDKAGFIKRQLVETRQITKHVAQILDSRMNTKYDENDKLIREVKVITLKSKLVSDFRKDFQFYKVREINNYHHAHDAYLNAVVGTALIKKYPKLESEFVYGDYKVYDVRKMIAKSEQEIGKATAKYFFYSNIMNFFKTEITLANGEIRKRPLIETNGETGEIVWDKGRDFATVRKVLSMPQVNIVKKTEVQTGGFSKESILPKRNSDKLIARKKDWDPKKYGGFDSPTVAYSVLVVAKVEKGKSKKLKSVKELLGITIMERSSFEKNPIDFLEAKGYKEVKKDLIIKLPKYSLFELENGRKRMLASAGELQKGNELALPSKYVNFLYLASHYEKLKGSPEDNEQKQLFVEQHKHYLDEIIEQISEFSKRVILADANLDKVLSAYNKHRDKPIREQAENIIHLFTLTNLGAPAAFKYFDTTIDRKRYTSTKEVLDATLIHQSITGLYETRIDLSQLGGDGGPAPEAAAKGSSGGTVSLQDEHRLFDIPVTTSLPDVWLQDFPQAWAETGGLGRAKCQAPIIIDLKPTAVPVSIKQYPMSLEAHMGIRQHIIKFLELGVLRPCRSPWNTPLLPVKKPGTQDYRPVQDLREINKRTVDIHPTVPNPYNLLSTLKPDYSWYTVLDLKDAFFCLPLAPQSQELFAFEWKDPERGISGQLTWTRLPQGFKNSPTLFNEALHRDLTDFRTQHPEVTLLQYVDDLLLAAPTKKACTQGTRHLLQELGEKGYRASAKKAQICQTKVTYLGYILSEGKRWLTPGRIETVARIPPPRNPREVREFLGKAGFCRLFIPGFAELAAPLYALTKPSTPFTWQTEHQLAFEALKKALLSAPALGLPDTSKPFTLFLDERQGIAKGVLTQKLGPWKRPVAYLSKKLDPVAAGWPPCLRIMAATAMLVKDSAKLTLGQPLTVITPHTLEAIVRQPPDRWITNARLTHYQALLLDTDRVQFGPPVTLNPATLLPVPENQPSPHDCRQVLAETHGTREDLKDQELPDADHTWYTDGSSYLDSGTRRAGAAVVDGHNTIWAQSLPPGTSAQKAELIALTKALELSKGKKANIYTDSRYAFATAHTHGSIYERRGWLTSEGKEIKNKAEIIALLKALFLPQEVAIIHCPGHQKGQDPVAVGNRQADRVARQAAMAEVLTLATEPDNTSHITAGKRTADGSEFEKRTADGSEFESPKKKAKVE

SEQ ID NO: 2041 - protein, 2102 aa, synthetic construct
MPAAKRVKLDGGDKKYSIGLDIGTNSVGWAVITDEYKVPSKKFKVLGNTDRHSIKKNLIGALLFDSGETAEATRLKRTARRRYTRRKNRICYLQEIFSNEMAKVDDSFFHRLEESFLVEEDKKHERHPIFGNIVDEVAYHEKYPTIYHLRKKLVDSTDKADLRLIYLALAHMIKFRGHFLIEGDLNPDNSDVDKLFIQLVQTYNQLFEENPINASGVDAKAILSARLSKSRRLENLIAQLPGEKKNGLFGNLIALSLGLTPNFKSNFDLAEDAKLQLSKDTYDDDLDNLLAQIGDQYADLFLAAKNLSDAILLSDILRVNTEITKAPLSASMIKRYDEHHQDLTLLKALVRQQLPEKYKEIFFDQSKNGYAGYIDGGASQEEFYKFIKPILEKMDGTEELLVKLNREDLLRKQRTFDNGSIPHQIHLGELHAILRRQEDFYPFLKDNREKIEKILTFRIPYYVGPLARGNSRFAWMTRKSEETITPWNFEEVVDKGASAQSFIERMTNFDKNLPNEKVLPKHSLLYEYFTVYNELTKVKYVTEGMRKPAFLSGEQKKAIVDLLFKTNRKVTVKQLKEDYFKKIECFDSVEISGVEDRFNASLGTYHDLLKIIKDKDFLDNEENEDILEDIVLTLTLFEDREMIEERLKTYAHLFDDKVMKQLKRRRYTGWGRLSRKLINGIRDKQSGKTILDFLKSDGFANRNFMQLIHDDSLTFKEDIQKAQVSGQGDSLHEHIANLAGSPAIKKGILQTVKVVDELVKVMGRHKPENIVIEMARENQTTQKGQKNSRERMKRIEEGIKELGSQILKEHPVENTQLQNEKLYLYYLQNGRDMYVDQELDINRLSDYDVDHIVPQSFLKDDSIDNKVLTRSDKARGKSDNVPSEEVVKKMKNYWRQLLNAKLITQRKFDNLTKAERGGLSELDKAGFIKRQLVETRQITKHVAQILDSRMNTKYDENDKLIREVKVITLKSKLVSDFRKDFQFYKVREINNYHHAHDAYLNAVVGTALIKKYPKLESEFVYGDYKVYDVRKMIAKSEQEIGKATAKYFFYSNIMNFFKTEITLANGEIRKRPLIETNGETGEIVWDKGRDFATVRKVLSMPQVNIVKKTEVQTGGFSKESILPKRNSDKLIARKKDWDPKKYGGFDSPTVAYSVLVVAKVEKGKSKKLKSVKELLGITIMERSSFEKNPIDFLEAKGYKEVKKDLIIKLPKYSLFELENGRKRMLASAGELQKGNELALPSKYVNFLYLASHYEKLKGSPEDNEQKQLFVEQHKHYLDEIIEQISEFSKRVILADANLDKVLSAYNKHRDKPIREQAENIIHLFTLTNLGAPAAFKYFDTTIDRKRYTSTKEVLDATLIHQSITGLYETRIDLSQLGGDGGEAAAKGGGPAPGGTVSLQDEHRLFDIPVTTSLPDVWLQDFPQAWAETGGLGRAKCQAPIIIDLKPTAVPVSIKQYPMSLEAHMGIRQHIIKFLELGVLRPCRSPWNTPLLPVKKPGTQDYRPVQDLREINKRTVDIHPTVPNPYNLLSTLKPDYSWYTVLDLKDAFFCLPLAPQSQELFAFEWKDPERGISGQLTWTRLPQGFKNSPTLFNEALHRDLTDFRTQHPEVTLLQYVDDLLLAAPTKKACTQGTRHLLQELGEKGYRASAKKAQICQTKVTYLGYILSEGKRWLTPGRIETVARIPPPRNPREVREFLGKAGFCRLFIPGFAELAAPLYALTKPSTPFTWQTEHQLAFEALKKALLSAPALGLPDTSKPFTLFLDERQGIAKGVLTQKLGPWKRPVAYLSKKLDPVAAGWPPCLRIMAATAMLVKDSAKLTLGQPLTVITPHTLEAIVRQPPDRWITNARLTHYQALLLDTDRVQFGPPVTLNPATLLPVPENQPSPHDCRQVLAETHGTREDLKDQELPDADHTWYTDGSSYLDSGTRRAGAAVVDGHNTIWAQSLPPGTSAQKAELIALTKALELSKGKKANIYTDSRYAFATAHTHGSIYERRGWLTSEGKEIKNKAEIIALLKALFLPQEVAIIHCPGHQKGQDPVAVGNRQADRVARQAAMAEVLTLATEPDNTSHITAGKRTADGSEFEKRTADGSEFESPKKKAKVE

SEQ ID NO: 2042 - protein, 2100 aa, synthetic construct
MPAAKRVKLDGGDKKYSIGLDIGTNSVGWAVITDEYKVPSKKFKVLGNTDRHSIKKNLIGALLFDSGETAEATRLKRTARRRYTRRKNRICYLQEIFSNEMAKVDDSFFHRLEESFLVEEDKKHERHPIFGNIVDEVAYHEKYPTIYHLRKKLVDSTDKADLRLIYLALAHMIKFRGHFLIEGDLNPDNSDVDKLFIQLVQTYNQLFEENPINASGVDAKAILSARLSKSRRLENLIAQLPGEKKNGLFGNLIALSLGLTPNFKSNFDLAEDAKLQLSKDTYDDDLDNLLAQIGDQYADLFLAAKNLSDAILLSDILRVNTEITKAPLSASMIKRYDEHHQDLTLLKALVRQQLPEKYKEIFFDQSKNGYAGYIDGGASQEEFYKFIKPILEKMDGTEELLVKLNREDLLRKQRTFDNGSIPHQIHLGELHAILRRQEDFYPFLKDNREKIEKILTFRIPYYVGPLARGNSRFAWMTRKSEETITPWNFEEVVDKGASAQSFIERMTNFDKNLPNEKVLPKHSLLYEYFTVYNELTKVKYVTEGMRKPAFLSGEQKKAIVDLLFKTNRKVTVKQLKEDYFKKIECFDSVEISGVEDRFNASLGTYHDLLKIIKDKDFLDNEENEDILEDIVLTLTLFEDREMIEERLKTYAHLFDDKVMKQLKRRRYTGWGRLSRKLINGIRDKQSGKTILDFLKSDGFANRNFMQLIHDDSLTFKEDIQKAQVSGQGDSLHEHIANLAGSPAIKKGILQTVKVVDELVKVMGRHKPENIVIEMARENQTTQKGQKNSRERMKRIEEGIKELGSQILKEHPVENTQLQNEKLYLYYLQNGRDMYVDQELDINRLSDYDVDHIVPQSFLKDDSIDNKVLTRSDKARGKSDNVPSEEVVKKMKNYWRQLLNAKLITQRKFDNLTKAERGGLSELDKAGFIKRQLVETRQITKHVAQILDSRMNTKYDENDKLIREVKVITLKSKLVSDFRKDFQFYKVREINNYHHAHDAYLNAVVGTALIKKYPKLESEFVYGDYKVYDVRKMIAKSEQEIGKATAKYFFYSNIMNFFKTEITLANGEIRKRPLIETNGETGEIVWDKGRDFATVRKVLSMPQVNIVKKTEVQTGGFSKESILPKRNSDKLIARKKDWDPKKYGGFDSPTVAYSVLVVAKVEKGKSKKLKSVKELLGITIMERSSFEKNPIDFLEAKGYKEVKKDLIIKLPKYSLFELENGRKRMLASAGELQKGNELALPSKYVNFLYLASHYEKLKGSPEDNEQKQLFVEQHKHYLDEIIEQISEFSKRVILADANLDKVLSAYNKHRDKPIREQAENIIHLFTLTNLGAPAAFKYFDTTIDRKRYTSTKEVLDATLIHQSITGLYETRIDLSQLGGDGGGSSGSSGSSGGTVSLQDEHRLFDIPVTTSLPDVWLQDFPQAWAETGGLGRAKCQAPIIIDLKPTAVPVSIKQYPMSLEAHMGIRQHIIKFLELGVLRPCRSPWNTPLLPVKKPGTQDYRPVQDLREINKRTVDIHPTVPNPYNLLSTLKPDYSWYTVLDLKDAFFCLPLAPQSQELFAFEWKDPERGISGQLTWTRLPQGFKNSPTLFNEALHRDLTDFRTQHPEVTLLQYVDDLLLAAPTKKACTQGTRHLLQELGEKGYRASAKKAQICQTKVTYLGYILSEGKRWLTPGRIETVARIPPPRNPREVREFLGKAGFCRLFIPGFAELAAPLYALTKPSTPFTWQTEHQLAFEALKKALLSAPALGLPDTSKPFTLFLDERQGIAKGVLTQKLGPWKRPVAYLSKKLDPVAAGWPPCLRIMAATAMLVKDSAKLTLGQPLTVITPHTLEAIVRQPPDRWITNARLTHYQALLLDTDRVQFGPPVTLNPATLLPVPENQPSPHDCRQVLAETHGTREDLKDQELPDADHTWYTDGSSYLDSGTRRAGAAVVDGHNTIWAQSLPPGTSAQKAELIALTKALELSKGKKANIYTDSRYAFATAHTHGSIYERRGWLTSEGKEIKNKAEIIALLKALFLPQEVAIIHCPGHQKGQDPVAVGNRQADRVARQAAMAEVLTLATEPDNTSHITAGKRTADGSEFEKRTADGSEFESPKKKAKVE

SEQ ID NO: 2043 - protein, 2106 aa, synthetic construct
MPAAKRVKLDGGDKKYSIGLDIGTNSVGWAVITDEYKVPSKKFKVLGNTDRHSIKKNLIGALLFDSGETAEATRLKRTARRRYTRRKNRICYLQEIFSNEMAKVDDSFFHRLEESFLVEEDKKHERHPIFGNIVDEVAYHEKYPTIYHLRKKLVDSTDKADLRLIYLALAHMIKFRGHFLIEGDLNPDNSDVDKLFIQLVQTYNQLFEENPINASGVDAKAILSARLSKSRRLENLIAQLPGEKKNGLFGNLIALSLGLTPNFKSNFDLAEDAKLQLSKDTYDDDLDNLLAQIGDQYADLFLAAKNLSDAILLSDILRVNTEITKAPLSASMIKRYDEHHQDLTLLKALVRQQLPEKYKEIFFDQSKNGYAGYIDGGASQEEFYKFIKPILEKMDGTEELLVKLNREDLLRKQRTFDNGSIPHQIHLGELHAILRRQEDFYPFLKDNREKIEKILTFRIPYYVGPLARGNSRFAWMTRKSEETITPWNFEEVVDKGASAQSFIERMTNFDKNLPNEKVLPKHSLLYEYFTVYNELTKVKYVTEGMRKPAFLSGEQKKAIVDLLFKTNRKVTVKQLKEDYFKKIECFDSVEISGVEDRFNASLGTYHDLLKIIKDKDFLDNEENEDILEDIVLTLTLFEDREMIEERLKTYAHLFDDKVMKQLKRRRYTGWGRLSRKLINGIRDKQSGKTILDFLKSDGFANRNFMQLIHDDSLTFKEDIQKAQVSGQGDSLHEHIANLAGSPAIKKGILQTVKVVDELVKVMGRHKPENIVIEMARENQTTQKGQKNSRERMKRIEEGIKELGSQILKEHPVENTQLQNEKLYLYYLQNGRDMYVDQELDINRLSDYDVDHIVPQSFLKDDSIDNKVLTRSDKARGKSDNVPSEEVVKKMKNYWRQLLNAKLITQRKFDNLTKAERGGLSELDKAGFIKRQLVETRQITKHVAQILDSRMNTKYDENDKLIREVKVITLKSKLVSDFRKDFQFYKVREINNYHHAHDAYLNAVVGTALIKKYPKLESEFVYGDYKVYDVRKMIAKSEQEIGKATAKYFFYSNIMNFFKTEITLANGEIRKRPLIETNGETGEIVWDKGRDFATVRKVLSMPQVNIVKKTEVQTGGFSKESILPKRNSDKLIARKKDWDPKKYGGFDSPTVAYSVLVVAKVEKGKSKKLKSVKELLGITIMERSSFEKNPIDFLEAKGYKEVKKDLIIKLPKYSLFELENGRKRMLASAGELQKGNELALPSKYVNFLYLASHYEKLKGSPEDNEQKQLFVEQHKHYLDEIIEQISEFSKRVILADANLDKVLSAYNKHRDKPIREQAENIIHLFTLTNLGAPAAFKYFDTTIDRKRYTSTKEVLDATLIHQSITGLYETRIDLSQLGGDGGEAAAKEAAAKEAAAKGGTVSLQDEHRLFDIPVTTSLPDVWLQDFPQAWAETGGLGRAKCQAPIIIDLKPTAVPVSIKQYPMSLEAHMGIRQHIIKFLELGVLRPCRSPWNTPLLPVKKPGTQDYRPVQDLREINKRTVDIHPTVPNPYNLLSTLKPDYSWYTVLDLKDAFFCLPLAPQSQELFAFEWKDPERGISGQLTWTRLPQGFKNSPTLFNEALHRDLTDFRTQHPEVTLLQYVDDLLLAAPTKKACTQGTRHLLQELGEKGYRASAKKAQICQTKVTYLGYILSEGKRWLTPGRIETVARIPPPRNPREVREFLGKAGFCRLFIPGFAELAAPLYALTKPSTPFTWQTEHQLAFEALKKALLSAPALGLPDTSKPFTLFLDERQGIAKGVLTQKLGPWKRPVAYLSKKLDPVAAGWPPCLRIMAATAMLVKDSAKLTLGQPLTVITPHTLEAIVRQPPDRWITNARLTHYQALLLDTDRVQFGPPVTLNPATLLPVPENQPSPHDCRQVLAETHGTREDLKDQELPDADHTWYTDGSSYLDSGTRRAGAAVVDGHNTIWAQSLPPGTSAQKAELIALTKALELSKGKKANIYTDSRYAFATAHTHGSIYERRGWLTSEGKEIKNKAEIIALLKALFLPQEVAIIHCPGHQKGQDPVAVGNRQADRVARQAAMAEVLTLATEPDNTSHITAGKRTADGSEFEKRTADGSEFESPKKKAKVE

SEQ ID NO: 2044 - protein, 2102 aa, synthetic construct
MPAAKRVKLDGGDKKYSIGLDIGTNSVGWAVITDEYKVPSKKFKVLGNTDRHSIKKNLIGALLFDSGETAEATRLKRTARRRYTRRKNRICYLQEIFSNEMAKVDDSFFHRLEESFLVEEDKKHERHPIFGNIVDEVAYHEKYPTIYHLRKKLVDSTDKADLRLIYLALAHMIKFRGHFLIEGDLNPDNSDVDKLFIQLVQTYNQLFEENPINASGVDAKAILSARLSKSRRLENLIAQLPGEKKNGLFGNLIALSLGLTPNFKSNFDLAEDAKLQLSKDTYDDDLDNLLAQIGDQYADLFLAAKNLSDAILLSDILRVNTEITKAPLSASMIKRYDEHHQDLTLLKALVRQQLPEKYKEIFFDQSKNGYAGYIDGGASQEEFYKFIKPILEKMDGTEELLVKLNREDLLRKQRTFDNGSIPHQIHLGELHAILRRQEDFYPFLKDNREKIEKILTFRIPYYVGPLARGNSRFAWMTRKSEETITPWNFEEVVDKGASAQSFIERMTNFDKNLPNEKVLPKHSLLYEYFTVYNELTKVKYVTEGMRKPAFLSGEQKKAIVDLLFKTNRKVTVKQLKEDYFKKIECFDSVEISGVEDRFNASLGTYHDLLKIIKDKDFLDNEENEDILEDIVLTLTLFEDREMIEERLKTYAHLFDDKVMKQLKRRRYTGWGRLSRKLINGIRDKQSGKTILDFLKSDGFANRNFMQLIHDDSLTFKEDIQKAQVSGQGDSLHEHIANLAGSPAIKKGILQTVKVVDELVKVMGRHKPENIVIEMARENQTTQKGQKNSRERMKRIEEGIKELGSQILKEHPVENTQLQNEKLYLYYLQNGRDMYVDQELDINRLSDYDVDHIVPQSFLKDDSIDNKVLTRSDKARGKSDNVPSEEVVKKMKNYWRQLLNAKLITQRKFDNLTKAERGGLSELDKAGFIKRQLVETRQITKHVAQILDSRMNTKYDENDKLIREVKVITLKSKLVSDFRKDFQFYKVREINNYHHAHDAYLNAVVGTALIKKYPKLESEFVYGDYKVYDVRKMIAKSEQEIGKATAKYFFYSNIMNFFKTEITLANGEIRKRPLIETNGETGEIVWDKGRDFATVRKVLSMPQVNIVKKTEVQTGGFSKESILPKRNSDKLIARKKDWDPKKYGGFDSPTVAYSVLVVAKVEKGKSKKLKSVKELLGITIMERSSFEKNPIDFLEAKGYKEVKKDLIIKLPKYSLFELENGRKRMLASAGELQKGNELALPSKYVNFLYLASHYEKLKGSPEDNEQKQLFVEQHKHYLDEIIEQISEFSKRVILADANLDKVLSAYNKHRDKPIREQAENIIHLFTLTNLGAPAAFKYFDTTIDRKRYTSTKEVLDATLIHQSITGLYETRIDLSQLGGDGGPAPEAAAKGGSGGTVSLQDEHRLFDIPVTTSLPDVWLQDFPQAWAETGGLGRAKCQAPIIIDLKPTAVPVSIKQYPMSLEAHMGIRQHIIKFLELGVLRPCRSPWNTPLLPVKKPGTQDYRPVQDLREINKRTVDIHPTVPNPYNLLSTLKPDYSWYTVLDLKDAFFCLPLAPQSQELFAFEWKDPERGISGQLTWTRLPQGFKNSPTLFNEALHRDLTDFRTQHPEVTLLQYVDDLLLAAPTKKACTQGTRHLLQELGEKGYRASAKKAQICQTKVTYLGYILSEGKRWLTPGRIETVARIPPPRNPREVREFLGKAGFCRLFIPGFAELAAPLYALTKPSTPFTWQTEHQLAFEALKKALLSAPALGLPDTSKPFTLFLDERQGIAKGVLTQKLGPWKRPVAYLSKKLDPVAAGWPPCLRIMAATAMLVKDSAKLTLGQPLTVITPHTLEAIVRQPPDRWITNARLTHYQALLLDTDRVQFGPPVTLNPATLLPVPENQPSPHDCRQVLAETHGTREDLKDQELPDADHTWYTDGSSYLDSGTRRAGAAVVDGHNTIWAQSLPPGTSAQKAELIALTKALELSKGKKANIYTDSRYAFATAHTHGSIYERRGWLTSEGKEIKNKAEIIALLKALFLPQEVAIIHCPGHQKGQDPVAVGNRQADRVARQAAMAEVLTLATEPDNTSHITAGKRTADGSEFEKRTADGSEFESPKKKAKVE

SEQ ID NO: 2045 - protein, 2124 aa, synthetic construct
MPAAKRVKLDGGDKKYSIGLDIGTNSVGWAVITDEYKVPSKKFKVLGNTDRHSIKKNLIGALLFDSGETAEATRLKRTARRRYTRRKNRICYLQEIFSNEMAKVDDSFFHRLEESFLVEEDKKHERHPIFGNIVDEVAYHEKYPTIYHLRKKLVDSTDKADLRLIYLALAHMIKFRGHFLIEGDLNPDNSDVDKLFIQLVQTYNQLFEENPINASGVDAKAILSARLSKSRRLENLIAQLPGEKKNGLFGNLIALSLGLTPNFKSNFDLAEDAKLQLSKDTYDDDLDNLLAQIGDQYADLFLAAKNLSDAILLSDILRVNTEITKAPLSASMIKRYDEHHQDLTLLKALVRQQLPEKYKEIFFDQSKNGYAGYIDGGASQEEFYKFIKPILEKMDGTEELLVKLNREDLLRKQRTFDNGSIPHQIHLGELHAILRRQEDFYPFLKDNREKIEKILTFRIPYYVGPLARGNSRFAWMTRKSEETITPWNFEEVVDKGASAQSFIERMTNFDKNLPNEKVLPKHSLLYEYFTVYNELTKVKYVTEGMRKPAFLSGEQKKAIVDLLFKTNRKVTVKQLKEDYFKKIECFDSVEISGVEDRFNASLGTYHDLLKIIKDKDFLDNEENEDILEDIVLTLTLFEDREMIEERLKTYAHLFDDKVMKQLKRRRYTGWGRLSRKLINGIRDKQSGKTILDFLKSDGFANRNFMQLIHDDSLTFKEDIQKAQVSGQGDSLHEHIANLAGSPAIKKGILQTVKVVDELVKVMGRHKPENIVIEMARENQTTQKGQKNSRERMKRIEEGIKELGSQILKEHPVENTQLQNEKLYLYYLQNGRDMYVDQELDINRLSDYDVDHIVPQSFLKDDSIDNKVLTRSDKARGKSDNVPSEEVVKKMKNYWRQLLNAKLITQRKFDNLTKAERGGLSELDKAGFIKRQLVETRQITKHVAQILDSRMNTKYDENDKLIREVKVITLKSKLVSDFRKDFQFYKVREINNYHHAHDAYLNAVVGTALIKKYPKLESEFVYGDYKVYDVRKMIAKSEQEIGKATAKYFFYSNIMNFFKTEITLANGEIRKRPLIETNGETGEIVWDKGRDFATVRKVLSMPQVNIVKKTEVQTGGFSKESILPKRNSDKLIARKKDWDPKKYGGFDSPTVAYSVLVVAKVEKGKSKKLKSVKELLGITIMERSSFEKNPIDFLEAKGYKEVKKDLIIKLPKYSLFELENGRKRMLASAGELQKGNELALPSKYVNFLYLASHYEKLKGSPEDNEQKQLFVEQHKHYLDEIIEQISEFSKRVILADANLDKVLSAYNKHRDKPIREQAENIIHLFTLTNLGAPAAFKYFDTTIDRKRYTSTKEVLDATLIHQSITGLYETRIDLSQLGGDGGSGGSSGGSSGSETPGTSESATPESSGGSSGGSSGGTVSLQDEHRLFDIPVTTSLPDVWLQDFPQAWAETGGLGRAKCQAPIIIDLKPTAVPVSIKQYPMSLEAHMGIRQHIIKFLELGVLRPCRSPWNTPLLPVKKPGTQDYRPVQDLREINKRTVDIHPTVPNPYNLLSTLKPDYSWYTVLDLKDAFFCLPLAPQSQELFAFEWKDPERGISGQLTWTRLPQGFKNSPTLFNEALHRDLTDFRTQHPEVTLLQYVDDLLLAAPTKKACTQGTRHLLQELGEKGYRASAKKAQICQTKVTYLGYILSEGKRWLTPGRIETVARIPPPRNPREVREFLGKAGFCRLFIPGFAELAAPLYALTKPSTPFTWQTEHQLAFEALKKALLSAPALGLPDTSKPFTLFLDERQGIAKGVLTQKLGPWKRPVAYLSKKLDPVAAGWPPCLRIMAATAMLVKDSAKLTLGQPLTVITPHTLEAIVRQPPDRWITNARLTHYQALLLDTDRVQFGPPVTLNPATLLPVPENQPSPHDCRQVLAETHGTREDLKDQELPDADHTWYTDGSSYLDSGTRRAGAAVVDGHNTIWAQSLPPGTSAQKAELIALTKALELSKGKKANIYTDSRYAFATAHTHGSIYERRGWLTSEGKEIKNKAEIIALLKALFLPQEVAIIHCPGHQKGQDPVAVGNRQADRVARQAAMAEVLTLATEPDNTSHITAGKRTADGSEFEKRTADGSEFESPKKKAKVE

SEQ ID NO: 2046 - protein, 2102 aa, synthetic construct
MPAAKRVKLDGGDKKYSIGLDIGTNSVGWAVITDEYKVPSKKFKVLGNTDRHSIKKNLIGALLFDSGETAEATRLKRTARRRYTRRKNRICYLQEIFSNEMAKVDDSFFHRLEESFLVEEDKKHERHPIFGNIVDEVAYHEKYPTIYHLRKKLVDSTDKADLRLIYLALAHMIKFRGHFLIEGDLNPDNSDVDKLFIQLVQTYNQLFEENPINASGVDAKAILSARLSKSRRLENLIAQLPGEKKNGLFGNLIALSLGLTPNFKSNFDLAEDAKLQLSKDTYDDDLDNLLAQIGDQYADLFLAAKNLSDAILLSDILRVNTEITKAPLSASMIKRYDEHHQDLTLLKALVRQQLPEKYKEIFFDQSKNGYAGYIDGGASQEEFYKFIKPILEKMDGTEELLVKLNREDLLRKQRTFDNGSIPHQIHLGELHAILRRQEDFYPFLKDNREKIEKILTFRIPYYVGPLARGNSRFAWMTRKSEETITPWNFEEVVDKGASAQSFIERMTNFDKNLPNEKVLPKHSLLYEYFTVYNELTKVKYVTEGMRKPAFLSGEQKKAIVDLLFKTNRKVTVKQLKEDYFKKIECFDSVEISGVEDRFNASLGTYHDLLKIIKDKDFLDNEENEDILEDIVLTLTLFEDREMIEERLKTYAHLFDDKVMKQLKRRRYTGWGRLSRKLINGIRDKQSGKTILDFLKSDGFANRNFMQLIHDDSLTFKEDIQKAQVSGQGDSLHEHIANLAGSPAIKKGILQTVKVVDELVKVMGRHKPENIVIEMARENQTTQKGQKNSRERMKRIEEGIKELGSQILKEHPVENTQLQNEKLYLYYLQNGRDMYVDQELDINRLSDYDVDHIVPQSFLKDDSIDNKVLTRSDKARGKSDNVPSEEVVKKMKNYWRQLLNAKLITQRKFDNLTKAERGGLSELDKAGFIKRQLVETRQITKHVAQILDSRMNTKYDENDKLIREVKVITLKSKLVSDFRKDFQFYKVREINNYHHAHDAYLNAVVGTALIKKYPKLESEFVYGDYKVYDVRKMIAKSEQEIGKATAKYFFYSNIMNFFKTEITLANGEIRKRPLIETNGETGEIVWDKGRDFATVRKVLSMPQVNIVKKTEVQTGGFSKESILPKRNSDKLIARKKDWDPKKYGGFDSPTVAYSVLVVAKVEKGKSKKLKSVKELLGITIMERSSFEKNPIDFLEAKGYKEVKKDLIIKLPKYSLFELENGRKRMLASAGELQKGNELALPSKYVNFLYLASHYEKLKGSPEDNEQKQLFVEQHKHYLDEIIEQISEFSKRVILADANLDKVLSAYNKHRDKPIREQAENIIHLFTLTNLGAPAAFKYFDTTIDRKRYTSTKEVLDATLIHQSITGLYETRIDLSQLGGDGGGGSEAAAKGSSGGTVSLQDEHRLFDIPVTTSLPDVWLQDFPQAWAETGGLGRAKCQAPIIIDLKPTAVPVSIKQYPMSLEAHMGIRQHIIKFLELGVLRPCRSPWNTPLLPVKKPGTQDYRPVQDLREINKRTVDIHPTVPNPYNLLSTLKPDYSWYTVLDLKDAFFCLPLAPQSQELFAFEWKDPERGISGQLTWTRLPQGFKNSPTLFNEALHRDLTDFRTQHPEVTLLQYVDDLLLAAPTKKACTQGTRHLLQELGEKGYRASAKKAQICQTKVTYLGYILSEGKRWLTPGRIETVARIPPPRNPREVREFLGKAGFCRLFIPGFAELAAPLYALTKPSTPFTWQTEHQLAFEALKKALLSAPALGLPDTSKPFTLFLDERQGIAKGVLTQKLGPWKRPVAYLSKKLDPVAAGWPPCLRIMAATAMLVKDSAKLTLGQPLTVITPHTLEAIVRQPPDRWITNARLTHYQALLLDTDRVQFGPPVTLNPATLLPVPENQPSPHDCRQVLAETHGTREDLKDQELPDADHTWYTDGSSYLDSGTRRAGAAVVDGHNTIWAQSLPPGTSAQKAELIALTKALELSKGKKANIYTDSRYAFATAHTHGSIYERRGWLTSEGKEIKNKAEIIALLKALFLPQEVAIIHCPGHQKGQDPVAVGNRQADRVARQAAMAEVLTLATEPDNTSHITAGKRTADGSEFEKRTADGSEFESPKKKAKVE

SEQ ID NO: 2047 - protein, 2097 aa, synthetic construct
MPAAKRVKLDGGDKKYSIGLDIGTNSVGWAVITDEYKVPSKKFKVLGNTDRHSIKKNLIGALLFDSGETAEATRLKRTARRRYTRRKNRICYLQEIFSNEMAKVDDSFFHRLEESFLVEEDKKHERHPIFGNIVDEVAYHEKYPTIYHLRKKLVDSTDKADLRLIYLALAHMIKFRGHFLIEGDLNPDNSDVDKLFIQLVQTYNQLFEENPINASGVDAKAILSARLSKSRRLENLIAQLPGEKKNGLFGNLIALSLGLTPNFKSNFDLAEDAKLQLSKDTYDDDLDNLLAQIGDQYADLFLAAKNLSDAILLSDILRVNTEITKAPLSASMIKRYDEHHQDLTLLKALVRQQLPEKYKEIFFDQSKNGYAGYIDGGASQEEFYKFIKPILEKMDGTEELLVKLNREDLLRKQRTFDNGSIPHQIHLGELHAILRRQEDFYPFLKDNREKIEKILTFRIPYYVGPLARGNSRFAWMTRKSEETITPWNFEEVVDKGASAQSFIERMTNFDKNLPNEKVLPKHSLLYEYFTVYNELTKVKYVTEGMRKPAFLSGEQKKAIVDLLFKTNRKVTVKQLKEDYFKKIECFDSVEISGVEDRFNASLGTYHDLLKIIKDKDFLDNEENEDILEDIVLTLTLFEDREMIEERLKTYAHLFDDKVMKQLKRRRYTGWGRLSRKLINGIRDKQSGKTILDFLKSDGFANRNFMQLIHDDSLTFKEDIQKAQVSGQGDSLHEHIANLAGSPAIKKGILQTVKVVDELVKVMGRHKPENIVIEMARENQTTQKGQKNSRERMKRIEEGIKELGSQILKEHPVENTQLQNEKLYLYYLQNGRDMYVDQELDINRLSDYDVDHIVPQSFLKDDSIDNKVLTRSDKARGKSDNVPSEEVVKKMKNYWRQLLNAKLITQRKFDNLTKAERGGLSELDKAGFIKRQLVETRQITKHVAQILDSRMNTKYDENDKLIREVKVITLKSKLVSDFRKDFQFYKVREINNYHHAHDAYLNAVVGTALIKKYPKLESEFVYGDYKVYDVRKMIAKSEQEIGKATAKYFFYSNIMNFFKTEITLANGEIRKRPLIETNGETGEIVWDKGRDFATVRKVLSMPQVNIVKKTEVQTGGFSKESILPKRNSDKLIARKKDWDPKKYGGFDSPTVAYSVLVVAKVEKGKSKKLKSVKELLGITIMERSSFEKNPIDFLEAKGYKEVKKDLIIKLPKYSLFELENGRKRMLASAGELQKGNELALPSKYVNFLYLASHYEKLKGSPEDNEQKQLFVEQHKHYLDEIIEQISEFSKRVILADANLDKVLSAYNKHRDKPIREQAENIIHLFTLTNLGAPAAFKYFDTTIDRKRYTSTKEVLDATLIHQSITGLYETRIDLSQLGGDGGGSSGGSGGTVSLQDEHRLFDIPVTTSLPDVWLQDFPQAWAETGGLGRAKCQAPIIIDLKPTAVPVSIKQYPMSLEAHMGIRQHIIKFLELGVLRPCRSPWNTPLLPVKKPGTQDYRPVQDLREINKRTVDIHPTVPNPYNLLSTLKPDYSWYTVLDLKDAFFCLPLAPQSQELFAFEWKDPERGISGQLTWTRLPQGFKNSPTLFNEALHRDLTDFRTQHPEVTLLQYVDDLLLAAPTKKACTQGTRHLLQELGEKGYRASAKKAQICQTKVTYLGYILSEGKRWLTPGRIETVARIPPPRNPREVREFLGKAGFCRLFIPGFAELAAPLYALTKPSTPFTWQTEHQLAFEALKKALLSAPALGLPDTSKPFTLFLDERQGIAKGVLTQKLGPWKRPVAYLSKKLDPVAAGWPPCLRIMAATAMLVKDSAKLTLGQPLTVITPHTLEAIVRQPPDRWITNARLTHYQALLLDTDRVQFGPPVTLNPATLLPVPENQPSPHDCRQVLAETHGTREDLKDQELPDADHTWYTDGSSYLDSGTRRAGAAVVDGHNTIWAQSLPPGTSAQKAELIALTKALELSKGKKANIYTDSRYAFATAHTHGSIYERRGWLTSEGKEIKNKAEIIALLKALFLPQEVAIIHCPGHQKGQDPVAVGNRQADRVARQAAMAEVLTLATEPDNTSHITAGKRTADGSEFEKRTADGSEFESPKKKAKVE

SEQ ID NO: 2048 - protein, 2096 aa, synthetic construct
MPAAKRVKLDGGDKKYSIGLDIGTNSVGWAVITDEYKVPSKKFKVLGNTDRHSIKKNLIGALLFDSGETAEATRLKRTARRRYTRRKNRICYLQEIFSNEMAKVDDSFFHRLEESFLVEEDKKHERHPIFGNIVDEVAYHEKYPTIYHLRKKLVDSTDKADLRLIYLALAHMIKFRGHFLIEGDLNPDNSDVDKLFIQLVQTYNQLFEENPINASGVDAKAILSARLSKSRRLENLIAQLPGEKKNGLFGNLIALSLGLTPNFKSNFDLAEDAKLQLSKDTYDDDLDNLLAQIGDQYADLFLAAKNLSDAILLSDILRVNTEITKAPLSASMIKRYDEHHQDLTLLKALVRQQLPEKYKEIFFDQSKNGYAGYIDGGASQEEFYKFIKPILEKMDGTEELLVKLNREDLLRKQRTFDNGSIPHQIHLGELHAILRRQEDFYPFLKDNREKIEKILTFRIPYYVGPLARGNSRFAWMTRKSEETITPWNFEEVVDKGASAQSFIERMTNFDKNLPNEKVLPKHSLLYEYFTVYNELTKVKYVTEGMRKPAFLSGEQKKAIVDLLFKTNRKVTVKQLKEDYFKKIECFDSVEISGVEDRFNASLGTYHDLLKIIKDKDFLDNEENEDILEDIVLTLTLFEDREMIEERLKTYAHLFDDKVMKQLKRRRYTGWGRLSRKLINGIRDKQSGKTILDFLKSDGFANRNFMQLIHDDSLTFKEDIQKAQVSGQGDSLHEHIANLAGSPAIKKGILQTVKVVDELVKVMGRHKPENIVIEMARENQTTQKGQKNSRERMKRIEEGIKELGSQILKEHPVENTQLQNEKLYLYYLQNGRDMYVDQELDINRLSDYDVDHIVPQSFLKDDSIDNKVLTRSDKARGKSDNVPSEEVVKKMKNYWRQLLNAKLITQRKFDNLTKAERGGLSELDKAGFIKRQLVETRQITKHVAQILDSRMNTKYDENDKLIREVKVITLKSKLVSDFRKDFQFYKVREINNYHHAHDAYLNAVVGTALIKKYPKLESEFVYGDYKVYDVRKMIAKSEQEIGKATAKYFFYSNIMNFFKTEITLANGEIRKRPLIETNGETGEIVWDKGRDFATVRKVLSMPQVNIVKKTEVQTGGFSKESILPKRNSDKLIARKKDWDPKKYGGFDSPTVAYSVLVVAKVEKGKSKKLKSVKELLGITIMERSSFEKNPIDFLEAKGYKEVKKDLIIKLPKYSLFELENGRKRMLASAGELQKGNELALPSKYVNFLYLASHYEKLKGSPEDNEQKQLFVEQHKHYLDEIIEQISEFSKRVILADANLDKVLSAYNKHRDKPIREQAENIIHLFTLTNLGAPAAFKYFDTTIDRKRYTSTKEVLDATLIHQSITGLYETRIDLSQLGGDGGPAPGGSEAAAKGGLGIEDEYRLHETSTEPDVSLGSTWLSDFPQAWAETGGMGLAVRQAPLIIPLKATSTPVSIQQYPMSHEARLGIKPHIQRLLDQGILVPCQSPWNTPLLPVKKPGTNDYRPVQDLREVNKRVEDIHPTVPNPYNLLSGLPPSHQWYTVLDLKDAFFCLRLHPTSQPLFAFEWRDPGMGISGQLTWTRLPQGFKNSPTLFNEALHRDLADFRIQHPDLILLQYVDDILLAATSELDCQQGTRALLQTLGDLGYRASAKKAQICQKQVKYLGYLLREGQRWLTEARKETVMGQPVPKTPRQLREFLGKAGFCRLFIPGFAEMAAPLYPLTKPGTLFSWGPDQQKAYQEIKQALLTAPALGLPDLTKPFELFVDEKQGYAKGVLTQKLGPWRRPVAYLSKKLDPVAAGWPPCLRMVAAIAVLTKDAGKLTMGQPLVILAPHAVEALVKQPPDRWLSNARMTHYQAMLLDTDRVQFGPVVALNPATLLPLPEEGAPHDCLEILAETHGTRPDLTDQPIPDADHTWYTDGSSFLQEGQRKAGAAVTTETEVIWAGALPAGTSAQRAELIALTQALKMAEGKRLNVYTDSRYAFATAHIHGEIYRRRGWLTSEGREIKNKSEILALLKALFLPKRLSIIHCLGHQKGDSAEARGNRLADQAAREAAIKTPPDTSTLLIAGKRTADGSEFEKRTADGSEFESPKKKAKVE

SEQ ID NO: 2049 - protein, 2100 aa, synthetic construct
MPAAKRVKLDGGDKKYSIGLDIGTNSVGWAVITDEYKVPSKKFKVLGNTDRHSIKKNLIGALLFDSGETAEATRLKRTARRRYTRRKNRICYLQEIFSNEMAKVDDSFFHRLEESFLVEEDKKHERHPIFGNIVDEVAYHEKYPTIYHLRKKLVDSTDKADLRLIYLALAHMIKFRGHFLIEGDLNPDNSDVDKLFIQLVQTYNQLFEENPINASGVDAKAILSARLSKSRRLENLIAQLPGEKKNGLFGNLIALSLGLTPNFKSNFDLAEDAKLQLSKDTYDDDLDNLLAQIGDQYADLFLAAKNLSDAILLSDILRVNTEITKAPLSASMIKRYDEHHQDLTLLKALVRQQLPEKYKEIFFDQSKNGYAGYIDGGASQEEFYKFIKPILEKMDGTEELLVKLNREDLLRKQRTFDNGSIPHQIHLGELHAILRRQEDFYPFLKDNREKIEKILTFRIPYYVGPLARGNSRFAWMTRKSEETITPWNFEEVVDKGASAQSFIERMTNFDKNLPNEKVLPKHSLLYEYFTVYNELTKVKYVTEGMRKPAFLSGEQKKAIVDLLFKTNRKVTVKQLKEDYFKKIECFDSVEISGVEDRFNASLGTYHDLLKIIKDKDFLDNEENEDILEDIVLTLTLFEDREMIEERLKTYAHLFDDKVMKQLKRRRYTGWGRLSRKLINGIRDKQSGKTILDFLKSDGFANRNFMQLIHDDSLTFKEDIQKAQVSGQGDSLHEHIANLAGSPAIKKGILQTVKVVDELVKVMGRHKPENIVIEMARENQTTQKGQKNSRERMKRIEEGIKELGSQILKEHPVENTQLQNEKLYLYYLQNGRDMYVDQELDINRLSDYDVDHIVPQSFLKDDSIDNKVLTRSDKARGKSDNVPSEEVVKKMKNYWRQLLNAKLITQRKFDNLTKAERGGLSELDKAGFIKRQLVETRQITKHVAQILDSRMNTKYDENDKLIREVKVITLKSKLVSDFRKDFQFYKVREINNYHHAHDAYLNAVVGTALIKKYPKLESEFVYGDYKVYDVRKMIAKSEQEIGKATAKYFFYSNIMNFFKTEITLANGEIRKRPLIETNGETGEIVWDKGRDFATVRKVLSMPQVNIVKKTEVQTGGFSKESILPKRNSDKLIARKKDWDPKKYGGFDSPTVAYSVLVVAKVEKGKSKKLKSVKELLGITIMERSSFEKNPIDFLEAKGYKEVKKDLIIKLPKYSLFELENGRKRMLASAGELQKGNELALPSKYVNFLYLASHYEKLKGSPEDNEQKQLFVEQHKHYLDEIIEQISEFSKRVILADANLDKVLSAYNKHRDKPIREQAENIIHLFTLTNLGAPAAFKYFDTTIDRKRYTSTKEVLDATLIHQSITGLYETRIDLSQLGGDGGEAAAKGGGGSEAAAKGGLGIEDEYRLHETSTEPDVSLGSTWLSDFPQAWAETGGMGLAVRQAPLIIPLKATSTPVSIQQYPMSHEARLGIKPHIQRLLDQGILVPCQSPWNTPLLPVKKPGTNDYRPVQDLREVNKRVEDIHPTVPNPYNLLSGLPPSHQWYTVLDLKDAFFCLRLHPTSQPLFAFEWRDPGMGISGQLTWTRLPQGFKNSPTLFNEALHRDLADFRIQHPDLILLQYVDDILLAATSELDCQQGTRALLQTLGDLGYRASAKKAQICQKQVKYLGYLLREGQRWLTEARKETVMGQPVPKTPRQLREFLGKAGFCRLFIPGFAEMAAPLYPLTKPGTLFSWGPDQQKAYQEIKQALLTAPALGLPDLTKPFELFVDEKQGYAKGVLTQKLGPWRRPVAYLSKKLDPVAAGWPPCLRMVAAIAVLTKDAGKLTMGQPLVILAPHAVEALVKQPPDRWLSNARMTHYQAMLLDTDRVQFGPVVALNPATLLPLPEEGAPHDCLEILAETHGTRPDLTDQPIPDADHTWYTDGSSFLQEGQRKAGAAVTTETEVIWAGALPAGTSAQRAELIALTQALKMAEGKRLNVYTDSRYAFATAHIHGEIYRRRGWLTSEGREIKNKSEILALLKALFLPKRLSIIHCLGHQKGDSAEARGNRLADQAAREAAIKTPPDTSTLLIAGKRTADGSEFEKRTADGSEFESPKKKAKVE

SEQ ID NO: 2050 - protein, 2096 aa, synthetic construct
MPAAKRVKLDGGDKKYSIGLDIGTNSVGWAVITDEYKVPSKKFKVLGNTDRHSIKKNLIGALLFDSGETAEATRLKRTARRRYTRRKNRICYLQEIFSNEMAKVDDSFFHRLEESFLVEEDKKHERHPIFGNIVDEVAYHEKYPTIYHLRKKLVDSTDKADLRLIYLALAHMIKFRGHFLIEGDLNPDNSDVDKLFIQLVQTYNQLFEENPINASGVDAKAILSARLSKSRRLENLIAQLPGEKKNGLFGNLIALSLGLTPNFKSNFDLAEDAKLQLSKDTYDDDLDNLLAQIGDQYADLFLAAKNLSDAILLSDILRVNTEITKAPLSASMIKRYDEHHQDLTLLKALVRQQLPEKYKEIFFDQSKNGYAGYIDGGASQEEFYKFIKPILEKMDGTEELLVKLNREDLLRKQRTFDNGSIPHQIHLGELHAILRRQEDFYPFLKDNREKIEKILTFRIPYYVGPLARGNSRFAWMTRKSEETITPWNFEEVVDKGASAQSFIERMTNFDKNLPNEKVLPKHSLLYEYFTVYNELTKVKYVTEGMRKPAFLSGEQKKAIVDLLFKTNRKVTVKQLKEDYFKKIECFDSVEISGVEDRFNASLGTYHDLLKIIKDKDFLDNEENEDILEDIVLTLTLFEDREMIEERLKTYAHLFDDKVMKQLKRRRYTGWGRLSRKLINGIRDKQSGKTILDFLKSDGFANRNFMQLIHDDSLTFKEDIQKAQVSGQGDSLHEHIANLAGSPAIKKGILQTVKVVDELVKVMGRHKPENIVIEMARENQTTQKGQKNSRERMKRIEEGIKELGSQILKEHPVENTQLQNEKLYLYYLQNGRDMYVDQELDINRLSDYDVDHIVPQSFLKDDSIDNKVLTRSDKARGKSDNVPSEEVVKKMKNYWRQLLNAKLITQRKFDNLTKAERGGLSELDKAGFIKRQLVETRQITKHVAQILDSRMNTKYDENDKLIREVKVITLKSKLVSDFRKDFQFYKVREINNYHHAHDAYLNAVVGTALIKKYPKLESEFVYGDYKVYDVRKMIAKSEQEIGKATAKYFFYSNIMNFFKTEITLANGEIRKRPLIETNGETGEIVWDKGRDFATVRKVLSMPQVNIVKKTEVQTGGFSKESILPKRNSDKLIARKKDWDPKKYGGFDSPTVAYSVLVVAKVEKGKSKKLKSVKELLGITIMERSSFEKNPIDFLEAKGYKEVKKDLIIKLPKYSLFELENGRKRMLASAGELQKGNELALPSKYVNFLYLASHYEKLKGSPEDNEQKQLFVEQHKHYLDEIIEQISEFSKRVILADANLDKVLSAYNKHRDKPIREQAENIIHLFTLTNLGAPAAFKYFDTTIDRKRYTSTKEVLDATLIHQSITGLYETRIDLSQLGGDGGPAPGSSEAAAKGGLGIEDEYRLHETSTEPDVSLGSTWLSDFPQAWAETGGMGLAVRQAPLIIPLKATSTPVSIQQYPMSHEARLGIKPHIQRLLDQGILVPCQSPWNTPLLPVKKPGTNDYRPVQDLREVNKRVEDIHPTVPNPYNLLSGLPPSHQWYTVLDLKDAFFCLRLHPTSQPLFAFEWRDPGMGISGQLTWTRLPQGFKNSPTLFNEALHRDLADFRIQHPDLILLQYVDDILLAATSELDCQQGTRALLQTLGDLGYRASAKKAQICQKQVKYLGYLLREGQRWLTEARKETVMGQPVPKTPRQLREFLGKAGFCRLFIPGFAEMAAPLYPLTKPGTLFSWGPDQQKAYQEIKQALLTAPALGLPDLTKPFELFVDEKQGYAKGVLTQKLGPWRRPVAYLSKKLDPVAAGWPPCLRMVAAIAVLTKDAGKLTMGQPLVILAPHAVEALVKQPPDRWLSNARMTHYQAMLLDTDRVQFGPVVALNPATLLPLPEEGAPHDCLEILAETHGTRPDLTDQPIPDADHTWYTDGSSFLQEGQRKAGAAVTTETEVIWAGALPAGTSAQRAELIALTQALKMAEGKRLNVYTDSRYAFATAHIHGEIYRRRGWLTSEGREIKNKSEILALLKALFLPKRLSIIHCLGHQKGDSAEARGNRLADQAAREAAIKTPPDTSTLLIAGKRTADGSEFEKRTADGSEFESPKKKAKVE

SEQ ID NO: 2051 - protein, 2094 aa, synthetic construct
MPAAKRVKLDGGDKKYSIGLDIGTNSVGWAVITDEYKVPSKKFKVLGNTDRHSIKKNLIGALLFDSGETAEATRLKRTARRRYTRRKNRICYLQEIFSNEMAKVDDSFFHRLEESFLVEEDKKHERHPIFGNIVDEVAYHEKYPTIYHLRKKLVDSTDKADLRLIYLALAHMIKFRGHFLIEGDLNPDNSDVDKLFIQLVQTYNQLFEENPINASGVDAKAILSARLSKSRRLENLIAQLPGEKKNGLFGNLIALSLGLTPNFKSNFDLAEDAKLQLSKDTYDDDLDNLLAQIGDQYADLFLAAKNLSDAILLSDILRVNTEITKAPLSASMIKRYDEHHQDLTLLKALVRQQLPEKYKEIFFDQSKNGYAGYIDGGASQEEFYKFIKPILEKMDGTEELLVKLNREDLLRKQRTFDNGSIPHQIHLGELHAILRRQEDFYPFLKDNREKIEKILTFRIPYYVGPLARGNSRFAWMTRKSEETITPWNFEEVVDKGASAQSFIERMTNFDKNLPNEKVLPKHSLLYEYFTVYNELTKVKYVTEGMRKPAFLSGEQKKAIVDLLFKTNRKVTVKQLKEDYFKKIECFDSVEISGVEDRFNASLGTYHDLLKIIKDKDFLDNEENEDILEDIVLTLTLFEDREMIEERLKTYAHLFDDKVMKQLKRRRYTGWGRLSRKLINGIRDKQSGKTILDFLKSDGFANRNFMQLIHDDSLTFKEDIQKAQVSGQGDSLHEHIANLAGSPAIKKGILQTVKVVDELVKVMGRHKPENIVIEMARENQTTQKGQKNSRERMKRIEEGIKELGSQILKEHPVENTQLQNEKLYLYYLQNGRDMYVDQELDINRLSDYDVDHIVPQSFLKDDSIDNKVLTRSDKARGKSDNVPSEEVVKKMKNYWRQLLNAKLITQRKFDNLTKAERGGLSELDKAGFIKRQLVETRQITKHVAQILDSRMNTKYDENDKLIREVKVITLKSKLVSDFRKDFQFYKVREINNYHHAHDAYLNAVVGTALIKKYPKLESEFVYGDYKVYDVRKMIAKSEQEIGKATAKYFFYSNIMNFFKTEITLANGEIRKRPLIETNGETGEIVWDKGRDFATVRKVLSMPQVNIVKKTEVQTGGFSKESILPKRNSDKLIARKKDWDPKKYGGFDSPTVAYSVLVVAKVEKGKSKKLKSVKELLGITIMERSSFEKNPIDFLEAKGYKEVKKDLIIKLPKYSLFELENGRKRMLASAGELQKGNELALPSKYVNFLYLASHYEKLKGSPEDNEQKQLFVEQHKHYLDEIIEQISEFSKRVILADANLDKVLSAYNKHRDKPIREQAENIIHLFTLTNLGAPAAFKYFDTTIDRKRYTSTKEVLDATLIHQSITGLYETRIDLSQLGGDGGGGSPAPGSSGGLGIEDEYRLHETSTEPDVSLGSTWLSDFPQAWAETGGMGLAVRQAPLIIPLKATSTPVSIQQYPMSHEARLGIKPHIQRLLDQGILVPCQSPWNTPLLPVKKPGTNDYRPVQDLREVNKRVEDIHPTVPNPYNLLSGLPPSHQWYTVLDLKDAFFCLRLHPTSQPLFAFEWRDPGMGISGQLTWTRLPQGFKNSPTLFNEALHRDLADFRIQHPDLILLQYVDDILLAATSELDCQQGTRALLQTLGDLGYRASAKKAQICQKQVKYLGYLLREGQRWLTEARKETVMGQPVPKTPRQLREFLGKAGFCRLFIPGFAEMAAPLYPLTKPGTLFSWGPDQQKAYQEIKQALLTAPALGLPDLTKPFELFVDEKQGYAKGVLTQKLGPWRRPVAYLSKKLDPVAAGWPPCLRMVAAIAVLTKDAGKLTMGQPLVILAPHAVEALVKQPPDRWLSNARMTHYQAMLLDTDRVQFGPVVALNPATLLPLPEEGAPHDCLEILAETHGTRPDLTDQPIPDADHTWYTDGSSFLQEGQRKAGAAVTTETEVIWAGALPAGTSAQRAELIALTQALKMAEGKRLNVYTDSRYAFATAHIHGEIYRRRGWLTSEGREIKNKSEILALLKALFLPKRLSIIHCLGHQKGDSAEARGNRLADQAAREAAIKTPPDTSTLLIAGKRTADGSEFEKRTADGSEFESPKKKAKVE

SEQ ID NO: 2052 - protein, 2096 aa, synthetic construct
MPAAKRVKLDGGDKKYSIGLDIGTNSVGWAVITDEYKVPSKKFKVLGNTDRHSIKKNLIGALLFDSGETAEATRLKRTARRRYTRRKNRICYLQEIFSNEMAKVDDSFFHRLEESFLVEEDKKHERHPIFGNIVDEVAYHEKYPTIYHLRKKLVDSTDKADLRLIYLALAHMIKFRGHFLIEGDLNPDNSDVDKLFIQLVQTYNQLFEENPINASGVDAKAILSARLSKSRRLENLIAQLPGEKKNGLFGNLIALSLGLTPNFKSNFDLAEDAKLQLSKDTYDDDLDNLLAQIGDQYADLFLAAKNLSDAILLSDILRVNTEITKAPLSASMIKRYDEHHQDLTLLKALVRQQLPEKYKEIFFDQSKNGYAGYIDGGASQEEFYKFIKPILEKMDGTEELLVKLNREDLLRKQRTFDNGSIPHQIHLGELHAILRRQEDFYPFLKDNREKIEKILTFRIPYYVGPLARGNSRFAWMTRKSEETITPWNFEEVVDKGASAQSFIERMTNFDKNLPNEKVLPKHSLLYEYFTVYNELTKVKYVTEGMRKPAFLSGEQKKAIVDLLFKTNRKVTVKQLKEDYFKKIECFDSVEISGVEDRFNASLGTYHDLLKIIKDKDFLDNEENEDILEDIVLTLTLFEDREMIEERLKTYAHLFDDKVMKQLKRRRYTGWGRLSRKLINGIRDKQSGKTILDFLKSDGFANRNFMQLIHDDSLTFKEDIQKAQVSGQGDSLHEHIANLAGSPAIKKGILQTVKVVDELVKVMGRHKPENIVIEMARENQTTQKGQKNSRERMKRIEEGIKELGSQILKEHPVENTQLQNEKLYLYYLQNGRDMYVDQELDINRLSDYDVDHIVPQSFLKDDSIDNKVLTRSDKARGKSDNVPSEEVVKKMKNYWRQLLNAKLITQRKFDNLTKAERGGLSELDKAGFIKRQLVETRQITKHVAQILDSRMNTKYDENDKLIREVKVITLKSKLVSDFRKDFQFYKVREINNYHHAHDAYLNAVVGTALIKKYPKLESEFVYGDYKVYDVRKMIAKSEQEIGKATAKYFFYSNIMNFFKTEITLANGEIRKRPLIETNGETGEIVWDKGRDFATVRKVLSMPQVNIVKKTEVQTGGFSKESILPKRNSDKLIARKKDWDPKKYGGFDSPTVAYSVLVVAKVEKGKSKKLKSVKELLGITIMERSSFEKNPIDFLEAKGYKEVKKDLIIKLPKYSLFELENGRKRMLASAGELQKGNELALPSKYVNFLYLASHYEKLKGSPEDNEQKQLFVEQHKHYLDEIIEQISEFSKRVILADANLDKVLSAYNKHRDKPIREQAENIIHLFTLTNLGAPAAFKYFDTTIDRKRYTSTKEVLDATLIHQSITGLYETRIDLSQLGGDGGEAAAKGSSPAPGGLGIEDEYRLHETSTEPDVSLGSTWLSDFPQAWAETGGMGLAVRQAPLIIPLKATSTPVSIQQYPMSHEARLGIKPHIQRLLDQGILVPCQSPWNTPLLPVKKPGTNDYRPVQDLREVNKRVEDIHPTVPNPYNLLSGLPPSHQWYTVLDLKDAFFCLRLHPTSQPLFAFEWRDPGMGISGQLTWTRLPQGFKNSPTLFNEALHRDLADFRIQHPDLILLQYVDDILLAATSELDCQQGTRALLQTLGDLGYRASAKKAQICQKQVKYLGYLLREGQRWLTEARKETVMGQPVPKTPRQLREFLGKAGFCRLFIPGFAEMAAPLYPLTKPGTLFSWGPDQQKAYQEIKQALLTAPALGLPDLTKPFELFVDEKQGYAKGVLTQKLGPWRRPVAYLSKKLDPVAAGWPPCLRMVAAIAVLTKDAGKLTMGQPLVILAPHAVEALVKQPPDRWLSNARMTHYQAMLLDTDRVQFGPVVALNPATLLPLPEEGAPHDCLEILAETHGTRPDLTDQPIPDADHTWYTDGSSFLQEGQRKAGAAVTTETEVIWAGALPAGTSAQRAELIALTQALKMAEGKRLNVYTDSRYAFATAHIHGEIYRRRGWLTSEGREIKNKSEILALLKALFLPKRLSIIHCLGHQKGDSAEARGNRLADQAAREAAIKTPPDTSTLLIAGKRTADGSEFEKRTADGSEFESPKKKAKVE

SEQ ID NO: 2053 - protein, 2088 aa, synthetic construct
MPAAKRVKLDGGDKKYSIGLDIGTNSVGWAVITDEYKVPSKKFKVLGNTDRHSIKKNLIGALLFDSGETAEATRLKRTARRRYTRRKNRICYLQEIFSNEMAKVDDSFFHRLEESFLVEEDKKHERHPIFGNIVDEVAYHEKYPTIYHLRKKLVDSTDKADLRLIYLALAHMIKFRGHFLIEGDLNPDNSDVDKLFIQLVQTYNQLFEENPINASGVDAKAILSARLSKSRRLENLIAQLPGEKKNGLFGNLIALSLGLTPNFKSNFDLAEDAKLQLSKDTYDDDLDNLLAQIGDQYADLFLAAKNLSDAILLSDILRVNTEITKAPLSASMIKRYDEHHQDLTLLKALVRQQLPEKYKEIFFDQSKNGYAGYIDGGASQEEFYKFIKPILEKMDGTEELLVKLNREDLLRKQRTFDNGSIPHQIHLGELHAILRRQEDFYPFLKDNREKIEKILTFRIPYYVGPLARGNSRFAWMTRKSEETITPWNFEEVVDKGASAQSFIERMTNFDKNLPNEKVLPKHSLLYEYFTVYNELTKVKYVTEGMRKPAFLSGEQKKAIVDLLFKTNRKVTVKQLKEDYFKKIECFDSVEISGVEDRFNASLGTYHDLLKIIKDKDFLDNEENEDILEDIVLTLTLFEDREMIEERLKTYAHLFDDKVMKQLKRRRYTGWGRLSRKLINGIRDKQSGKTILDFLKSDGFANRNFMQLIHDDSLTFKEDIQKAQVSGQGDSLHEHIANLAGSPAIKKGILQTVKVVDELVKVMGRHKPENIVIEMARENQTTQKGQKNSRERMKRIEEGIKELGSQILKEHPVENTQLQNEKLYLYYLQNGRDMYVDQELDINRLSDYDVDHIVPQSFLKDDSIDNKVLTRSDKARGKSDNVPSEEVVKKMKNYWRQLLNAKLITQRKFDNLTKAERGGLSELDKAGFIKRQLVETRQITKHVAQILDSRMNTKYDENDKLIREVKVITLKSKLVSDFRKDFQFYKVREINNYHHAHDAYLNAVVGTALIKKYPKLESEFVYGDYKVYDVRKMIAKSEQEIGKATAKYFFYSNIMNFFKTEITLANGEIRKRPLIETNGETGEIVWDKGRDFATVRKVLSMPQVNIVKKTEVQTGGFSKESILPKRNSDKLIARKKDWDPKKYGGFDSPTVAYSVLVVAKVEKGKSKKLKSVKELLGITIMERSSFEKNPIDFLEAKGYKEVKKDLIIKLPKYSLFELENGRKRMLASAGELQKGNELALPSKYVNFLYLASHYEKLKGSPEDNEQKQLFVEQHKHYLDEIIEQISEFSKRVILADANLDKVLSAYNKHRDKPIREQAENIIHLFTLTNLGAPAAFKYFDTTIDRKRYTSTKEVLDATLIHQSITGLYETRIDLSQLGGDGGGSSGGLGIEDEYRLHETSTEPDVSLGSTWLSDFPQAWAETGGMGLAVRQAPLIIPLKATSTPVSIQQYPMSHEARLGIKPHIQRLLDQGILVPCQSPWNTPLLPVKKPGTNDYRPVQDLREVNKRVEDIHPTVPNPYNLLSGLPPSHQWYTVLDLKDAFFCLRLHPTSQPLFAFEWRDPGMGISGQLTWTRLPQGFKNSPTLFNEALHRDLADFRIQHPDLILLQYVDDILLAATSELDCQQGTRALLQTLGDLGYRASAKKAQICQKQVKYLGYLLREGQRWLTEARKETVMGQPVPKTPRQLREFLGKAGFCRLFIPGFAEMAAPLYPLTKPGTLFSWGPDQQKAYQEIKQALLTAPALGLPDLTKPFELFVDEKQGYAKGVLTQKLGPWRRPVAYLSKKLDPVAAGWPPCLRMVAAIAVLTKDAGKLTMGQPLVILAPHAVEALVKQPPDRWLSNARMTHYQAMLLDTDRVQFGPVVALNPATLLPLPEEGAPHDCLEILAETHGTRPDLTDQPIPDADHTWYTDGSSFLQEGQRKAGAAVTTETEVIWAGALPAGTSAQRAELIALTQALKMAEGKRLNVYTDSRYAFATAHIHGEIYRRRGWLTSEGREIKNKSEILALLKALFLPKRLSIIHCLGHQKGDSAEARGNRLADQAAREAAIKTPPDTSTLLIAGKRTADGSEFEKRTADGSEFESPKKKAKVE

SEQ ID NO: 2054 - protein, 2096 aa, synthetic construct
MPAAKRVKLDGGDKKYSIGLDIGTNSVGWAVITDEYKVPSKKFKVLGNTDRHSIKKNLIGALLFDSGETAEATRLKRTARRRYTRRKNRICYLQEIFSNEMAKVDDSFFHRLEESFLVEEDKKHERHPIFGNIVDEVAYHEKYPTIYHLRKKLVDSTDKADLRLIYLALAHMIKFRGHFLIEGDLNPDNSDVDKLFIQLVQTYNQLFEENPINASGVDAKAILSARLSKSRRLENLIAQLPGEKKNGLFGNLIALSLGLTPNFKSNFDLAEDAKLQLSKDTYDDDLDNLLAQIGDQYADLFLAAKNLSDAILLSDILRVNTEITKAPLSASMIKRYDEHHQDLTLLKALVRQQLPEKYKEIFFDQSKNGYAGYIDGGASQEEFYKFIKPILEKMDGTEELLVKLNREDLLRKQRTFDNGSIPHQIHLGELHAILRRQEDFYPFLKDNREKIEKILTFRIPYYVGPLARGNSRFAWMTRKSEETITPWNFEEVVDKGASAQSFIERMTNFDKNLPNEKVLPKHSLLYEYFTVYNELTKVKYVTEGMRKPAFLSGEQKKAIVDLLFKTNRKVTVKQLKEDYFKKIECFDSVEISGVEDRFNASLGTYHDLLKIIKDKDFLDNEENEDILEDIVLTLTLFEDREMIEERLKTYAHLFDDKVMKQLKRRRYTGWGRLSRKLINGIRDKQSGKTILDFLKSDGFANRNFMQLIHDDSLTFKEDIQKAQVSGQGDSLHEHIANLAGSPAIKKGILQTVKVVDELVKVMGRHKPENIVIEMARENQTTQKGQKNSRERMKRIEEGIKELGSQILKEHPVENTQLQNEKLYLYYLQNGRDMYVDQELDINRLSDYDVDHIVPQSFLKDDSIDNKVLTRSDKARGKSDNVPSEEVVKKMKNYWRQLLNAKLITQRKFDNLTKAERGGLSELDKAGFIKRQLVETRQITKHVAQILDSRMNTKYDENDKLIREVKVITLKSKLVSDFRKDFQFYKVREINNYHHAHDAYLNAVVGTALIKKYPKLESEFVYGDYKVYDVRKMIAKSEQEIGKATAKYFFYSNIMNFFKTEITLANGEIRKRPLIETNGETGEIVWDKGRDFATVRKVLSMPQVNIVKKTEVQTGGFSKESILPKRNSDKLIARKKDWDPKKYGGFDSPTVAYSVLVVAKVEKGKSKKLKSVKELLGITIMERSSFEKNPIDFLEAKGYKEVKKDLIIKLPKYSLFELENGRKRMLASAGELQKGNELALPSKYVNFLYLASHYEKLKGSPEDNEQKQLFVEQHKHYLDEIIEQISEFSKRVILADANLDKVLSAYNKHRDKPIREQAENIIHLFTLTNLGAPAAFKYFDTTIDRKRYTSTKEVLDATLIHQSITGLYETRIDLSQLGGDGGEAAAKGGGPAPGGLGIEDEYRLHETSTEPDVSLGSTWLSDFPQAWAETGGMGLAVRQAPLIIPLKATSTPVSIQQYPMSHEARLGIKPHIQRLLDQGILVPCQSPWNTPLLPVKKPGTNDYRPVQDLREVNKRVEDIHPTVPNPYNLLSGLPPSHQWYTVLDLKDAFFCLRLHPTSQPLFAFEWRDPGMGISGQLTWTRLPQGFKNSPTLFNEALHRDLADFRIQHPDLILLQYVDDILLAATSELDCQQGTRALLQTLGDLGYRASAKKAQICQKQVKYLGYLLREGQRWLTEARKETVMGQPVPKTPRQLREFLGKAGFCRLFIPGFAEMAAPLYPLTKPGTLFSWGPDQQKAYQEIKQALLTAPALGLPDLTKPFELFVDEKQGYAKGVLTQKLGPWRRPVAYLSKKLDPVAAGWPPCLRMVAAIAVLTKDAGKLTMGQPLVILAPHAVEALVKQPPDRWLSNARMTHYQAMLLDTDRVQFGPVVALNPATLLPLPEEGAPHDCLEILAETHGTRPDLTDQPIPDADHTWYTDGSSFLQEGQRKAGAAVTTETEVIWAGALPAGTSAQRAELIALTQALKMAEGKRLNVYTDSRYAFATAHIHGEIYRRRGWLTSEGREIKNKSEILALLKALFLPKRLSIIHCLGHQKGDSAEARGNRLADQAAREAAIKTPPDTSTLLIAGKRTADGSEFEKRTADGSEFESPKKKAKVE

SEQ ID NO: 2055 - protein, 2096 aa, synthetic construct
MPAAKRVKLDGGDKKYSIGLDIGTNSVGWAVITDEYKVPSKKFKVLGNTDRHSIKKNLIGALLFDSGETAEATRLKRTARRRYTRRKNRICYLQEIFSNEMAKVDDSFFHRLEESFLVEEDKKHERHPIFGNIVDEVAYHEKYPTIYHLRKKLVDSTDKADLRLIYLALAHMIKFRGHFLIEGDLNPDNSDVDKLFIQLVQTYNQLFEENPINASGVDAKAILSARLSKSRRLENLIAQLPGEKKNGLFGNLIALSLGLTPNFKSNFDLAEDAKLQLSKDTYDDDLDNLLAQIGDQYADLFLAAKNLSDAILLSDILRVNTEITKAPLSASMIKRYDEHHQDLTLLKALVRQQLPEKYKEIFFDQSKNGYAGYIDGGASQEEFYKFIKPILEKMDGTEELLVKLNREDLLRKQRTFDNGSIPHQIHLGELHAILRRQEDFYPFLKDNREKIEKILTFRIPYYVGPLARGNSRFAWMTRKSEETITPWNFEEVVDKGASAQSFIERMTNFDKNLPNEKVLPKHSLLYEYFTVYNELTKVKYVTEGMRKPAFLSGEQKKAIVDLLFKTNRKVTVKQLKEDYFKKIECFDSVEISGVEDRFNASLGTYHDLLKIIKDKDFLDNEENEDILEDIVLTLTLFEDREMIEERLKTYAHLFDDKVMKQLKRRRYTGWGRLSRKLINGIRDKQSGKTILDFLKSDGFANRNFMQLIHDDSLTFKEDIQKAQVSGQGDSLHEHIANLAGSPAIKKGILQTVKVVDELVKVMGRHKPENIVIEMARENQTTQKGQKNSRERMKRIEEGIKELGSQILKEHPVENTQLQNEKLYLYYLQNGRDMYVDQELDINRLSDYDVDHIVPQSFLKDDSIDNKVLTRSDKARGKSDNVPSEEVVKKMKNYWRQLLNAKLITQRKFDNLTKAERGGLSELDKAGFIKRQLVETRQITKHVAQILDSRMNTKYDENDKLIREVKVITLKSKLVSDFRKDFQFYKVREINNYHHAHDAYLNAVVGTALIKKYPKLESEFVYGDYKVYDVRKMIAKSEQEIGKATAKYFFYSNIMNFFKTEITLANGEIRKRPLIETNGETGEIVWDKGRDFATVRKVLSMPQVNIVKKTEVQTGGFSKESILPKRNSDKLIARKKDWDPKKYGGFDSPTVAYSVLVVAKVEKGKSKKLKSVKELLGITIMERSSFEKNPIDFLEAKGYKEVKKDLIIKLPKYSLFELENGRKRMLASAGELQKGNELALPSKYVNFLYLASHYEKLKGSPEDNEQKQLFVEQHKHYLDEIIEQISEFSKRVILADANLDKVLSAYNKHRDKPIREQAENIIHLFTLTNLGAPAAFKYFDTTIDRKRYTSTKEVLDATLIHQSITGLYETRIDLSQLGGDGGEAAAKGGSGSSGGLGIEDEYRLHETSTEPDVSLGSTWLSDFPQAWAETGGMGLAVRQAPLIIPLKATSTPVSIQQYPMSHEARLGIKPHIQRLLDQGILVPCQSPWNTPLLPVKKPGTNDYRPVQDLREVNKRVEDIHPTVPNPYNLLSGLPPSHQWYTVLDLKDAFFCLRLHPTSQPLFAFEWRDPGMGISGQLTWTRLPQGFKNSPTLFNEALHRDLADFRIQHPDLILLQYVDDILLAATSELDCQQGTRALLQTLGDLGYRASAKKAQICQKQVKYLGYLLREGQRWLTEARKETVMGQPVPKTPRQLREFLGKAGFCRLFIPGFAEMAAPLYPLTKPGTLFSWGPDQQKAYQEIKQALLTAPALGLPDLTKPFELFVDEKQGYAKGVLTQKLGPWRRPVAYLSKKLDPVAAGWPPCLRMVAAIAVLTKDAGKLTMGQPLVILAPHAVEALVKQPPDRWLSNARMTHYQAMLLDTDRVQFGPVVALNPATLLPLPEEGAPHDCLEILAETHGTRPDLTDQPIPDADHTWYTDGSSFLQEGQRKAGAAVTTETEVIWAGALPAGTSAQRAELIALTQALKMAEGKRLNVYTDSRYAFATAHIHGEIYRRRGWLTSEGREIKNKSEILALLKALFLPKRLSIIHCLGHQKGDSAEARGNRLADQAAREAAIKTPPDTSTLLIAGKRTADGSEFEKRTADGSEFESPKKKAKVE

SEQ ID NO: 2056 - protein, 2097 aa, synthetic construct
MPAAKRVKLDGGDKKYSIGLDIGTNSVGWAVITDEYKVPSKKFKVLGNTDRHSIKKNLIGALLFDSGETAEATRLKRTARRRYTRRKNRICYLQEIFSNEMAKVDDSFFHRLEESFLVEEDKKHERHPIFGNIVDEVAYHEKYPTIYHLRKKLVDSTDKADLRLIYLALAHMIKFRGHFLIEGDLNPDNSDVDKLFIQLVQTYNQLFEENPINASGVDAKAILSARLSKSRRLENLIAQLPGEKKNGLFGNLIALSLGLTPNFKSNFDLAEDAKLQLSKDTYDDDLDNLLAQIGDQYADLFLAAKNLSDAILLSDILRVNTEITKAPLSASMIKRYDEHHQDLTLLKALVRQQLPEKYKEIFFDQSKNGYAGYIDGGASQEEFYKFIKPILEKMDGTEELLVKLNREDLLRKQRTFDNGSIPHQIHLGELHAILRRQEDFYPFLKDNREKIEKILTFRIPYYVGPLARGNSRFAWMTRKSEETITPWNFEEVVDKGASAQSFIERMTNFDKNLPNEKVLPKHSLLYEYFTVYNELTKVKYVTEGMRKPAFLSGEQKKAIVDLLFKTNRKVTVKQLKEDYFKKIECFDSVEISGVEDRFNASLGTYHDLLKIIKDKDFLDNEENEDILEDIVLTLTLFEDREMIEERLKTYAHLFDDKVMKQLKRRRYTGWGRLSRKLINGIRDKQSGKTILDFLKSDGFANRNFMQLIHDDSLTFKEDIQKAQVSGQGDSLHEHIANLAGSPAIKKGILQTVKVVDELVKVMGRHKPENIVIEMARENQTTQKGQKNSRERMKRIEEGIKELGSQILKEHPVENTQLQNEKLYLYYLQNGRDMYVDQELDINRLSDYDVDHIVPQSFLKDDSIDNKVLTRSDKARGKSDNVPSEEVVKKMKNYWRQLLNAKLITQRKFDNLTKAERGGLSELDKAGFIKRQLVETRQITKHVAQILDSRMNTKYDENDKLIREVKVITLKSKLVSDFRKDFQFYKVREINNYHHAHDAYLNAVVGTALIKKYPKLESEFVYGDYKVYDVRKMIAKSEQEIGKATAKYFFYSNIMNFFKTEITLANGEIRKRPLIETNGETGEIVWDKGRDFATVRKVLSMPQVNIVKKTEVQTGGFSKESILPKRNSDKLIARKKDWDPKKYGGFDSPTVAYSVLVVAKVEKGKSKKLKSVKELLGITIMERSSFEKNPIDFLEAKGYKEVKKDLIIKLPKYSLFELENGRKRMLASAGELQKGNELALPSKYVNFLYLASHYEKLKGSPEDNEQKQLFVEQHKHYLDEIIEQISEFSKRVILADANLDKVLSAYNKHRDKPIREQAENIIHLFTLTNLGAPAAFKYFDTTIDRKRYTSTKEVLDATLIHQSITGLYETRIDLSQLGGDGGGSAGSAAGSGEFGGLGIEDEYRLHETSTEPDVSLGSTWLSDFPQAWAETGGMGLAVRQAPLIIPLKATSTPVSIQQYPMSHEARLGIKPHIQRLLDQGILVPCQSPWNTPLLPVKKPGTNDYRPVQDLREVNKRVEDIHPTVPNPYNLLSGLPPSHQWYTVLDLKDAFFCLRLHPTSQPLFAFEWRDPGMGISGQLTWTRLPQGFKNSPTLFNEALHRDLADFRIQHPDLILLQYVDDILLAATSELDCQQGTRALLQTLGDLGYRASAKKAQICQKQVKYLGYLLREGQRWLTEARKETVMGQPVPKTPRQLREFLGKAGFCRLFIPGFAEMAAPLYPLTKPGTLFSWGPDQQKAYQEIKQALLTAPALGLPDLTKPFELFVDEKQGYAKGVLTQKLGPWRRPVAYLSKKLDPVAAGWPPCLRMVAAIAVLTKDAGKLTMGQPLVILAPHAVEALVKQPPDRWLSNARMTHYQAMLLDTDRVQFGPVVALNPATLLPLPEEGAPHDCLEILAETHGTRPDLTDQPIPDADHTWYTDGSSFLQEGQRKAGAAVTTETEVIWAGALPAGTSAQRAELIALTQALKMAEGKRLNVYTDSRYAFATAHIHGEIYRRRGWLTSEGREIKNKSEILALLKALFLPKRLSIIHCLGHQKGDSAEARGNRLADQAAREAAIKTPPDTSTLLIAGKRTADGSEFEKRTADGSEFESPKKKAKVE

SEQ ID NO: 2057 - protein, 2091 aa, synthetic construct
MPAAKRVKLDGGDKKYSIGLDIGTNSVGWAVITDEYKVPSKKFKVLGNTDRHSIKKNLIGALLFDSGETAEATRLKRTARRRYTRRKNRICYLQEIFSNEMAKVDDSFFHRLEESFLVEEDKKHERHPIFGNIVDEVAYHEKYPTIYHLRKKLVDSTDKADLRLIYLALAHMIKFRGHFLIEGDLNPDNSDVDKLFIQLVQTYNQLFEENPINASGVDAKAILSARLSKSRRLENLIAQLPGEKKNGLFGNLIALSLGLTPNFKSNFDLAEDAKLQLSKDTYDDDLDNLLAQIGDQYADLFLAAKNLSDAILLSDILRVNTEITKAPLSASMIKRYDEHHQDLTLLKALVRQQLPEKYKEIFFDQSKNGYAGYIDGGASQEEFYKFIKPILEKMDGTEELLVKLNREDLLRKQRTFDNGSIPHQIHLGELHAILRRQEDFYPFLKDNREKIEKILTFRIPYYVGPLARGNSRFAWMTRKSEETITPWNFEEVVDKGASAQSFIERMTNFDKNLPNEKVLPKHSLLYEYFTVYNELTKVKYVTEGMRKPAFLSGEQKKAIVDLLFKTNRKVTVKQLKEDYFKKIECFDSVEISGVEDRFNASLGTYHDLLKIIKDKDFLDNEENEDILEDIVLTLTLFEDREMIEERLKTYAHLFDDKVMKQLKRRRYTGWGRLSRKLINGIRDKQSGKTILDFLKSDGFANRNFMQLIHDDSLTFKEDIQKAQVSGQGDSLHEHIANLAGSPAIKKGILQTVKVVDELVKVMGRHKPENIVIEMARENQTTQKGQKNSRERMKRIEEGIKELGSQILKEHPVENTQLQNEKLYLYYLQNGRDMYVDQELDINRLSDYDVDHIVPQSFLKDDSIDNKVLTRSDKARGKSDNVPSEEVVKKMKNYWRQLLNAKLITQRKFDNLTKAERGGLSELDKAGFIKRQLVETRQITKHVAQILDSRMNTKYDENDKLIREVKVITLKSKLVSDFRKDFQFYKVREINNYHHAHDAYLNAVVGTALIKKYPKLESEFVYGDYKVYDVRKMIAKSEQEIGKATAKYFFYSNIMNFFKTEITLANGEIRKRPLIETNGETGEIVWDKGRDFATVRKVLSMPQVNIVKKTEVQTGGFSKESILPKRNSDKLIARKKDWDPKKYGGFDSPTVAYSVLVVAKVEKGKSKKLKSVKELLGITIMERSSFEKNPIDFLEAKGYKEVKKDLIIKLPKYSLFELENGRKRMLASAGELQKGNELALPSKYVNFLYLASHYEKLKGSPEDNEQKQLFVEQHKHYLDEIIEQISEFSKRVILADANLDKVLSAYNKHRDKPIREQAENIIHLFTLTNLGAPAAFKYFDTTIDRKRYTSTKEVLDATLIHQSITGLYETRIDLSQLGGDGGPAPGSSGGLGIEDEYRLHETSTEPDVSLGSTWLSDFPQAWAETGGMGLAVRQAPLIIPLKATSTPVSIQQYPMSHEARLGIKPHIQRLLDQGILVPCQSPWNTPLLPVKKPGTNDYRPVQDLREVNKRVEDIHPTVPNPYNLLSGLPPSHQWYTVLDLKDAFFCLRLHPTSQPLFAFEWRDPGMGISGQLTWTRLPQGFKNSPTLFNEALHRDLADFRIQHPDLILLQYVDDILLAATSELDCQQGTRALLQTLGDLGYRASAKKAQICQKQVKYLGYLLREGQRWLTEARKETVMGQPVPKTPRQLREFLGKAGFCRLFIPGFAEMAAPLYPLTKPGTLFSWGPDQQKAYQEIKQALLTAPALGLPDLTKPFELFVDEKQGYAKGVLTQKLGPWRRPVAYLSKKLDPVAAGWPPCLRMVAAIAVLTKDAGKLTMGQPLVILAPHAVEALVKQPPDRWLSNARMTHYQAMLLDTDRVQFGPVVALNPATLLPLPEEGAPHDCLEILAETHGTRPDLTDQPIPDADHTWYTDGSSFLQEGQRKAGAAVTTETEVIWAGALPAGTSAQRAELIALTQALKMAEGKRLNVYTDSRYAFATAHIHGEIYRRRGWLTSEGREIKNKSEILALLKALFLPKRLSIIHCLGHQKGDSAEARGNRLADQAAREAAIKTPPDTSTLLIAGKRTADGSEFEKRTADGSEFESPKKKAKVE

SEQ ID NO: 2058 - protein, 2094 aa, synthetic construct
MPAAKRVKLDGGDKKYSIGLDIGTNSVGWAVITDEYKVPSKKFKVLGNTDRHSIKKNLIGALLFDSGETAEATRLKRTARRRYTRRKNRICYLQEIFSNEMAKVDDSFFHRLEESFLVEEDKKHERHPIFGNIVDEVAYHEKYPTIYHLRKKLVDSTDKADLRLIYLALAHMIKFRGHFLIEGDLNPDNSDVDKLFIQLVQTYNQLFEENPINASGVDAKAILSARLSKSRRLENLIAQLPGEKKNGLFGNLIALSLGLTPNFKSNFDLAEDAKLQLSKDTYDDDLDNLLAQIGDQYADLFLAAKNLSDAILLSDILRVNTEITKAPLSASMIKRYDEHHQDLTLLKALVRQQLPEKYKEIFFDQSKNGYAGYIDGGASQEEFYKFIKPILEKMDGTEELLVKLNREDLLRKQRTFDNGSIPHQIHLGELHAILRRQEDFYPFLKDNREKIEKILTFRIPYYVGPLARGNSRFAWMTRKSEETITPWNFEEVVDKGASAQSFIERMTNFDKNLPNEKVLPKHSLLYEYFTVYNELTKVKYVTEGMRKPAFLSGEQKKAIVDLLFKTNRKVTVKQLKEDYFKKIECFDSVEISGVEDRFNASLGTYHDLLKIIKDKDFLDNEENEDILEDIVLTLTLFEDREMIEERLKTYAHLFDDKVMKQLKRRRYTGWGRLSRKLINGIRDKQSGKTILDFLKSDGFANRNFMQLIHDDSLTFKEDIQKAQVSGQGDSLHEHIANLAGSPAIKKGILQTVKVVDELVKVMGRHKPENIVIEMARENQTTQKGQKNSRERMKRIEEGIKELGSQILKEHPVENTQLQNEKLYLYYLQNGRDMYVDQELDINRLSDYDVDHIVPQSFLKDDSIDNKVLTRSDKARGKSDNVPSEEVVKKMKNYWRQLLNAKLITQRKFDNLTKAERGGLSELDKAGFIKRQLVETRQITKHVAQILDSRMNTKYDENDKLIREVKVITLKSKLVSDFRKDFQFYKVREINNYHHAHDAYLNAVVGTALIKKYPKLESEFVYGDYKVYDVRKMIAKSEQEIGKATAKYFFYSNIMNFFKTEITLANGEIRKRPLIETNGETGEIVWDKGRDFATVRKVLSMPQVNIVKKTEVQTGGFSKESILPKRNSDKLIARKKDWDPKKYGGFDSPTVAYSVLVVAKVEKGKSKKLKSVKELLGITIMERSSFEKNPIDFLEAKGYKEVKKDLIIKLPKYSLFELENGRKRMLASAGELQKGNELALPSKYVNFLYLASHYEKLKGSPEDNEQKQLFVEQHKHYLDEIIEQISEFSKRVILADANLDKVLSAYNKHRDKPIREQAENIIHLFTLTNLGAPAAFKYFDTTIDRKRYTSTKEVLDATLIHQSITGLYETRIDLSQLGGDGGGGSPAPGGGGGLGIEDEYRLHETSTEPDVSLGSTWLSDFPQAWAETGGMGLAVRQAPLIIPLKATSTPVSIQQYPMSHEARLGIKPHIQRLLDQGILVPCQSPWNTPLLPVKKPGTNDYRPVQDLREVNKRVEDIHPTVPNPYNLLSGLPPSHQWYTVLDLKDAFFCLRLHPTSQPLFAFEWRDPGMGISGQLTWTRLPQGFKNSPTLFNEALHRDLADFRIQHPDLILLQYVDDILLAATSELDCQQGTRALLQTLGDLGYRASAKKAQICQKQVKYLGYLLREGQRWLTEARKETVMGQPVPKTPRQLREFLGKAGFCRLFIPGFAEMAAPLYPLTKPGTLFSWGPDQQKAYQEIKQALLTAPALGLPDLTKPFELFVDEKQGYAKGVLTQKLGPWRRPVAYLSKKLDPVAAGWPPCLRMVAAIAVLTKDAGKLTMGQPLVILAPHAVEALVKQPPDRWLSNARMTHYQAMLLDTDRVQFGPVVALNPATLLPLPEEGAPHDCLEILAETHGTRPDLTDQPIPDADHTWYTDGSSFLQEGQRKAGAAVTTETEVIWAGALPAGTSAQRAELIALTQALKMAEGKRLNVYTDSRYAFATAHIHGEIYRRRGWLTSEGREIKNKSEILALLKALFLPKRLSIIHCLGHQKGDSAEARGNRLADQAAREAAIKTPPDTSTLLIAGKRTADGSEFEKRTADGSEFESPKKKAKVE

SEQ ID NO: 2059 - protein, 2096 aa, synthetic construct
MPAAKRVKLDGGDKKYSIGLDIGTNSVGWAVITDEYKVPSKKFKVLGNTDRHSIKKNLIGALLFDSGETAEATRLKRTARRRYTRRKNRICYLQEIFSNEMAKVDDSFFHRLEESFLVEEDKKHERHPIFGNIVDEVAYHEKYPTIYHLRKKLVDSTDKADLRLIYLALAHMIKFRGHFLIEGDLNPDNSDVDKLFIQLVQTYNQLFEENPINASGVDAKAILSARLSKSRRLENLIAQLPGEKKNGLFGNLIALSLGLTPNFKSNFDLAEDAKLQLSKDTYDDDLDNLLAQIGDQYADLFLAAKNLSDAILLSDILRVNTEITKAPLSASMIKRYDEHHQDLTLLKALVRQQLPEKYKEIFFDQSKNGYAGYIDGGASQEEFYKFIKPILEKMDGTEELLVKLNREDLLRKQRTFDNGSIPHQIHLGELHAILRRQEDFYPFLKDNREKIEKILTFRIPYYVGPLARGNSRFAWMTRKSEETITPWNFEEVVDKGASAQSFIERMTNFDKNLPNEKVLPKHSLLYEYFTVYNELTKVKYVTEGMRKPAFLSGEQKKAIVDLLFKTNRKVTVKQLKEDYFKKIECFDSVEISGVEDRFNASLGTYHDLLKIIKDKDFLDNEENEDILEDIVLTLTLFEDREMIEERLKTYAHLFDDKVMKQLKRRRYTGWGRLSRKLINGIRDKQSGKTILDFLKSDGFANRNFMQLIHDDSLTFKEDIQKAQVSGQGDSLHEHIANLAGSPAIKKGILQTVKVVDELVKVMGRHKPENIVIEMARENQTTQKGQKNSRERMKRIEEGIKELGSQILKEHPVENTQLQNEKLYLYYLQNGRDMYVDQELDINRLSDYDVDHIVPQSFLKDDSIDNKVLTRSDKARGKSDNVPSEEVVKKMKNYWRQLLNAKLITQRKFDNLTKAERGGLSELDKAGFIKRQLVETRQITKHVAQILDSRMNTKYDENDKLIREVKVITLKSKLVSDFRKDFQFYKVREINNYHHAHDAYLNAVVGTALIKKYPKLESEFVYGDYKVYDVRKMIAKSEQEIGKATAKYFFYSNIMNFFKTEITLANGEIRKRPLIETNGETGEIVWDKGRDFATVRKVLSMPQVNIVKKTEVQTGGFSKESILPKRNSDKLIARKKDWDPKKYGGFDSPTVAYSVLVVAKVEKGKSKKLKSVKELLGITIMERSSFEKNPIDFLEAKGYKEVKKDLIIKLPKYSLFELENGRKRMLASAGELQKGNELALPSKYVNFLYLASHYEKLKGSPEDNEQKQLFVEQHKHYLDEIIEQISEFSKRVILADANLDKVLSAYNKHRDKPIREQAENIIHLFTLTNLGAPAAFKYFDTTIDRKRYTSTKEVLDATLIHQSITGLYETRIDLSQLGGDGGGGGGGSEAAAKGGLGIEDEYRLHETSTEPDVSLGSTWLSDFPQAWAETGGMGLAVRQAPLIIPLKATSTPVSIQQYPMSHEARLGIKPHIQRLLDQGILVPCQSPWNTPLLPVKKPGTNDYRPVQDLREVNKRVEDIHPTVPNPYNLLSGLPPSHQWYTVLDLKDAFFCLRLHPTSQPLFAFEWRDPGMGISGQLTWTRLPQGFKNSPTLFNEALHRDLADFRIQHPDLILLQYVDDILLAATSELDCQQGTRALLQTLGDLGYRASAKKAQICQKQVKYLGYLLREGQRWLTEARKETVMGQPVPKTPRQLREFLGKAGFCRLFIPGFAEMAAPLYPLTKPGTLFSWGPDQQKAYQEIKQALLTAPALGLPDLTKPFELFVDEKQGYAKGVLTQKLGPWRRPVAYLSKKLDPVAAGWPPCLRMVAAIAVLTKDAGKLTMGQPLVILAPHAVEALVKQPPDRWLSNARMTHYQAMLLDTDRVQFGPVVALNPATLLPLPEEGAPHDCLEILAETHGTRPDLTDQPIPDADHTWYTDGSSFLQEGQRKAGAAVTTETEVIWAGALPAGTSAQRAELIALTQALKMAEGKRLNVYTDSRYAFATAHIHGEIYRRRGWLTSEGREIKNKSEILALLKALFLPKRLSIIHCLGHQKGDSAEARGNRLADQAAREAAIKTPPDTSTLLIAGKRTADGSEFEKRTADGSEFESPKKKAKVE

SEQ ID NO: 2060 - protein, 2094 aa, synthetic construct
MPAAKRVKLDGGDKKYSIGLDIGTNSVGWAVITDEYKVPSKKFKVLGNTDRHSIKKNLIGALLFDSGETAEATRLKRTARRRYTRRKNRICYLQEIFSNEMAKVDDSFFHRLEESFLVEEDKKHERHPIFGNIVDEVAYHEKYPTIYHLRKKLVDSTDKADLRLIYLALAHMIKFRGHFLIEGDLNPDNSDVDKLFIQLVQTYNQLFEENPINASGVDAKAILSARLSKSRRLENLIAQLPGEKKNGLFGNLIALSLGLTPNFKSNFDLAEDAKLQLSKDTYDDDLDNLLAQIGDQYADLFLAAKNLSDAILLSDILRVNTEITKAPLSASMIKRYDEHHQDLTLLKALVRQQLPEKYKEIFFDQSKNGYAGYIDGGASQEEFYKFIKPILEKMDGTEELLVKLNREDLLRKQRTFDNGSIPHQIHLGELHAILRRQEDFYPFLKDNREKIEKILTFRIPYYVGPLARGNSRFAWMTRKSEETITPWNFEEVVDKGASAQSFIERMTNFDKNLPNEKVLPKHSLLYEYFTVYNELTKVKYVTEGMRKPAFLSGEQKKAIVDLLFKTNRKVTVKQLKEDYFKKIECFDSVEISGVEDRFNASLGTYHDLLKIIKDKDFLDNEENEDILEDIVLTLTLFEDREMIEERLKTYAHLFDDKVMKQLKRRRYTGWGRLSRKLINGIRDKQSGKTILDFLKSDGFANRNFMQLIHDDSLTFKEDIQKAQVSGQGDSLHEHIANLAGSPAIKKGILQTVKVVDELVKVMGRHKPENIVIEMARENQTTQKGQKNSRERMKRIEEGIKELGSQILKEHPVENTQLQNEKLYLYYLQNGRDMYVDQELDINRLSDYDVDHIVPQSFLKDDSIDNKVLTRSDKARGKSDNVPSEEVVKKMKNYWRQLLNAKLITQRKFDNLTKAERGGLSELDKAGFIKRQLVETRQITKHVAQILDSRMNTKYDENDKLIREVKVITLKSKLVSDFRKDFQFYKVREINNYHHAHDAYLNAVVGTALIKKYPKLESEFVYGDYKVYDVRKMIAKSEQEIGKATAKYFFYSNIMNFFKTEITLANGEIRKRPLIETNGETGEIVWDKGRDFATVRKVLSMPQVNIVKKTEVQTGGFSKESILPKRNSDKLIARKKDWDPKKYGGFDSPTVAYSVLVVAKVEKGKSKKLKSVKELLGITIMERSSFEKNPIDFLEAKGYKEVKKDLIIKLPKYSLFELENGRKRMLASAGELQKGNELALPSKYVNFLYLASHYEKLKGSPEDNEQKQLFVEQHKHYLDEIIEQISEFSKRVILADANLDKVLSAYNKHRDKPIREQAENIIHLFTLTNLGAPAAFKYFDTTIDRKRYTSTKEVLDATLIHQSITGLYETRIDLSQLGGDGGGSSPAPGGGGGLGIEDEYRLHETSTEPDVSLGSTWLSDFPQAWAETGGMGLAVRQAPLIIPLKATSTPVSIQQYPMSHEARLGIKPHIQRLLDQGILVPCQSPWNTPLLPVKKPGTNDYRPVQDLREVNKRVEDIHPTVPNPYNLLSGLPPSHQWYTVLDLKDAFFCLRLHPTSQPLFAFEWRDPGMGISGQLTWTRLPQGFKNSPTLFNEALHRDLADFRIQHPDLILLQYVDDILLAATSELDCQQGTRALLQTLGDLGYRASAKKAQICQKQVKYLGYLLREGQRWLTEARKETVMGQPVPKTPRQLREFLGKAGFCRLFIPGFAEMAAPLYPLTKPGTLFSWGPDQQKAYQEIKQALLTAPALGLPDLTKPFELFVDEKQGYAKGVLTQKLGPWRRPVAYLSKKLDPVAAGWPPCLRMVAAIAVLTKDAGKLTMGQPLVILAPHAVEALVKQPPDRWLSNARMTHYQAMLLDTDRVQFGPVVALNPATLLPLPEEGAPHDCLEILAETHGTRPDLTDQPIPDADHTWYTDGSSFLQEGQRKAGAAVTTETEVIWAGALPAGTSAQRAELIALTQALKMAEGKRLNVYTDSRYAFATAHIHGEIYRRRGWLTSEGREIKNKSEILALLKALFLPKRLSIIHCLGHQKGDSAEARGNRLADQAAREAAIKTPPDTSTLLIAGKRTADGSEFEKRTADGSEFESPKKKAKVE

SEQ ID NO: 2061 - protein, 2094 aa, synthetic construct
MPAAKRVKLDGGDKKYSIGLDIGTNSVGWAVITDEYKVPSKKFKVLGNTDRHSIKKNLIGALLFDSGETAEATRLKRTARRRYTRRKNRICYLQEIFSNEMAKVDDSFFHRLEESFLVEEDKKHERHPIFGNIVDEVAYHEKYPTIYHLRKKLVDSTDKADLRLIYLALAHMIKFRGHFLIEGDLNPDNSDVDKLFIQLVQTYNQLFEENPINASGVDAKAILSARLSKSRRLENLIAQLPGEKKNGLFGNLIALSLGLTPNFKSNFDLAEDAKLQLSKDTYDDDLDNLLAQIGDQYADLFLAAKNLSDAILLSDILRVNTEITKAPLSASMIKRYDEHHQDLTLLKALVRQQLPEKYKEIFFDQSKNGYAGYIDGGASQEEFYKFIKPILEKMDGTEELLVKLNREDLLRKQRTFDNGSIPHQIHLGELHAILRRQEDFYPFLKDNREKIEKILTFRIPYYVGPLARGNSRFAWMTRKSEETITPWNFEEVVDKGASAQSFIERMTNFDKNLPNEKVLPKHSLLYEYFTVYNELTKVKYVTEGMRKPAFLSGEQKKAIVDLLFKTNRKVTVKQLKEDYFKKIECFDSVEISGVEDRFNASLGTYHDLLKIIKDKDFLDNEENEDILEDIVLTLTLFEDREMIEERLKTYAHLFDDKVMKQLKRRRYTGWGRLSRKLINGIRDKQSGKTILDFLKSDGFANRNFMQLIHDDSLTFKEDIQKAQVSGQGDSLHEHIANLAGSPAIKKGILQTVKVVDELVKVMGRHKPENIVIEMARENQTTQKGQKNSRERMKRIEEGIKELGSQILKEHPVENTQLQNEKLYLYYLQNGRDMYVDQELDINRLSDYDVDHIVPQSFLKDDSIDNKVLTRSDKARGKSDNVPSEEVVKKMKNYWRQLLNAKLITQRKFDNLTKAERGGLSELDKAGFIKRQLVETRQITKHVAQILDSRMNTKYDENDKLIREVKVITLKSKLVSDFRKDFQFYKVREINNYHHAHDAYLNAVVGTALIKKYPKLESEFVYGDYKVYDVRKMIAKSEQEIGKATAKYFFYSNIMNFFKTEITLANGEIRKRPLIETNGETGEIVWDKGRDFATVRKVLSMPQVNIVKKTEVQTGGFSKESILPKRNSDKLIARKKDWDPKKYGGFDSPTVAYSVLVVAKVEKGKSKKLKSVKELLGITIMERSSFEKNPIDFLEAKGYKEVKKDLIIKLPKYSLFELENGRKRMLASAGELQKGNELALPSKYVNFLYLASHYEKLKGSPEDNEQKQLFVEQHKHYLDEIIEQISEFSKRVILADANLDKVLSAYNKHRDKPIREQAENIIHLFTLTNLGAPAAFKYFDTTIDRKRYTSTKEVLDATLIHQSITGLYETRIDLSQLGGDGGGGSGGGPAPGGLGIEDEYRLHETSTEPDVSLGSTWLSDFPQAWAETGGMGLAVRQAPLIIPLKATSTPVSIQQYPMSHEARLGIKPHIQRLLDQGILVPCQSPWNTPLLPVKKPGTNDYRPVQDLREVNKRVEDIHPTVPNPYNLLSGLPPSHQWYTVLDLKDAFFCLRLHPTSQPLFAFEWRDPGMGISGQLTWTRLPQGFKNSPTLFNEALHRDLADFRIQHPDLILLQYVDDILLAATSELDCQQGTRALLQTLGDLGYRASAKKAQICQKQVKYLGYLLREGQRWLTEARKETVMGQPVPKTPRQLREFLGKAGFCRLFIPGFAEMAAPLYPLTKPGTLFSWGPDQQKAYQEIKQALLTAPALGLPDLTKPFELFVDEKQGYAKGVLTQKLGPWRRPVAYLSKKLDPVAAGWPPCLRMVAAIAVLTKDAGKLTMGQPLVILAPHAVEALVKQPPDRWLSNARMTHYQAMLLDTDRVQFGPVVALNPATLLPLPEEGAPHDCLEILAETHGTRPDLTDQPIPDADHTWYTDGSSFLQEGQRKAGAAVTTETEVIWAGALPAGTSAQRAELIALTQALKMAEGKRLNVYTDSRYAFATAHIHGEIYRRRGWLTSEGREIKNKSEILALLKALFLPKRLSIIHCLGHQKGDSAEARGNRLADQAAREAAIKTPPDTSTLLIAGKRTADGSEFEKRTADGSEFESPKKKAKVE

SEQ ID NO: 2062 - protein, 2096 aa, synthetic construct
MPAAKRVKLDGGDKKYSIGLDIGTNSVGWAVITDEYKVPSKKFKVLGNTDRHSIKKNLIGALLFDSGETAEATRLKRTARRRYTRRKNRICYLQEIFSNEMAKVDDSFFHRLEESFLVEEDKKHERHPIFGNIVDEVAYHEKYPTIYHLRKKLVDSTDKADLRLIYLALAHMIKFRGHFLIEGDLNPDNSDVDKLFIQLVQTYNQLFEENPINASGVDAKAILSARLSKSRRLENLIAQLPGEKKNGLFGNLIALSLGLTPNFKSNFDLAEDAKLQLSKDTYDDDLDNLLAQIGDQYADLFLAAKNLSDAILLSDILRVNTEITKAPLSASMIKRYDEHHQDLTLLKALVRQQLPEKYKEIFFDQSKNGYAGYIDGGASQEEFYKFIKPILEKMDGTEELLVKLNREDLLRKQRTFDNGSIPHQIHLGELHAILRRQEDFYPFLKDNREKIEKILTFRIPYYVGPLARGNSRFAWMTRKSEETITPWNFEEVVDKGASAQSFIERMTNFDKNLPNEKVLPKHSLLYEYFTVYNELTKVKYVTEGMRKPAFLSGEQKKAIVDLLFKTNRKVTVKQLKEDYFKKIECFDSVEISGVEDRFNASLGTYHDLLKIIKDKDFLDNEENEDILEDIVLTLTLFEDREMIEERLKTYAHLFDDKVMKQLKRRRYTGWGRLSRKLINGIRDKQSGKTILDFLKSDGFANRNFMQLIHDDSLTFKEDIQKAQVSGQGDSLHEHIANLAGSPAIKKGILQTVKVVDELVKVMGRHKPENIVIEMARENQTTQKGQKNSRERMKRIEEGIKELGSQILKEHPVENTQLQNEKLYLYYLQNGRDMYVDQELDINRLSDYDVDHIVPQSFLKDDSIDNKVLTRSDKARGKSDNVPSEEVVKKMKNYWRQLLNAKLITQRKFDNLTKAERGGLSELDKAGFIKRQLVETRQITKHVAQILDSRMNTKYDENDKLIREVKVITLKSKLVSDFRKDFQFYKVREINNYHHAHDAYLNAVVGTALIKKYPKLESEFVYGDYKVYDVRKMIAKSEQEIGKATAKYFFYSNIMNFFKTEITLANGEIRKRPLIETNGETGEIVWDKGRDFATVRKVLSMPQVNIVKKTEVQTGGFSKESILPKRNSDKLIARKKDWDPKKYGGFDSPTVAYSVLVVAKVEKGKSKKLKSVKELLGITIMERSSFEKNPIDFLEAKGYKEVKKDLIIKLPKYSLFELENGRKRMLASAGELQKGNELALPSKYVNFLYLASHYEKLKGSPEDNEQKQLFVEQHKHYLDEIIEQISEFSKRVILADANLDKVLSAYNKHRDKPIREQAENIIHLFTLTNLGAPAAFKYFDTTIDRKRYTSTKEVLDATLIHQSITGLYETRIDLSQLGGDGGGSSPAPEAAAKGGTLGIEDEYRLHETSTEPDVSLGSTWLSDFPQAWAETGGMGLAVRQAPLIIPLKATSTPVSIQQYPMSHEARLGIKPHIQRLLDQGILVPCQSPWNTPLLPVKKPGTNDYRPVQDLREVNKRVEDIHPTVPNPYNLLSGLPPSHQWYTVLDLKDAFFCLRLHPTSQPLFAFEWRDPGMGISGQLTWTRLPQGFKNSPTLFDEALHRDLADFRIQHPDLILLQYVDDILLAATSELDCQQGTRALLQTLGDLGYRASAKKAQICQKQVKYLGYLLREGQRWLTEARKETVMGQPVPKTPRQLREFLGTAGFCRLWIPGFAEMAAPLYPLTKTGTLFSWGPDQQKAYQEIKQALLTAPALGLPDLTKPFELFVDEKQGYAKGVLTQKLGPWRRPVAYLSKKLDPVAAGWPPCLRMVAAIAVLTKDAGKLTMGQPLVILAPHAVEALVKQPPDRWLSNARMTHYQAMLLDTDRVQFGPVVALNPATLLPLPEEGAPHDCLEILAETHGTRPDLTDQPIPDADHTWYTDGSSFLQEGQRKAGAAVTTETEVIWAGALPAGTSAQRAELIALTQALKMAEGKRLNVYTDSRYAFATAHIHGEIYRRRGLLTSEGREIKNKSEILALLKALFLPKRLSIIHCLGHQKGDSAEARGNRLADQAAREAAIKTPPDTSTLLAGKRTADGSEFEKRTADGSEFESPKKKAKVE

SEQ ID NO: 2063 - protein, 2105 aa, synthetic construct
MPAAKRVKLDGGDKKYSIGLDIGTNSVGWAVITDEYKVPSKKFKVLGNTDRHSIKKNLIGALLFDSGETAEATRLKRTARRRYTRRKNRICYLQEIFSNEMAKVDDSFFHRLEESFLVEEDKKHERHPIFGNIVDEVAYHEKYPTIYHLRKKLVDSTDKADLRLIYLALAHMIKFRGHFLIEGDLNPDNSDVDKLFIQLVQTYNQLFEENPINASGVDAKAILSARLSKSRRLENLIAQLPGEKKNGLFGNLIALSLGLTPNFKSNFDLAEDAKLQLSKDTYDDDLDNLLAQIGDQYADLFLAAKNLSDAILLSDILRVNTEITKAPLSASMIKRYDEHHQDLTLLKALVRQQLPEKYKEIFFDQSKNGYAGYIDGGASQEEFYKFIKPILEKMDGTEELLVKLNREDLLRKQRTFDNGSIPHQIHLGELHAILRRQEDFYPFLKDNREKIEKILTFRIPYYVGPLARGNSRFAWMTRKSEETITPWNFEEVVDKGASAQSFIERMTNFDKNLPNEKVLPKHSLLYEYFTVYNELTKVKYVTEGMRKPAFLSGEQKKAIVDLLFKTNRKVTVKQLKEDYFKKIECFDSVEISGVEDRFNASLGTYHDLLKIIKDKDFLDNEENEDILEDIVLTLTLFEDREMIEERLKTYAHLFDDKVMKQLKRRRYTGWGRLSRKLINGIRDKQSGKTILDFLKSDGFANRNFMQLIHDDSLTFKEDIQKAQVSGQGDSLHEHIANLAGSPAIKKGILQTVKVVDELVKVMGRHKPENIVIEMARENQTTQKGQKNSRERMKRIEEGIKELGSQILKEHPVENTQLQNEKLYLYYLQNGRDMYVDQELDINRLSDYDVDHIVPQSFLKDDSIDNKVLTRSDKARGKSDNVPSEEVVKKMKNYWRQLLNAKLITQRKFDNLTKAERGGLSELDKAGFIKRQLVETRQITKHVAQILDSRMNTKYDENDKLIREVKVITLKSKLVSDFRKDFQFYKVREINNYHHAHDAYLNAVVGTALIKKYPKLESEFVYGDYKVYDVRKMIAKSEQEIGKATAKYFFYSNIMNFFKTEITLANGEIRKRPLIETNGETGEIVWDKGRDFATVRKVLSMPQVNIVKKTEVQTGGFSKESILPKRNSDKLIARKKDWDPKKYGGFDSPTVAYSVLVVAKVEKGKSKKLKSVKELLGITIMERSSFEKNPIDFLEAKGYKEVKKDLIIKLPKYSLFELENGRKRMLASAGELQKGNELALPSKYVNFLYLASHYEKLKGSPEDNEQKQLFVEQHKHYLDEIIEQISEFSKRVILADANLDKVLSAYNKHRDKPIREQAENIIHLFTLTNLGAPAAFKYFDTTIDRKRYTSTKEVLDATLIHQSITGLYETRIDLSQLGGDGGGGGGSGGGGSGGGGSGGGGSGGTLGIEDEYRLHETSTEPDVSLGSTWLSDFPQAWAETGGMGLAVRQAPLIIPLKATSTPVSIQQYPMSHEARLGIKPHIQRLLDQGILVPCQSPWNTPLLPVKKPGTNDYRPVQDLREVNKRVEDIHPTVPNPYNLLSGLPPSHQWYTVLDLKDAFFCLRLHPTSQPLFAFEWRDPGMGISGQLTWTRLPQGFKNSPTLFDEALHRDLADFRIQHPDLILLQYVDDILLAATSELDCQQGTRALLQTLGDLGYRASAKKAQICQKQVKYLGYLLREGQRWLTEARKETVMGQPVPKTPRQLREFLGTAGFCRLWIPGFAEMAAPLYPLTKTGTLFSWGPDQQKAYQEIKQALLTAPALGLPDLTKPFELFVDEKQGYAKGVLTQKLGPWRRPVAYLSKKLDPVAAGWPPCLRMVAAIAVLTKDAGKLTMGQPLVILAPHAVEALVKQPPDRWLSNARMTHYQAMLLDTDRVQFGPVVALNPATLLPLPEEGAPHDCLEILAETHGTRPDLTDQPIPDADHTWYTDGSSFLQEGQRKAGAAVTTETEVIWAGALPAGTSAQRAELIALTQALKMAEGKRLNVYTDSRYAFATAHIHGEIYRRRGLLTSEGREIKNKSEILALLKALFLPKRLSIIHCLGHQKGDSAEARGNRLADQAAREAAIKTPPDTSTLLAGKRTADGSEFEKRTADGSEFESPKKKAKVE

SEQ ID NO: 2064 - protein, 2095 aa, synthetic construct
MPAAKRVKLDGGDKKYSIGLDIGTNSVGWAVITDEYKVPSKKFKVLGNTDRHSIKKNLIGALLFDSGETAEATRLKRTARRRYTRRKNRICYLQEIFSNEMAKVDDSFFHRLEESFLVEEDKKHERHPIFGNIVDEVAYHEKYPTIYHLRKKLVDSTDKADLRLIYLALAHMIKFRGHFLIEGDLNPDNSDVDKLFIQLVQTYNQLFEENPINASGVDAKAILSARLSKSRRLENLIAQLPGEKKNGLFGNLIALSLGLTPNFKSNFDLAEDAKLQLSKDTYDDDLDNLLAQIGDQYADLFLAAKNLSDAILLSDILRVNTEITKAPLSASMIKRYDEHHQDLTLLKALVRQQLPEKYKEIFFDQSKNGYAGYIDGGASQEEFYKFIKPILEKMDGTEELLVKLNREDLLRKQRTFDNGSIPHQIHLGELHAILRRQEDFYPFLKDNREKIEKILTFRIPYYVGPLARGNSRFAWMTRKSEETITPWNFEEVVDKGASAQSFIERMTNFDKNLPNEKVLPKHSLLYEYFTVYNELTKVKYVTEGMRKPAFLSGEQKKAIVDLLFKTNRKVTVKQLKEDYFKKIECFDSVEISGVEDRFNASLGTYHDLLKIIKDKDFLDNEENEDILEDIVLTLTLFEDREMIEERLKTYAHLFDDKVMKQLKRRRYTGWGRLSRKLINGIRDKQSGKTILDFLKSDGFANRNFMQLIHDDSLTFKEDIQKAQVSGQGDSLHEHIANLAGSPAIKKGILQTVKVVDELVKVMGRHKPENIVIEMARENQTTQKGQKNSRERMKRIEEGIKELGSQILKEHPVENTQLQNEKLYLYYLQNGRDMYVDQELDINRLSDYDVDHIVPQSFLKDDSIDNKVLTRSDKARGKSDNVPSEEVVKKMKNYWRQLLNAKLITQRKFDNLTKAERGGLSELDKAGFIKRQLVETRQITKHVAQILDSRMNTKYDENDKLIREVKVITLKSKLVSDFRKDFQFYKVREINNYHHAHDAYLNAVVGTALIKKYPKLESEFVYGDYKVYDVRKMIAKSEQEIGKATAKYFFYSNIMNFFKTEITLANGEIRKRPLIETNGETGEIVWDKGRDFATVRKVLSMPQVNIVKKTEVQTGGFSKESILPKRNSDKLIARKKDWDPKKYGGFDSPTVAYSVLVVAKVEKGKSKKLKSVKELLGITIMERSSFEKNPIDFLEAKGYKEVKKDLIIKLPKYSLFELENGRKRMLASAGELQKGNELALPSKYVNFLYLASHYEKLKGSPEDNEQKQLFVEQHKHYLDEIIEQISEFSKRVILADANLDKVLSAYNKHRDKPIREQAENIIHLFTLTNLGAPAAFKYFDTTIDRKRYTSTKEVLDATLIHQSITGLYETRIDLSQLGGDGGEAAAKEAAAKGGTLGIEDEYRLHETSTEPDVSLGSTWLSDFPQAWAETGGMGLAVRQAPLIIPLKATSTPVSIQQYPMSHEARLGIKPHIQRLLDQGILVPCQSPWNTPLLPVKKPGTNDYRPVQDLREVNKRVEDIHPTVPNPYNLLSGLPPSHQWYTVLDLKDAFFCLRLHPTSQPLFAFEWRDPGMGISGQLTWTRLPQGFKNSPTLFDEALHRDLADFRIQHPDLILLQYVDDILLAATSELDCQQGTRALLQTLGDLGYRASAKKAQICQKQVKYLGYLLREGQRWLTEARKETVMGQPVPKTPRQLREFLGTAGFCRLWIPGFAEMAAPLYPLTKTGTLFSWGPDQQKAYQEIKQALLTAPALGLPDLTKPFELFVDEKQGYAKGVLTQKLGPWRRPVAYLSKKLDPVAAGWPPCLRMVAAIAVLTKDAGKLTMGQPLVILAPHAVEALVKQPPDRWLSNARMTHYQAMLLDTDRVQFGPVVALNPATLLPLPEEGAPHDCLEILAETHGTRPDLTDQPIPDADHTWYTDGSSFLQEGQRKAGAAVTTETEVIWAGALPAGTSAQRAELIALTQALKMAEGKRLNVYTDSRYAFATAHIHGEIYRRRGLLTSEGREIKNKSEILALLKALFLPKRLSIIHCLGHQKGDSAEARGNRLADQAAREAAIKTPPDTSTLLAGKRTADGSEFEKRTADGSEFESPKKKAKVE

SEQ ID NO: 2065 - protein, 2096 aa, synthetic construct
MPAAKRVKLDGGDKKYSIGLDIGTNSVGWAVITDEYKVPSKKFKVLGNTDRHSIKKNLIGALLFDSGETAEATRLKRTARRRYTRRKNRICYLQEIFSNEMAKVDDSFFHRLEESFLVEEDKKHERHPIFGNIVDEVAYHEKYPTIYHLRKKLVDSTDKADLRLIYLALAHMIKFRGHFLIEGDLNPDNSDVDKLFIQLVQTYNQLFEENPINASGVDAKAILSARLSKSRRLENLIAQLPGEKKNGLFGNLIALSLGLTPNFKSNFDLAEDAKLQLSKDTYDDDLDNLLAQIGDQYADLFLAAKNLSDAILLSDILRVNTEITKAPLSASMIKRYDEHHQDLTLLKALVRQQLPEKYKEIFFDQSKNGYAGYIDGGASQEEFYKFIKPILEKMDGTEELLVKLNREDLLRKQRTFDNGSIPHQIHLGELHAILRRQEDFYPFLKDNREKIEKILTFRIPYYVGPLARGNSRFAWMTRKSEETITPWNFEEVVDKGASAQSFIERMTNFDKNLPNEKVLPKHSLLYEYFTVYNELTKVKYVTEGMRKPAFLSGEQKKAIVDLLFKTNRKVTVKQLKEDYFKKIECFDSVEISGVEDRFNASLGTYHDLLKIIKDKDFLDNEENEDILEDIVLTLTLFEDREMIEERLKTYAHLFDDKVMKQLKRRRYTGWGRLSRKLINGIRDKQSGKTILDFLKSDGFANRNFMQLIHDDSLTFKEDIQKAQVSGQGDSLHEHIANLAGSPAIKKGILQTVKVVDELVKVMGRHKPENIVIEMARENQTTQKGQKNSRERMKRIEEGIKELGSQILKEHPVENTQLQNEKLYLYYLQNGRDMYVDQELDINRLSDYDVDHIVPQSFLKDDSIDNKVLTRSDKARGKSDNVPSEEVVKKMKNYWRQLLNAKLITQRKFDNLTKAERGGLSELDKAGFIKRQLVETRQITKHVAQILDSRMNTKYDENDKLIREVKVITLKSKLVSDFRKDFQFYKVREINNYHHAHDAYLNAVVGTALIKKYPKLESEFVYGDYKVYDVRKMIAKSEQEIGKATAKYFFYSNIMNFFKTEITLANGEIRKRPLIETNGETGEIVWDKGRDFATVRKVLSMPQVNIVKKTEVQTGGFSKESILPKRNSDKLIARKKDWDPKKYGGFDSPTVAYSVLVVAKVEKGKSKKLKSVKELLGITIMERSSFEKNPIDFLEAKGYKEVKKDLIIKLPKYSLFELENGRKRMLASAGELQKGNELALPSKYVNFLYLASHYEKLKGSPEDNEQKQLFVEQHKHYLDEIIEQISEFSKRVILADANLDKVLSAYNKHRDKPIREQAENIIHLFTLTNLGAPAAFKYFDTTIDRKRYTSTKEVLDATLIHQSITGLYETRIDLSQLGGDGGPAPGSSEAAAKGGTLGIEDEYRLHETSTEPDVSLGSTWLSDFPQAWAETGGMGLAVRQAPLIIPLKATSTPVSIQQYPMSHEARLGIKPHIQRLLDQGILVPCQSPWNTPLLPVKKPGTNDYRPVQDLREVNKRVEDIHPTVPNPYNLLSGLPPSHQWYTVLDLKDAFFCLRLHPTSQPLFAFEWRDPGMGISGQLTWTRLPQGFKNSPTLFDEALHRDLADFRIQHPDLILLQYVDDILLAATSELDCQQGTRALLQTLGDLGYRASAKKAQICQKQVKYLGYLLREGQRWLTEARKETVMGQPVPKTPRQLREFLGTAGFCRLWIPGFAEMAAPLYPLTKTGTLFSWGPDQQKAYQEIKQALLTAPALGLPDLTKPFELFVDEKQGYAKGVLTQKLGPWRRPVAYLSKKLDPVAAGWPPCLRMVAAIAVLTKDAGKLTMGQPLVILAPHAVEALVKQPPDRWLSNARMTHYQAMLLDTDRVQFGPVVALNPATLLPLPEEGAPHDCLEILAETHGTRPDLTDQPIPDADHTWYTDGSSFLQEGQRKAGAAVTTETEVIWAGALPAGTSAQRAELIALTQALKMAEGKRLNVYTDSRYAFATAHIHGEIYRRRGLLTSEGREIKNKSEILALLKALFLPKRLSIIHCLGHQKGDSAEARGNRLADQAAREAAIKTPPDTSTLLAGKRTADGSEFEKRTADGSEFESPKKKAKVE

SEQ ID NO: 2066 - protein, 2115 aa, synthetic construct
MPAAKRVKLDGGDKKYSIGLDIGTNSVGWAVITDEYKVPSKKFKVLGNTDRHSIKKNLIGALLFDSGETAEATRLKRTARRRYTRRKNRICYLQEIFSNEMAKVDDSFFHRLEESFLVEEDKKHERHPIFGNIVDEVAYHEKYPTIYHLRKKLVDSTDKADLRLIYLALAHMIKFRGHFLIEGDLNPDNSDVDKLFIQLVQTYNQLFEENPINASGVDAKAILSARLSKSRRLENLIAQLPGEKKNGLFGNLIALSLGLTPNFKSNFDLAEDAKLQLSKDTYDDDLDNLLAQIGDQYADLFLAAKNLSDAILLSDILRVNTEITKAPLSASMIKRYDEHHQDLTLLKALVRQQLPEKYKEIFFDQSKNGYAGYIDGGASQEEFYKFIKPILEKMDGTEELLVKLNREDLLRKQRTFDNGSIPHQIHLGELHAILRRQEDFYPFLKDNREKIEKILTFRIPYYVGPLARGNSRFAWMTRKSEETITPWNFEEVVDKGASAQSFIERMTNFDKNLPNEKVLPKHSLLYEYFTVYNELTKVKYVTEGMRKPAFLSGEQKKAIVDLLFKTNRKVTVKQLKEDYFKKIECFDSVEISGVEDRFNASLGTYHDLLKIIKDKDFLDNEENEDILEDIVLTLTLFEDREMIEERLKTYAHLFDDKVMKQLKRRRYTGWGRLSRKLINGIRDKQSGKTILDFLKSDGFANRNFMQLIHDDSLTFKEDIQKAQVSGQGDSLHEHIANLAGSPAIKKGILQTVKVVDELVKVMGRHKPENIVIEMARENQTTQKGQKNSRERMKRIEEGIKELGSQILKEHPVENTQLQNEKLYLYYLQNGRDMYVDQELDINRLSDYDVDHIVPQSFLKDDSIDNKVLTRSDKARGKSDNVPSEEVVKKMKNYWRQLLNAKLITQRKFDNLTKAERGGLSELDKAGFIKRQLVETRQITKHVAQILDSRMNTKYDENDKLIREVKVITLKSKLVSDFRKDFQFYKVREINNYHHAHDAYLNAVVGTALIKKYPKLESEFVYGDYKVYDVRKMIAKSEQEIGKATAKYFFYSNIMNFFKTEITLANGEIRKRPLIETNGETGEIVWDKGRDFATVRKVLSMPQVNIVKKTEVQTGGFSKESILPKRNSDKLIARKKDWDPKKYGGFDSPTVAYSVLVVAKVEKGKSKKLKSVKELLGITIMERSSFEKNPIDFLEAKGYKEVKKDLIIKLPKYSLFELENGRKRMLASAGELQKGNELALPSKYVNFLYLASHYEKLKGSPEDNEQKQLFVEQHKHYLDEIIEQISEFSKRVILADANLDKVLSAYNKHRDKPIREQAENIIHLFTLTNLGAPAAFKYFDTTIDRKRYTSTKEVLDATLIHQSITGLYETRIDLSQLGGDGGGGGGSGGGGSGGGGSGGGGSGGGGSGGGGSGGTLGIEDEYRLHETSTEPDVSLGSTWLSDFPQAWAETGGMGLAVRQAPLIIPLKATSTPVSIQQYPMSHEARLGIKPHIQRLLDQGILVPCQSPWNTPLLPVKKPGTNDYRPVQDLREVNKRVEDIHPTVPNPYNLLSGLPPSHQWYTVLDLKDAFFCLRLHPTSQPLFAFEWRDPGMGISGQLTWTRLPQGFKNSPTLFDEALHRDLADFRIQHPDLILLQYVDDILLAATSELDCQQGTRALLQTLGDLGYRASAKKAQICQKQVKYLGYLLREGQRWLTEARKETVMGQPVPKTPRQLREFLGTAGFCRLWIPGFAEMAAPLYPLTKTGTLFSWGPDQQKAYQEIKQALLTAPALGLPDLTKPFELFVDEKQGYAKGVLTQKLGPWRRPVAYLSKKLDPVAAGWPPCLRMVAAIAVLTKDAGKLTMGQPLVILAPHAVEALVKQPPDRWLSNARMTHYQAMLLDTDRVQFGPVVALNPATLLPLPEEGAPHDCLEILAETHGTRPDLTDQPIPDADHTWYTDGSSFLQEGQRKAGAAVTTETEVIWAGALPAGTSAQRAELIALTQALKMAEGKRLNVYTDSRYAFATAHIHGEIYRRRGLLTSEGREIKNKSEILALLKALFLPKRLSIIHCLGHQKGDSAEARGNRLADQAAREAAIKTPPDTSTLLAGKRTADGSEFEKRTADGSEFESPKKKAKVE

SEQ ID NO: 2067 - protein, 2093 aa, synthetic construct
MPAAKRVKLDGGDKKYSIGLDIGTNSVGWAVITDEYKVPSKKFKVLGNTDRHSIKKNLIGALLFDSGETAEATRLKRTARRRYTRRKNRICYLQEIFSNEMAKVDDSFFHRLEESFLVEEDKKHERHPIFGNIVDEVAYHEKYPTIYHLRKKLVDSTDKADLRLIYLALAHMIKFRGHFLIEGDLNPDNSDVDKLFIQLVQTYNQLFEENPINASGVDAKAILSARLSKSRRLENLIAQLPGEKKNGLFGNLIALSLGLTPNFKSNFDLAEDAKLQLSKDTYDDDLDNLLAQIGDQYADLFLAAKNLSDAILLSDILRVNTEITKAPLSASMIKRYDEHHQDLTLLKALVRQQLPEKYKEIFFDQSKNGYAGYIDGGASQEEFYKFIKPILEKMDGTEELLVKLNREDLLRKQRTFDNGSIPHQIHLGELHAILRRQEDFYPFLKDNREKIEKILTFRIPYYVGPLARGNSRFAWMTRKSEETITPWNFEEVVDKGASAQSFIERMTNFDKNLPNEKVLPKHSLLYEYFTVYNELTKVKYVTEGMRKPAFLSGEQKKAIVDLLFKTNRKVTVKQLKEDYFKKIECFDSVEISGVEDRFNASLGTYHDLLKIIKDKDFLDNEENEDILEDIVLTLTLFEDREMIEERLKTYAHLFDDKVMKQLKRRRYTGWGRLSRKLINGIRDKQSGKTILDFLKSDGFANRNFMQLIHDDSLTFKEDIQKAQVSGQGDSLHEHIANLAGSPAIKKGILQTVKVVDELVKVMGRHKPENIVIEMARENQTTQKGQKNSRERMKRIEEGIKELGSQILKEHPVENTQLQNEKLYLYYLQNGRDMYVDQELDINRLSDYDVDHIVPQSFLKDDSIDNKVLTRSDKARGKSDNVPSEEVVKKMKNYWRQLLNAKLITQRKFDNLTKAERGGLSELDKAGFIKRQLVETRQITKHVAQILDSRMNTKYDENDKLIREVKVITLKSKLVSDFRKDFQFYKVREINNYHHAHDAYLNAVVGTALIKKYPKLESEFVYGDYKVYDVRKMIAKSEQEIGKATAKYFFYSNIMNFFKTEITLANGEIRKRPLIETNGETGEIVWDKGRDFATVRKVLSMPQVNIVKKTEVQTGGFSKESILPKRNSDKLIARKKDWDPKKYGGFDSPTVAYSVLVVAKVEKGKSKKLKSVKELLGITIMERSSFEKNPIDFLEAKGYKEVKKDLIIKLPKYSLFELENGRKRMLASAGELQKGNELALPSKYVNFLYLASHYEKLKGSPEDNEQKQLFVEQHKHYLDEIIEQISEFSKRVILADANLDKVLSAYNKHRDKPIREQAENIIHLFTLTNLGAPAAFKYFDTTIDRKRYTSTKEVLDATLIHQSITGLYETRIDLSQLGGDGGEAAAKPAPGGTLGIEDEYRLHETSTEPDVSLGSTWLSDFPQAWAETGGMGLAVRQAPLIIPLKATSTPVSIQQYPMSHEARLGIKPHIQRLLDQGILVPCQSPWNTPLLPVKKPGTNDYRPVQDLREVNKRVEDIHPTVPNPYNLLSGLPPSHQWYTVLDLKDAFFCLRLHPTSQPLFAFEWRDPGMGISGQLTWTRLPQGFKNSPTLFDEALHRDLADFRIQHPDLILLQYVDDILLAATSELDCQQGTRALLQTLGDLGYRASAKKAQICQKQVKYLGYLLREGQRWLTEARKETVMGQPVPKTPRQLREFLGTAGFCRLWIPGFAEMAAPLYPLTKTGTLFSWGPDQQKAYQEIKQALLTAPALGLPDLTKPFELFVDEKQGYAKGVLTQKLGPWRRPVAYLSKKLDPVAAGWPPCLRMVAAIAVLTKDAGKLTMGQPLVILAPHAVEALVKQPPDRWLSNARMTHYQAMLLDTDRVQFGPVVALNPATLLPLPEEGAPHDCLEILAETHGTRPDLTDQPIPDADHTWYTDGSSFLQEGQRKAGAAVTTETEVIWAGALPAGTSAQRAELIALTQALKMAEGKRLNVYTDSRYAFATAHIHGEIYRRRGLLTSEGREIKNKSEILALLKALFLPKRLSIIHCLGHQKGDSAEARGNRLADQAAREAAIKTPPDTSTLLAGKRTADGSEFEKRTADGSEFESPKKKAKVE

SEQ ID NO: 2068 - protein, 2096 aa, synthetic construct
MPAAKRVKLDGGDKKYSIGLDIGTNSVGWAVITDEYKVPSKKFKVLGNTDRHSIKKNLIGALLFDSGETAEATRLKRTARRRYTRRKNRICYLQEIFSNEMAKVDDSFFHRLEESFLVEEDKKHERHPIFGNIVDEVAYHEKYPTIYHLRKKLVDSTDKADLRLIYLALAHMIKFRGHFLIEGDLNPDNSDVDKLFIQLVQTYNQLFEENPINASGVDAKAILSARLSKSRRLENLIAQLPGEKKNGLFGNLIALSLGLTPNFKSNFDLAEDAKLQLSKDTYDDDLDNLLAQIGDQYADLFLAAKNLSDAILLSDILRVNTEITKAPLSASMIKRYDEHHQDLTLLKALVRQQLPEKYKEIFFDQSKNGYAGYIDGGASQEEFYKFIKPILEKMDGTEELLVKLNREDLLRKQRTFDNGSIPHQIHLGELHAILRRQEDFYPFLKDNREKIEKILTFRIPYYVGPLARGNSRFAWMTRKSEETITPWNFEEVVDKGASAQSFIERMTNFDKNLPNEKVLPKHSLLYEYFTVYNELTKVKYVTEGMRKPAFLSGEQKKAIVDLLFKTNRKVTVKQLKEDYFKKIECFDSVEISGVEDRFNASLGTYHDLLKIIKDKDFLDNEENEDILEDIVLTLTLFEDREMIEERLKTYAHLFDDKVMKQLKRRRYTGWGRLSRKLINGIRDKQSGKTILDFLKSDGFANRNFMQLIHDDSLTFKEDIQKAQVSGQGDSLHEHIANLAGSPAIKKGILQTVKVVDELVKVMGRHKPENIVIEMARENQTTQKGQKNSRERMKRIEEGIKELGSQILKEHPVENTQLQNEKLYLYYLQNGRDMYVDQELDINRLSDYDVDHIVPQSFLKDDSIDNKVLTRSDKARGKSDNVPSEEVVKKMKNYWRQLLNAKLITQRKFDNLTKAERGGLSELDKAGFIKRQLVETRQITKHVAQILDSRMNTKYDENDKLIREVKVITLKSKLVSDFRKDFQFYKVREINNYHHAHDAYLNAVVGTALIKKYPKLESEFVYGDYKVYDVRKMIAKSEQEIGKATAKYFFYSNIMNFFKTEITLANGEIRKRPLIETNGETGEIVWDKGRDFATVRKVLSMPQVNIVKKTEVQTGGFSKESILPKRNSDKLIARKKDWDPKKYGGFDSPTVAYSVLVVAKVEKGKSKKLKSVKELLGITIMERSSFEKNPIDFLEAKGYKEVKKDLIIKLPKYSLFELENGRKRMLASAGELQKGNELALPSKYVNFLYLASHYEKLKGSPEDNEQKQLFVEQHKHYLDEIIEQISEFSKRVILADANLDKVLSAYNKHRDKPIREQAENIIHLFTLTNLGAPAAFKYFDTTIDRKRYTSTKEVLDATLIHQSITGLYETRIDLSQLGGDGGGGGGGSEAAAKGGTLGIEDEYRLHETSTEPDVSLGSTWLSDFPQAWAETGGMGLAVRQAPLIIPLKATSTPVSIQQYPMSHEARLGIKPHIQRLLDQGILVPCQSPWNTPLLPVKKPGTNDYRPVQDLREVNKRVEDIHPTVPNPYNLLSGLPPSHQWYTVLDLKDAFFCLRLHPTSQPLFAFEWRDPGMGISGQLTWTRLPQGFKNSPTLFDEALHRDLADFRIQHPDLILLQYVDDILLAATSELDCQQGTRALLQTLGDLGYRASAKKAQICQKQVKYLGYLLREGQRWLTEARKETVMGQPVPKTPRQLREFLGTAGFCRLWIPGFAEMAAPLYPLTKTGTLFSWGPDQQKAYQEIKQALLTAPALGLPDLTKPFELFVDEKQGYAKGVLTQKLGPWRRPVAYLSKKLDPVAAGWPPCLRMVAAIAVLTKDAGKLTMGQPLVILAPHAVEALVKQPPDRWLSNARMTHYQAMLLDTDRVQFGPVVALNPATLLPLPEEGAPHDCLEILAETHGTRPDLTDQPIPDADHTWYTDGSSFLQEGQRKAGAAVTTETEVIWAGALPAGTSAQRAELIALTQALKMAEGKRLNVYTDSRYAFATAHIHGEIYRRRGLLTSEGREIKNKSEILALLKALFLPKRLSIIHCLGHQKGDSAEARGNRLADQAAREAAIKTPPDTSTLLAGKRTADGSEFEKRTADGSEFESPKKKAKVE

SEQ ID NO: 2069 - protein, 2096 aa, synthetic construct
MPAAKRVKLDGGDKKYSIGLDIGTNSVGWAVITDEYKVPSKKFKVLGNTDRHSIKKNLIGALLFDSGETAEATRLKRTARRRYTRRKNRICYLQEIFSNEMAKVDDSFFHRLEESFLVEEDKKHERHPIFGNIVDEVAYHEKYPTIYHLRKKLVDSTDKADLRLIYLALAHMIKFRGHFLIEGDLNPDNSDVDKLFIQLVQTYNQLFEENPINASGVDAKAILSARLSKSRRLENLIAQLPGEKKNGLFGNLIALSLGLTPNFKSNFDLAEDAKLQLSKDTYDDDLDNLLAQIGDQYADLFLAAKNLSDAILLSDILRVNTEITKAPLSASMIKRYDEHHQDLTLLKALVRQQLPEKYKEIFFDQSKNGYAGYIDGGASQEEFYKFIKPILEKMDGTEELLVKLNREDLLRKQRTFDNGSIPHQIHLGELHAILRRQEDFYPFLKDNREKIEKILTFRIPYYVGPLARGNSRFAWMTRKSEETITPWNFEEVVDKGASAQSFIERMTNFDKNLPNEKVLPKHSLLYEYFTVYNELTKVKYVTEGMRKPAFLSGEQKKAIVDLLFKTNRKVTVKQLKEDYFKKIECFDSVEISGVEDRFNASLGTYHDLLKIIKDKDFLDNEENEDILEDIVLTLTLFEDREMIEERLKTYAHLFDDKVMKQLKRRRYTGWGRLSRKLINGIRDKQSGKTILDFLKSDGFANRNFMQLIHDDSLTFKEDIQKAQVSGQGDSLHEHIANLAGSPAIKKGILQTVKVVDELVKVMGRHKPENIVIEMARENQTTQKGQKNSRERMKRIEEGIKELGSQILKEHPVENTQLQNEKLYLYYLQNGRDMYVDQELDINRLSDYDVDHIVPQSFLKDDSIDNKVLTRSDKARGKSDNVPSEEVVKKMKNYWRQLLNAKLITQRKFDNLTKAERGGLSELDKAGFIKRQLVETRQITKHVAQILDSRMNTKYDENDKLIREVKVITLKSKLVSDFRKDFQFYKVREINNYHHAHDAYLNAVVGTALIKKYPKLESEFVYGDYKVYDVRKMIAKSEQEIGKATAKYFFYSNIMNFFKTEITLANGEIRKRPLIETNGETGEIVWDKGRDFATVRKVLSMPQVNIVKKTEVQTGGFSKESILPKRNSDKLIARKKDWDPKKYGGFDSPTVAYSVLVVAKVEKGKSKKLKSVKELLGITIMERSSFEKNPIDFLEAKGYKEVKKDLIIKLPKYSLFELENGRKRMLASAGELQKGNELALPSKYVNFLYLASHYEKLKGSPEDNEQKQLFVEQHKHYLDEIIEQISEFSKRVILADANLDKVLSAYNKHRDKPIREQAENIIHLFTLTNLGAPAAFKYFDTTIDRKRYTSTKEVLDATLIHQSITGLYETRIDLSQLGGDGGGGSEAAAKPAPGGTLGIEDEYRLHETSTEPDVSLGSTWLSDFPQAWAETGGMGLAVRQAPLIIPLKATSTPVSIQQYPMSHEARLGIKPHIQRLLDQGILVPCQSPWNTPLLPVKKPGTNDYRPVQDLREVNKRVEDIHPTVPNPYNLLSGLPPSHQWYTVLDLKDAFFCLRLHPTSQPLFAFEWRDPGMGISGQLTWTRLPQGFKNSPTLFDEALHRDLADFRIQHPDLILLQYVDDILLAATSELDCQQGTRALLQTLGDLGYRASAKKAQICQKQVKYLGYLLREGQRWLTEARKETVMGQPVPKTPRQLREFLGTAGFCRLWIPGFAEMAAPLYPLTKTGTLFSWGPDQQKAYQEIKQALLTAPALGLPDLTKPFELFVDEKQGYAKGVLTQKLGPWRRPVAYLSKKLDPVAAGWPPCLRMVAAIAVLTKDAGKLTMGQPLVILAPHAVEALVKQPPDRWLSNARMTHYQAMLLDTDRVQFGPVVALNPATLLPLPEEGAPHDCLEILAETHGTRPDLTDQPIPDADHTWYTDGSSFLQEGQRKAGAAVTTETEVIWAGALPAGTSAQRAELIALTQALKMAEGKRLNVYTDSRYAFATAHIHGEIYRRRGLLTSEGREIKNKSEILALLKALFLPKRLSIIHCLGHQKGDSAEARGNRLADQAAREAAIKTPPDTSTLLAGKRTADGSEFEKRTADGSEFESPKKKAKVE

SEQ ID NO: 2070 - protein, 2105 aa, synthetic construct
MPAAKRVKLDGGDKKYSIGLDIGTNSVGWAVITDEYKVPSKKFKVLGNTDRHSIKKNLIGALLFDSGETAEATRLKRTARRRYTRRKNRICYLQEIFSNEMAKVDDSFFHRLEESFLVEEDKKHERHPIFGNIVDEVAYHEKYPTIYHLRKKLVDSTDKADLRLIYLALAHMIKFRGHFLIEGDLNPDNSDVDKLFIQLVQTYNQLFEENPINASGVDAKAILSARLSKSRRLENLIAQLPGEKKNGLFGNLIALSLGLTPNFKSNFDLAEDAKLQLSKDTYDDDLDNLLAQIGDQYADLFLAAKNLSDAILLSDILRVNTEITKAPLSASMIKRYDEHHQDLTLLKALVRQQLPEKYKEIFFDQSKNGYAGYIDGGASQEEFYKFIKPILEKMDGTEELLVKLNREDLLRKQRTFDNGSIPHQIHLGELHAILRRQEDFYPFLKDNREKIEKILTFRIPYYVGPLARGNSRFAWMTRKSEETITPWNFEEVVDKGASAQSFIERMTNFDKNLPNEKVLPKHSLLYEYFTVYNELTKVKYVTEGMRKPAFLSGEQKKAIVDLLFKTNRKVTVKQLKEDYFKKIECFDSVEISGVEDRFNASLGTYHDLLKIIKDKDFLDNEENEDILEDIVLTLTLFEDREMIEERLKTYAHLFDDKVMKQLKRRRYTGWGRLSRKLINGIRDKQSGKTILDFLKSDGFANRNFMQLIHDDSLTFKEDIQKAQVSGQGDSLHEHIANLAGSPAIKKGILQTVKVVDELVKVMGRHKPENIVIEMARENQTTQKGQKNSRERMKRIEEGIKELGSQILKEHPVENTQLQNEKLYLYYLQNGRDMYVDQELDINRLSDYDVDHIVPQSFLKDDSIDNKVLTRSDKARGKSDNVPSEEVVKKMKNYWRQLLNAKLITQRKFDNLTKAERGGLSELDKAGFIKRQLVETRQITKHVAQILDSRMNTKYDENDKLIREVKVITLKSKLVSDFRKDFQFYKVREINNYHHAHDAYLNAVVGTALIKKYPKLESEFVYGDYKVYDVRKMIAKSEQEIGKATAKYFFYSNIMNFFKTEITLANGEIRKRPLIETNGETGEIVWDKGRDFATVRKVLSMPQVNIVKKTEVQTGGFSKESILPKRNSDKLIARKKDWDPKKYGGFDSPTVAYSVLVVAKVEKGKSKKLKSVKELLGITIMERSSFEKNPIDFLEAKGYKEVKKDLIIKLPKYSLFELENGRKRMLASAGELQKGNELALPSKYVNFLYLASHYEKLKGSPEDNEQKQLFVEQHKHYLDEIIEQISEFSKRVILADANLDKVLSAYNKHRDKPIREQAENIIHLFTLTNLGAPAAFKYFDTTIDRKRYTSTKEVLDATLIHQSITGLYETRIDLSQLGGDGGEAAAKEAAAKEAAAKEAAAKGGTLGIEDEYRLHETSTEPDVSLGSTWLSDFPQAWAETGGMGLAVRQAPLIIPLKATSTPVSIQQYPMSHEARLGIKPHIQRLLDQGILVPCQSPWNTPLLPVKKPGTNDYRPVQDLREVNKRVEDIHPTVPNPYNLLSGLPPSHQWYTVLDLKDAFFCLRLHPTSQPLFAFEWRDPGMGISGQLTWTRLPQGFKNSPTLFNEALHRDLADFRIQHPDLILLQYVDDILLAATSELDCQQGTRALLQTLGDLGYRASAKKAQICQKQVKYLGYLLREGQRWLTEARKETVMGQPVPKTPRQLREFLGTAGFCRLWIPGFAEMAAPLYPLTKPGTLFSWGPDQQKAYQEIKQALLTAPALGLPDLTKPFELFVDEKQGYAKGVLTQKLGPWRRPVAYLSKKLDPVAAGWPPCLRMVAAIAVLTKDAGKLTMGQPLVILAPHAVEALVKQPPDRWLSNARMTHYQAMLLDTDRVQFGPVVALNPATLLPLPEEGAPHDCLEILAETHGTRPDLTDQPIPDADHTWYTDGSSFLQEGQRKAGAAVTTETEVIWAGALPAGTSAQRAELIALTQALKMAEGKRLNVYTDSRYAFATAHIHGEIYRRRGWLTSEGREIKNKSEILALLKALFLPKRLSIIHCLGHQKGDSAEARGNRLADQAAREAAIKTPPDTSTLLAGKRTADGSEFEKRTADGSEFESPKKKAKVE

SEQ ID NO: 2071 - protein, 2096 aa, synthetic construct
MPAAKRVKLDGGDKKYSIGLDIGTNSVGWAVITDEYKVPSKKFKVLGNTDRHSIKKNLIGALLFDSGETAEATRLKRTARRRYTRRKNRICYLQEIFSNEMAKVDDSFFHRLEESFLVEEDKKHERHPIFGNIVDEVAYHEKYPTIYHLRKKLVDSTDKADLRLIYLALAHMIKFRGHFLIEGDLNPDNSDVDKLFIQLVQTYNQLFEENPINASGVDAKAILSARLSKSRRLENLIAQLPGEKKNGLFGNLIALSLGLTPNFKSNFDLAEDAKLQLSKDTYDDDLDNLLAQIGDQYADLFLAAKNLSDAILLSDILRVNTEITKAPLSASMIKRYDEHHQDLTLLKALVRQQLPEKYKEIFFDQSKNGYAGYIDGGASQEEFYKFIKPILEKMDGTEELLVKLNREDLLRKQRTFDNGSIPHQIHLGELHAILRRQEDFYPFLKDNREKIEKILTFRIPYYVGPLARGNSRFAWMTRKSEETITPWNFEEVVDKGASAQSFIERMTNFDKNLPNEKVLPKHSLLYEYFTVYNELTKVKYVTEGMRKPAFLSGEQKKAIVDLLFKTNRKVTVKQLKEDYFKKIECFDSVEISGVEDRFNASLGTYHDLLKIIKDKDFLDNEENEDILEDIVLTLTLFEDREMIEERLKTYAHLFDDKVMKQLKRRRYTGWGRLSRKLINGIRDKQSGKTILDFLKSDGFANRNFMQLIHDDSLTFKEDIQKAQVSGQGDSLHEHIANLAGSPAIKKGILQTVKVVDELVKVMGRHKPENIVIEMARENQTTQKGQKNSRERMKRIEEGIKELGSQILKEHPVENTQLQNEKLYLYYLQNGRDMYVDQELDINRLSDYDVDHIVPQSFLKDDSIDNKVLTRSDKARGKSDNVPSEEVVKKMKNYWRQLLNAKLITQRKFDNLTKAERGGLSELDKAGFIKRQLVETRQITKHVAQILDSRMNTKYDENDKLIREVKVITLKSKLVSDFRKDFQFYKVREINNYHHAHDAYLNAVVGTALIKKYPKLESEFVYGDYKVYDVRKMIAKSEQEIGKATAKYFFYSNIMNFFKTEITLANGEIRKRPLIETNGETGEIVWDKGRDFATVRKVLSMPQVNIVKKTEVQTGGFSKESILPKRNSDKLIARKKDWDPKKYGGFDSPTVAYSVLVVAKVEKGKSKKLKSVKELLGITIMERSSFEKNPIDFLEAKGYKEVKKDLIIKLPKYSLFELENGRKRMLASAGELQKGNELALPSKYVNFLYLASHYEKLKGSPEDNEQKQLFVEQHKHYLDEIIEQISEFSKRVILADANLDKVLSAYNKHRDKPIREQAENIIHLFTLTNLGAPAAFKYFDTTIDRKRYTSTKEVLDATLIHQSITGLYETRIDLSQLGGDGGGGSEAAAKPAPGGTLGIEDEYRLHETSTEPDVSLGSTWLSDFPQAWAETGGMGLAVRQAPLIIPLKATSTPVSIQQYPMSHEARLGIKPHIQRLLDQGILVPCQSPWNTPLLPVKKPGTNDYRPVQDLREVNKRVEDIHPTVPNPYNLLSGLPPSHQWYTVLDLKDAFFCLRLHPTSQPLFAFEWRDPGMGISGQLTWTRLPQGFKNSPTLFNEALHRDLADFRIQHPDLILLQYVDDILLAATSELDCQQGTRALLQTLGDLGYRASAKKAQICQKQVKYLGYLLREGQRWLTEARKETVMGQPVPKTPRQLREFLGTAGFCRLWIPGFAEMAAPLYPLTKPGTLFSWGPDQQKAYQEIKQALLTAPALGLPDLTKPFELFVDEKQGYAKGVLTQKLGPWRRPVAYLSKKLDPVAAGWPPCLRMVAAIAVLTKDAGKLTMGQPLVILAPHAVEALVKQPPDRWLSNARMTHYQAMLLDTDRVQFGPVVALNPATLLPLPEEGAPHDCLEILAETHGTRPDLTDQPIPDADHTWYTDGSSFLQEGQRKAGAAVTTETEVIWAGALPAGTSAQRAELIALTQALKMAEGKRLNVYTDSRYAFATAHIHGEIYRRRGWLTSEGREIKNKSEILALLKALFLPKRLSIIHCLGHQKGDSAEARGNRLADQAAREAAIKTPPDTSTLLAGKRTADGSEFEKRTADGSEFESPKKKAKVE

SEQ ID NO: 2072 - protein, 2105 aa, synthetic construct
MPAAKRVKLDGGDKKYSIGLDIGTNSVGWAVITDEYKVPSKKFKVLGNTDRHSIKKNLIGALLFDSGETAEATRLKRTARRRYTRRKNRICYLQEIFSNEMAKVDDSFFHRLEESFLVEEDKKHERHPIFGNIVDEVAYHEKYPTIYHLRKKLVDSTDKADLRLIYLALAHMIKFRGHFLIEGDLNPDNSDVDKLFIQLVQTYNQLFEENPINASGVDAKAILSARLSKSRRLENLIAQLPGEKKNGLFGNLIALSLGLTPNFKSNFDLAEDAKLQLSKDTYDDDLDNLLAQIGDQYADLFLAAKNLSDAILLSDILRVNTEITKAPLSASMIKRYDEHHQDLTLLKALVRQQLPEKYKEIFFDQSKNGYAGYIDGGASQEEFYKFIKPILEKMDGTEELLVKLNREDLLRKQRTFDNGSIPHQIHLGELHAILRRQEDFYPFLKDNREKIEKILTFRIPYYVGPLARGNSRFAWMTRKSEETITPWNFEEVVDKGASAQSFIERMTNFDKNLPNEKVLPKHSLLYEYFTVYNELTKVKYVTEGMRKPAFLSGEQKKAIVDLLFKTNRKVTVKQLKEDYFKKIECFDSVEISGVEDRFNASLGTYHDLLKIIKDKDFLDNEENEDILEDIVLTLTLFEDREMIEERLKTYAHLFDDKVMKQLKRRRYTGWGRLSRKLINGIRDKQSGKTILDFLKSDGFANRNFMQLIHDDSLTFKEDIQKAQVSGQGDSLHEHIANLAGSPAIKKGILQTVKVVDELVKVMGRHKPENIVIEMARENQTTQKGQKNSRERMKRIEEGIKELGSQILKEHPVENTQLQNEKLYLYYLQNGRDMYVDQELDINRLSDYDVDHIVPQSFLKDDSIDNKVLTRSDKARGKSDNVPSEEVVKKMKNYWRQLLNAKLITQRKFDNLTKAERGGLSELDKAGFIKRQLVETRQITKHVAQILDSRMNTKYDENDKLIREVKVITLKSKLVSDFRKDFQFYKVREINNYHHAHDAYLNAVVGTALIKKYPKLESEFVYGDYKVYDVRKMIAKSEQEIGKATAKYFFYSNIMNFFKTEITLANGEIRKRPLIETNGETGEIVWDKGRDFATVRKVLSMPQVNIVKKTEVQTGGFSKESILPKRNSDKLIARKKDWDPKKYGGFDSPTVAYSVLVVAKVEKGKSKKLKSVKELLGITIMERSSFEKNPIDFLEAKGYKEVKKDLIIKLPKYSLFELENGRKRMLASAGELQKGNELALPSKYVNFLYLASHYEKLKGSPEDNEQKQLFVEQHKHYLDEIIEQISEFSKRVILADANLDKVLSAYNKHRDKPIREQAENIIHLFTLTNLGAPAAFKYFDTTIDRKRYTSTKEVLDATLIHQSITGLYETRIDLSQLGGDGGGGGGSGGGGSGGGGSGGGGSGGTLGIEDEYRLHETSTEPDVSLGSTWLSDFPQAWAETGGMGLAVRQAPLIIPLKATSTPVSIQQYPMSHEARLGIKPHIQRLLDQGILVPCQSPWNTPLLPVKKPGTNDYRPVQDLREVNKRVEDIHPTVPNPYNLLSGLPPSHQWYTVLDLKDAFFCLRLHPTSQPLFAFEWRDPGMGISGQLTWTRLPQGFKNSPTLFNEALHRDLADFRIQHPDLILLQYVDDILLAATSELDCQQGTRALLQTLGDLGYRASAKKAQICQKQVKYLGYLLREGQRWLTEARKETVMGQPVPKTPRQLREFLGTAGFCRLWIPGFAEMAAPLYPLTKPGTLFSWGPDQQKAYQEIKQALLTAPALGLPDLTKPFELFVDEKQGYAKGVLTQKLGPWRRPVAYLSKKLDPVAAGWPPCLRMVAAIAVLTKDAGKLTMGQPLVILAPHAVEALVKQPPDRWLSNARMTHYQAMLLDTDRVQFGPVVALNPATLLPLPEEGAPHDCLEILAETHGTRPDLTDQPIPDADHTWYTDGSSFLQEGQRKAGAAVTTETEVIWAGALPAGTSAQRAELIALTQALKMAEGKRLNVYTDSRYAFATAHIHGEIYRRRGWLTSEGREIKNKSEILALLKALFLPKRLSIIHCLGHQKGDSAEARGNRLADQAAREAAIKTPPDTSTLLAGKRTADGSEFEKRTADGSEFESPKKKAKVE

SEQ ID NO: 2073 - protein, 2093 aa, synthetic construct
MPAAKRVKLDGGDKKYSIGLDIGTNSVGWAVITDEYKVPSKKFKVLGNTDRHSIKKNLIGALLFDSGETAEATRLKRTARRRYTRRKNRICYLQEIFSNEMAKVDDSFFHRLEESFLVEEDKKHERHPIFGNIVDEVAYHEKYPTIYHLRKKLVDSTDKADLRLIYLALAHMIKFRGHFLIEGDLNPDNSDVDKLFIQLVQTYNQLFEENPINASGVDAKAILSARLSKSRRLENLIAQLPGEKKNGLFGNLIALSLGLTPNFKSNFDLAEDAKLQLSKDTYDDDLDNLLAQIGDQYADLFLAAKNLSDAILLSDILRVNTEITKAPLSASMIKRYDEHHQDLTLLKALVRQQLPEKYKEIFFDQSKNGYAGYIDGGASQEEFYKFIKPILEKMDGTEELLVKLNREDLLRKQRTFDNGSIPHQIHLGELHAILRRQEDFYPFLKDNREKIEKILTFRIPYYVGPLARGNSRFAWMTRKSEETITPWNFEEVVDKGASAQSFIERMTNFDKNLPNEKVLPKHSLLYEYFTVYNELTKVKYVTEGMRKPAFLSGEQKKAIVDLLFKTNRKVTVKQLKEDYFKKIECFDSVEISGVEDRFNASLGTYHDLLKIIKDKDFLDNEENEDILEDIVLTLTLFEDREMIEERLKTYAHLFDDKVMKQLKRRRYTGWGRLSRKLINGIRDKQSGKTILDFLKSDGFANRNFMQLIHDDSLTFKEDIQKAQVSGQGDSLHEHIANLAGSPAIKKGILQTVKVVDELVKVMGRHKPENIVIEMARENQTTQKGQKNSRERMKRIEEGIKELGSQILKEHPVENTQLQNEKLYLYYLQNGRDMYVDQELDINRLSDYDVDHIVPQSFLKDDSIDNKVLTRSDKARGKSDNVPSEEVVKKMKNYWRQLLNAKLITQRKFDNLTKAERGGLSELDKAGFIKRQLVETRQITKHVAQILDSRMNTKYDENDKLIREVKVITLKSKLVSDFRKDFQFYKVREINNYHHAHDAYLNAVVGTALIKKYPKLESEFVYGDYKVYDVRKMIAKSEQEIGKATAKYFFYSNIMNFFKTEITLANGEIRKRPLIETNGETGEIVWDKGRDFATVRKVLSMPQVNIVKKTEVQTGGFSKESILPKRNSDKLIARKKDWDPKKYGGFDSPTVAYSVLVVAKVEKGKSKKLKSVKELLGITIMERSSFEKNPIDFLEAKGYKEVKKDLIIKLPKYSLFELENGRKRMLASAGELQKGNELALPSKYVNFLYLASHYEKLKGSPEDNEQKQLFVEQHKHYLDEIIEQISEFSKRVILADANLDKVLSAYNKHRDKPIREQAENIIHLFTLTNLGAPAAFKYFDTTIDRKRYTSTKEVLDATLIHQSITGLYETRIDLSQLGGDGGGSSEAAAKGGTLGIEDEYRLHETSTEPDVSLGSTWLSDFPQAWAETGGMGLAVRQAPLIIPLKATSTPVSIQQYPMSHEARLGIKPHIQRLLDQGILVPCQSPWNTPLLPVKKPGTNDYRPVQDLREVNKRVEDIHPTVPNPYNLLSGLPPSHQWYTVLDLKDAFFCLRLHPTSQPLFAFEWRDPGMGISGQLTWTRLPQGFKNSPTLFNEALHRDLADFRIQHPDLILLQYVDDILLAATSELDCQQGTRALLQTLGDLGYRASAKKAQICQKQVKYLGYLLREGQRWLTEARKETVMGQPVPKTPRQLREFLGTAGFCRLWIPGFAEMAAPLYPLTKPGTLFSWGPDQQKAYQEIKQALLTAPALGLPDLTKPFELFVDEKQGYAKGVLTQKLGPWRRPVAYLSKKLDPVAAGWPPCLRMVAAIAVLTKDAGKLTMGQPLVILAPHAVEALVKQPPDRWLSNARMTHYQAMLLDTDRVQFGPVVALNPATLLPLPEEGAPHDCLEILAETHGTRPDLTDQPIPDADHTWYTDGSSFLQEGQRKAGAAVTTETEVIWAGALPAGTSAQRAELIALTQALKMAEGKRLNVYTDSRYAFATAHIHGEIYRRRGWLTSEGREIKNKSEILALLKALFLPKRLSIIHCLGHQKGDSAEARGNRLADQAAREAAIKTPPDTSTLLAGKRTADGSEFEKRTADGSEFESPKKKAKVE

SEQ ID NO: 2074 - protein, 2096 aa, synthetic construct
MPAAKRVKLDGGDKKYSIGLDIGTNSVGWAVITDEYKVPSKKFKVLGNTDRHSIKKNLIGALLFDSGETAEATRLKRTARRRYTRRKNRICYLQEIFSNEMAKVDDSFFHRLEESFLVEEDKKHERHPIFGNIVDEVAYHEKYPTIYHLRKKLVDSTDKADLRLIYLALAHMIKFRGHFLIEGDLNPDNSDVDKLFIQLVQTYNQLFEENPINASGVDAKAILSARLSKSRRLENLIAQLPGEKKNGLFGNLIALSLGLTPNFKSNFDLAEDAKLQLSKDTYDDDLDNLLAQIGDQYADLFLAAKNLSDAILLSDILRVNTEITKAPLSASMIKRYDEHHQDLTLLKALVRQQLPEKYKEIFFDQSKNGYAGYIDGGASQEEFYKFIKPILEKMDGTEELLVKLNREDLLRKQRTFDNGSIPHQIHLGELHAILRRQEDFYPFLKDNREKIEKILTFRIPYYVGPLARGNSRFAWMTRKSEETITPWNFEEVVDKGASAQSFIERMTNFDKNLPNEKVLPKHSLLYEYFTVYNELTKVKYVTEGMRKPAFLSGEQKKAIVDLLFKTNRKVTVKQLKEDYFKKIECFDSVEISGVEDRFNASLGTYHDLLKIIKDKDFLDNEENEDILEDIVLTLTLFEDREMIEERLKTYAHLFDDKVMKQLKRRRYTGWGRLSRKLINGIRDKQSGKTILDFLKSDGFANRNFMQLIHDDSLTFKEDIQKAQVSGQGDSLHEHIANLAGSPAIKKGILQTVKVVDELVKVMGRHKPENIVIEMARENQTTQKGQKNSRERMKRIEEGIKELGSQILKEHPVENTQLQNEKLYLYYLQNGRDMYVDQELDINRLSDYDVDHIVPQSFLKDDSIDNKVLTRSDKARGKSDNVPSEEVVKKMKNYWRQLLNAKLITQRKFDNLTKAERGGLSELDKAGFIKRQLVETRQITKHVAQILDSRMNTKYDENDKLIREVKVITLKSKLVSDFRKDFQFYKVREINNYHHAHDAYLNAVVGTALIKKYPKLESEFVYGDYKVYDVRKMIAKSEQEIGKATAKYFFYSNIMNFFKTEITLANGEIRKRPLIETNGETGEIVWDKGRDFATVRKVLSMPQVNIVKKTEVQTGGFSKESILPKRNSDKLIARKKDWDPKKYGGFDSPTVAYSVLVVAKVEKGKSKKLKSVKELLGITIMERSSFEKNPIDFLEAKGYKEVKKDLIIKLPKYSLFELENGRKRMLASAGELQKGNELALPSKYVNFLYLASHYEKLKGSPEDNEQKQLFVEQHKHYLDEIIEQISEFSKRVILADANLDKVLSAYNKHRDKPIREQAENIIHLFTLTNLGAPAAFKYFDTTIDRKRYTSTKEVLDATLIHQSITGLYETRIDLSQLGGDGGGGSEAAAKGGGGGTLGIEDEYRLHETSTEPDVSLGSTWLSDFPQAWAETGGMGLAVRQAPLIIPLKATSTPVSIQQYPMSHEARLGIKPHIQRLLDQGILVPCQSPWNTPLLPVKKPGTNDYRPVQDLREVNKRVEDIHPTVPNPYNLLSGLPPSHQWYTVLDLKDAFFCLRLHPTSQPLFAFEWRDPGMGISGQLTWTRLPQGFKNSPTLFNEALHRDLADFRIQHPDLILLQYVDDILLAATSELDCQQGTRALLQTLGDLGYRASAKKAQICQKQVKYLGYLLREGQRWLTEARKETVMGQPVPKTPRQLREFLGTAGFCRLWIPGFAEMAAPLYPLTKPGTLFSWGPDQQKAYQEIKQALLTAPALGLPDLTKPFELFVDEKQGYAKGVLTQKLGPWRRPVAYLSKKLDPVAAGWPPCLRMVAAIAVLTKDAGKLTMGQPLVILAPHAVEALVKQPPDRWLSNARMTHYQAMLLDTDRVQFGPVVALNPATLLPLPEEGAPHDCLEILAETHGTRPDLTDQPIPDADHTWYTDGSSFLQEGQRKAGAAVTTETEVIWAGALPAGTSAQRAELIALTQALKMAEGKRLNVYTDSRYAFATAHIHGEIYRRRGWLTSEGREIKNKSEILALLKALFLPKRLSIIHCLGHQKGDSAEARGNRLADQAAREAAIKTPPDTSTLLAGKRTADGSEFEKRTADGSEFESPKKKAKVE

SEQ ID NO: 2075 - protein, 2096 aa, synthetic construct
MPAAKRVKLDGGDKKYSIGLDIGTNSVGWAVITDEYKVPSKKFKVLGNTDRHSIKKNLIGALLFDSGETAEATRLKRTARRRYTRRKNRICYLQEIFSNEMAKVDDSFFHRLEESFLVEEDKKHERHPIFGNIVDEVAYHEKYPTIYHLRKKLVDSTDKADLRLIYLALAHMIKFRGHFLIEGDLNPDNSDVDKLFIQLVQTYNQLFEENPINASGVDAKAILSARLSKSRRLENLIAQLPGEKKNGLFGNLIALSLGLTPNFKSNFDLAEDAKLQLSKDTYDDDLDNLLAQIGDQYADLFLAAKNLSDAILLSDILRVNTEITKAPLSASMIKRYDEHHQDLTLLKALVRQQLPEKYKEIFFDQSKNGYAGYIDGGASQEEFYKFIKPILEKMDGTEELLVKLNREDLLRKQRTFDNGSIPHQIHLGELHAILRRQEDFYPFLKDNREKIEKILTFRIPYYVGPLARGNSRFAWMTRKSEETITPWNFEEVVDKGASAQSFIERMTNFDKNLPNEKVLPKHSLLYEYFTVYNELTKVKYVTEGMRKPAFLSGEQKKAIVDLLFKTNRKVTVKQLKEDYFKKIECFDSVEISGVEDRFNASLGTYHDLLKIIKDKDFLDNEENEDILEDIVLTLTLFEDREMIEERLKTYAHLFDDKVMKQLKRRRYTGWGRLSRKLINGIRDKQSGKTILDFLKSDGFANRNFMQLIHDDSLTFKEDIQKAQVSGQGDSLHEHIANLAGSPAIKKGILQTVKVVDELVKVMGRHKPENIVIEMARENQTTQKGQKNSRERMKRIEEGIKELGSQILKEHPVENTQLQNEKLYLYYLQNGRDMYVDQELDINRLSDYDVDHIVPQSFLKDDSIDNKVLTRSDKARGKSDNVPSEEVVKKMKNYWRQLLNAKLITQRKFDNLTKAERGGLSELDKAGFIKRQLVETRQITKHVAQILDSRMNTKYDENDKLIREVKVITLKSKLVSDFRKDFQFYKVREINNYHHAHDAYLNAVVGTALIKKYPKLESEFVYGDYKVYDVRKMIAKSEQEIGKATAKYFFYSNIMNFFKTEITLANGEIRKRPLIETNGETGEIVWDKGRDFATVRKVLSMPQVNIVKKTEVQTGGFSKESILPKRNSDKLIARKKDWDPKKYGGFDSPTVAYSVLVVAKVEKGKSKKLKSVKELLGITIMERSSFEKNPIDFLEAKGYKEVKKDLIIKLPKYSLFELENGRKRMLASAGELQKGNELALPSKYVNFLYLASHYEKLKGSPEDNEQKQLFVEQHKHYLDEIIEQISEFSKRVILADANLDKVLSAYNKHRDKPIREQAENIIHLFTLTNLGAPAAFKYFDTTIDRKRYTSTKEVLDATLIHQSITGLYETRIDLSQLGGDGGGSSEAAAKGGGGGTLGIEDEYRLHETSTEPDVSLGSTWLSDFPQAWAETGGMGLAVRQAPLIIPLKATSTPVSIQQYPMSHEARLGIKPHIQRLLDQGILVPCQSPWNTPLLPVKKPGTNDYRPVQDLREVNKRVEDIHPTVPNPYNLLSGLPPSHQWYTVLDLKDAFFCLRLHPTSQPLFAFEWRDPGMGISGQLTWTRLPQGFKNSPTLFNEALHRDLADFRIQHPDLILLQYVDDILLAATSELDCQQGTRALLQTLGDLGYRASAKKAQICQKQVKYLGYLLREGQRWLTEARKETVMGQPVPKTPRQLREFLGTAGFCRLWIPGFAEMAAPLYPLTKPGTLFSWGPDQQKAYQEIKQALLTAPALGLPDLTKPFELFVDEKQGYAKGVLTQKLGPWRRPVAYLSKKLDPVAAGWPPCLRMVAAIAVLTKDAGKLTMGQPLVILAPHAVEALVKQPPDRWLSNARMTHYQAMLLDTDRVQFGPVVALNPATLLPLPEEGAPHDCLEILAETHGTRPDLTDQPIPDADHTWYTDGSSFLQEGQRKAGAAVTTETEVIWAGALPAGTSAQRAELIALTQALKMAEGKRLNVYTDSRYAFATAHIHGEIYRRRGWLTSEGREIKNKSEILALLKALFLPKRLSIIHCLGHQKGDSAEARGNRLADQAAREAAIKTPPDTSTLLAGKRTADGSEFEKRTADGSEFESPKKKAKVE

SEQ ID NO: 2076 - protein, 2096 aa, synthetic construct
MPAAKRVKLDGGDKKYSIGLDIGTNSVGWAVITDEYKVPSKKFKVLGNTDRHSIKKNLIGALLFDSGETAEATRLKRTARRRYTRRKNRICYLQEIFSNEMAKVDDSFFHRLEESFLVEEDKKHERHPIFGNIVDEVAYHEKYPTIYHLRKKLVDSTDKADLRLIYLALAHMIKFRGHFLIEGDLNPDNSDVDKLFIQLVQTYNQLFEENPINASGVDAKAILSARLSKSRRLENLIAQLPGEKKNGLFGNLIALSLGLTPNFKSNFDLAEDAKLQLSKDTYDDDLDNLLAQIGDQYADLFLAAKNLSDAILLSDILRVNTEITKAPLSASMIKRYDEHHQDLTLLKALVRQQLPEKYKEIFFDQSKNGYAGYIDGGASQEEFYKFIKPILEKMDGTEELLVKLNREDLLRKQRTFDNGSIPHQIHLGELHAILRRQEDFYPFLKDNREKIEKILTFRIPYYVGPLARGNSRFAWMTRKSEETITPWNFEEVVDKGASAQSFIERMTNFDKNLPNEKVLPKHSLLYEYFTVYNELTKVKYVTEGMRKPAFLSGEQKKAIVDLLFKTNRKVTVKQLKEDYFKKIECFDSVEISGVEDRFNASLGTYHDLLKIIKDKDFLDNEENEDILEDIVLTLTLFEDREMIEERLKTYAHLFDDKVMKQLKRRRYTGWGRLSRKLINGIRDKQSGKTILDFLKSDGFANRNFMQLIHDDSLTFKEDIQKAQVSGQGDSLHEHIANLAGSPAIKKGILQTVKVVDELVKVMGRHKPENIVIEMARENQTTQKGQKNSRERMKRIEEGIKELGSQILKEHPVENTQLQNEKLYLYYLQNGRDMYVDQELDINRLSDYDVDHIVPQSFLKDDSIDNKVLTRSDKARGKSDNVPSEEVVKKMKNYWRQLLNAKLITQRKFDNLTKAERGGLSELDKAGFIKRQLVETRQITKHVAQILDSRMNTKYDENDKLIREVKVITLKSKLVSDFRKDFQFYKVREINNYHHAHDAYLNAVVGTALIKKYPKLESEFVYGDYKVYDVRKMIAKSEQEIGKATAKYFFYSNIMNFFKTEITLANGEIRKRPLIETNGETGEIVWDKGRDFATVRKVLSMPQVNIVKKTEVQTGGFSKESILPKRNSDKLIARKKDWDPKKYGGFDSPTVAYSVLVVAKVEKGKSKKLKSVKELLGITIMERSSFEKNPIDFLEAKGYKEVKKDLIIKLPKYSLFELENGRKRMLASAGELQKGNELALPSKYVNFLYLASHYEKLKGSPEDNEQKQLFVEQHKHYLDEIIEQISEFSKRVILADANLDKVLSAYNKHRDKPIREQAENIIHLFTLTNLGAPAAFKYFDTTIDRKRYTSTKEVLDATLIHQSITGLYETRIDLSQLGGDGGGSSGGSEAAAKGGTLGIEDEYRLHETSTEPDVSLGSTWLSDFPQAWAETGGMGLAVRQAPLIIPLKATSTPVSIQQYPMSHEARLGIKPHIQRLLDQGILVPCQSPWNTPLLPVKKPGTNDYRPVQDLREVNKRVEDIHPTVPNPYNLLSGLPPSHQWYTVLDLKDAFFCLRLHPTSQPLFAFEWRDPGMGISGQLTWTRLPQGFKNSPTLFNEALHRDLADFRIQHPDLILLQYVDDILLAATSELDCQQGTRALLQTLGDLGYRASAKKAQICQKQVKYLGYLLREGQRWLTEARKETVMGQPVPKTPRQLREFLGTAGFCRLWIPGFAEMAAPLYPLTKPGTLFSWGPDQQKAYQEIKQALLTAPALGLPDLTKPFELFVDEKQGYAKGVLTQKLGPWRRPVAYLSKKLDPVAAGWPPCLRMVAAIAVLTKDAGKLTMGQPLVILAPHAVEALVKQPPDRWLSNARMTHYQAMLLDTDRVQFGPVVALNPATLLPLPEEGAPHDCLEILAETHGTRPDLTDQPIPDADHTWYTDGSSFLQEGQRKAGAAVTTETEVIWAGALPAGTSAQRAELIALTQALKMAEGKRLNVYTDSRYAFATAHIHGEIYRRRGWLTSEGREIKNKSEILALLKALFLPKRLSIIHCLGHQKGDSAEARGNRLADQAAREAAIKTPPDTSTLLAGKRTADGSEFEKRTADGSEFESPKKKAKVE

SEQ ID NO: 2077 - protein, 2090 aa, synthetic construct
MPAAKRVKLDGGDKKYSIGLDIGTNSVGWAVITDEYKVPSKKFKVLGNTDRHSIKKNLIGALLFDSGETAEATRLKRTARRRYTRRKNRICYLQEIFSNEMAKVDDSFFHRLEESFLVEEDKKHERHPIFGNIVDEVAYHEKYPTIYHLRKKLVDSTDKADLRLIYLALAHMIKFRGHFLIEGDLNPDNSDVDKLFIQLVQTYNQLFEENPINASGVDAKAILSARLSKSRRLENLIAQLPGEKKNGLFGNLIALSLGLTPNFKSNFDLAEDAKLQLSKDTYDDDLDNLLAQIGDQYADLFLAAKNLSDAILLSDILRVNTEITKAPLSASMIKRYDEHHQDLTLLKALVRQQLPEKYKEIFFDQSKNGYAGYIDGGASQEEFYKFIKPILEKMDGTEELLVKLNREDLLRKQRTFDNGSIPHQIHLGELHAILRRQEDFYPFLKDNREKIEKILTFRIPYYVGPLARGNSRFAWMTRKSEETITPWNFEEVVDKGASAQSFIERMTNFDKNLPNEKVLPKHSLLYEYFTVYNELTKVKYVTEGMRKPAFLSGEQKKAIVDLLFKTNRKVTVKQLKEDYFKKIECFDSVEISGVEDRFNASLGTYHDLLKIIKDKDFLDNEENEDILEDIVLTLTLFEDREMIEERLKTYAHLFDDKVMKQLKRRRYTGWGRLSRKLINGIRDKQSGKTILDFLKSDGFANRNFMQLIHDDSLTFKEDIQKAQVSGQGDSLHEHIANLAGSPAIKKGILQTVKVVDELVKVMGRHKPENIVIEMARENQTTQKGQKNSRERMKRIEEGIKELGSQILKEHPVENTQLQNEKLYLYYLQNGRDMYVDQELDINRLSDYDVDHIVPQSFLKDDSIDNKVLTRSDKARGKSDNVPSEEVVKKMKNYWRQLLNAKLITQRKFDNLTKAERGGLSELDKAGFIKRQLVETRQITKHVAQILDSRMNTKYDENDKLIREVKVITLKSKLVSDFRKDFQFYKVREINNYHHAHDAYLNAVVGTALIKKYPKLESEFVYGDYKVYDVRKMIAKSEQEIGKATAKYFFYSNIMNFFKTEITLANGEIRKRPLIETNGETGEIVWDKGRDFATVRKVLSMPQVNIVKKTEVQTGGFSKESILPKRNSDKLIARKKDWDPKKYGGFDSPTVAYSVLVVAKVEKGKSKKLKSVKELLGITIMERSSFEKNPIDFLEAKGYKEVKKDLIIKLPKYSLFELENGRKRMLASAGELQKGNELALPSKYVNFLYLASHYEKLKGSPEDNEQKQLFVEQHKHYLDEIIEQISEFSKRVILADANLDKVLSAYNKHRDKPIREQAENIIHLFTLTNLGAPAAFKYFDTTIDRKRYTSTKEVLDATLIHQSITGLYETRIDLSQLGGDGGPAPAPGGTLGIEDEYRLHETSTEPDVSLGSTWLSDFPQAWAETGGMGLAVRQAPLIIPLKATSTPVSIQQYPMSHEARLGIKPHIQRLLDQGILVPCQSPWNTPLLPVKKPGTNDYRPVQDLREVNKRVEDIHPTVPNPYNLLSGLPPSHQWYTVLDLKDAFFCLRLHPTSQPLFAFEWRDPGMGISGQLTWTRLPQGFKNSPTLFNEALHRDLADFRIQHPDLILLQYVDDILLAATSELDCQQGTRALLQTLGDLGYRASAKKAQICQKQVKYLGYLLREGQRWLTEARKETVMGQPVPKTPRQLREFLGTAGFCRLWIPGFAEMAAPLYPLTKPGTLFSWGPDQQKAYQEIKQALLTAPALGLPDLTKPFELFVDEKQGYAKGVLTQKLGPWRRPVAYLSKKLDPVAAGWPPCLRMVAAIAVLTKDAGKLTMGQPLVILAPHAVEALVKQPPDRWLSNARMTHYQAMLLDTDRVQFGPVVALNPATLLPLPEEGAPHDCLEILAETHGTRPDLTDQPIPDADHTWYTDGSSFLQEGQRKAGAAVTTETEVIWAGALPAGTSAQRAELIALTQALKMAEGKRLNVYTDSRYAFATAHIHGEIYRRRGWLTSEGREIKNKSEILALLKALFLPKRLSIIHCLGHQKGDSAEARGNRLADQAAREAAIKTPPDTSTLLAGKRTADGSEFEKRTADGSEFESPKKKAKVE

SEQ ID NO: 2078 - protein, 2091 aa, synthetic construct
MPAAKRVKLDGGDKKYSIGLDIGTNSVGWAVITDEYKVPSKKFKVLGNTDRHSIKKNLIGALLFDSGETAEATRLKRTARRRYTRRKNRICYLQEIFSNEMAKVDDSFFHRLEESFLVEEDKKHERHPIFGNIVDEVAYHEKYPTIYHLRKKLVDSTDKADLRLIYLALAHMIKFRGHFLIEGDLNPDNSDVDKLFIQLVQTYNQLFEENPINASGVDAKAILSARLSKSRRLENLIAQLPGEKKNGLFGNLIALSLGLTPNFKSNFDLAEDAKLQLSKDTYDDDLDNLLAQIGDQYADLFLAAKNLSDAILLSDILRVNTEITKAPLSASMIKRYDEHHQDLTLLKALVRQQLPEKYKEIFFDQSKNGYAGYIDGGASQEEFYKFIKPILEKMDGTEELLVKLNREDLLRKQRTFDNGSIPHQIHLGELHAILRRQEDFYPFLKDNREKIEKILTFRIPYYVGPLARGNSRFAWMTRKSEETITPWNFEEVVDKGASAQSFIERMTNFDKNLPNEKVLPKHSLLYEYFTVYNELTKVKYVTEGMRKPAFLSGEQKKAIVDLLFKTNRKVTVKQLKEDYFKKIECFDSVEISGVEDRFNASLGTYHDLLKIIKDKDFLDNEENEDILEDIVLTLTLFEDREMIEERLKTYAHLFDDKVMKQLKRRRYTGWGRLSRKLINGIRDKQSGKTILDFLKSDGFANRNFMQLIHDDSLTFKEDIQKAQVSGQGDSLHEHIANLAGSPAIKKGILQTVKVVDELVKVMGRHKPENIVIEMARENQTTQKGQKNSRERMKRIEEGIKELGSQILKEHPVENTQLQNEKLYLYYLQNGRDMYVDQELDINRLSDYDVDHIVPQSFLKDDSIDNKVLTRSDKARGKSDNVPSEEVVKKMKNYWRQLLNAKLITQRKFDNLTKAERGGLSELDKAGFIKRQLVETRQITKHVAQILDSRMNTKYDENDKLIREVKVITLKSKLVSDFRKDFQFYKVREINNYHHAHDAYLNAVVGTALIKKYPKLESEFVYGDYKVYDVRKMIAKSEQEIGKATAKYFFYSNIMNFFKTEITLANGEIRKRPLIETNGETGEIVWDKGRDFATVRKVLSMPQVNIVKKTEVQTGGFSKESILPKRNSDKLIARKKDWDPKKYGGFDSPTVAYSVLVVAKVEKGKSKKLKSVKELLGITIMERSSFEKNPIDFLEAKGYKEVKKDLIIKLPKYSLFELENGRKRMLASAGELQKGNELALPSKYVNFLYLASHYEKLKGSPEDNEQKQLFVEQHKHYLDEIIEQISEFSKRVILADANLDKVLSAYNKHRDKPIREQAENIIHLFTLTNLGAPAAFKYFDTTIDRKRYTSTKEVLDATLIHQSITGLYETRIDLSQLGGDGGPAPGGSGGTLGIEDEYRLHETSTEPDVSLGSTWLSDFPQAWAETGGMGLAVRQAPLIIPLKATSTPVSIQQYPMSHEARLGIKPHIQRLLDQGILVPCQSPWNTPLLPVKKPGTNDYRPVQDLREVNKRVEDIHPTVPNPYNLLSGLPPSHQWYTVLDLKDAFFCLRLHPTSQPLFAFEWRDPGMGISGQLTWTRLPQGFKNSPTLFNEALHRDLADFRIQHPDLILLQYVDDILLAATSELDCQQGTRALLQTLGDLGYRASAKKAQICQKQVKYLGYLLREGQRWLTEARKETVMGQPVPKTPRQLREFLGTAGFCRLWIPGFAEMAAPLYPLTKPGTLFSWGPDQQKAYQEIKQALLTAPALGLPDLTKPFELFVDEKQGYAKGVLTQKLGPWRRPVAYLSKKLDPVAAGWPPCLRMVAAIAVLTKDAGKLTMGQPLVILAPHAVEALVKQPPDRWLSNARMTHYQAMLLDTDRVQFGPVVALNPATLLPLPEEGAPHDCLEILAETHGTRPDLTDQPIPDADHTWYTDGSSFLQEGQRKAGAAVTTETEVIWAGALPAGTSAQRAELIALTQALKMAEGKRLNVYTDSRYAFATAHIHGEIYRRRGWLTSEGREIKNKSEILALLKALFLPKRLSIIHCLGHQKGDSAEARGNRLADQAAREAAIKTPPDTSTLLAGKRTADGSEFEKRTADGSEFESPKKKAKVE

SEQ ID NO: 2079 - protein, 2094 aa, synthetic construct
MPAAKRVKLDGGDKKYSIGLDIGTNSVGWAVITDEYKVPSKKFKVLGNTDRHSIKKNLIGALLFDSGETAEATRLKRTARRRYTRRKNRICYLQEIFSNEMAKVDDSFFHRLEESFLVEEDKKHERHPIFGNIVDEVAYHEKYPTIYHLRKKLVDSTDKADLRLIYLALAHMIKFRGHFLIEGDLNPDNSDVDKLFIQLVQTYNQLFEENPINASGVDAKAILSARLSKSRRLENLIAQLPGEKKNGLFGNLIALSLGLTPNFKSNFDLAEDAKLQLSKDTYDDDLDNLLAQIGDQYADLFLAAKNLSDAILLSDILRVNTEITKAPLSASMIKRYDEHHQDLTLLKALVRQQLPEKYKEIFFDQSKNGYAGYIDGGASQEEFYKFIKPILEKMDGTEELLVKLNREDLLRKQRTFDNGSIPHQIHLGELHAILRRQEDFYPFLKDNREKIEKILTFRIPYYVGPLARGNSRFAWMTRKSEETITPWNFEEVVDKGASAQSFIERMTNFDKNLPNEKVLPKHSLLYEYFTVYNELTKVKYVTEGMRKPAFLSGEQKKAIVDLLFKTNRKVTVKQLKEDYFKKIECFDSVEISGVEDRFNASLGTYHDLLKIIKDKDFLDNEENEDILEDIVLTLTLFEDREMIEERLKTYAHLFDDKVMKQLKRRRYTGWGRLSRKLINGIRDKQSGKTILDFLKSDGFANRNFMQLIHDDSLTFKEDIQKAQVSGQGDSLHEHIANLAGSPAIKKGILQTVKVVDELVKVMGRHKPENIVIEMARENQTTQKGQKNSRERMKRIEEGIKELGSQILKEHPVENTQLQNEKLYLYYLQNGRDMYVDQELDINRLSDYDVDHIVPQSFLKDDSIDNKVLTRSDKARGKSDNVPSEEVVKKMKNYWRQLLNAKLITQRKFDNLTKAERGGLSELDKAGFIKRQLVETRQITKHVAQILDSRMNTKYDENDKLIREVKVITLKSKLVSDFRKDFQFYKVREINNYHHAHDAYLNAVVGTALIKKYPKLESEFVYGDYKVYDVRKMIAKSEQEIGKATAKYFFYSNIMNFFKTEITLANGEIRKRPLIETNGETGEIVWDKGRDFATVRKVLSMPQVNIVKKTEVQTGGFSKESILPKRNSDKLIARKKDWDPKKYGGFDSPTVAYSVLVVAKVEKGKSKKLKSVKELLGITIMERSSFEKNPIDFLEAKGYKEVKKDLIIKLPKYSLFELENGRKRMLASAGELQKGNELALPSKYVNFLYLASHYEKLKGSPEDNEQKQLFVEQHKHYLDEIIEQISEFSKRVILADANLDKVLSAYNKHRDKPIREQAENIIHLFTLTNLGAPAAFKYFDTTIDRKRYTSTKEVLDATLIHQSITGLYETRIDLSQLGGDGGPAPGSSGGGGGTLGIEDEYRLHETSTEPDVSLGSTWLSDFPQAWAETGGMGLAVRQAPLIIPLKATSTPVSIQQYPMSHEARLGIKPHIQRLLDQGILVPCQSPWNTPLLPVKKPGTNDYRPVQDLREVNKRVEDIHPTVPNPYNLLSGLPPSHQWYTVLDLKDAFFCLRLHPTSQPLFAFEWRDPGMGISGQLTWTRLPQGFKNSPTLFNEALHRDLADFRIQHPDLILLQYVDDILLAATSELDCQQGTRALLQTLGDLGYRASAKKAQICQKQVKYLGYLLREGQRWLTEARKETVMGQPVPKTPRQLREFLGTAGFCRLWIPGFAEMAAPLYPLTKPGTLFSWGPDQQKAYQEIKQALLTAPALGLPDLTKPFELFVDEKQGYAKGVLTQKLGPWRRPVAYLSKKLDPVAAGWPPCLRMVAAIAVLTKDAGKLTMGQPLVILAPHAVEALVKQPPDRWLSNARMTHYQAMLLDTDRVQFGPVVALNPATLLPLPEEGAPHDCLEILAETHGTRPDLTDQPIPDADHTWYTDGSSFLQEGQRKAGAAVTTETEVIWAGALPAGTSAQRAELIALTQALKMAEGKRLNVYTDSRYAFATAHIHGEIYRRRGWLTSEGREIKNKSEILALLKALFLPKRLSIIHCLGHQKGDSAEARGNRLADQAAREAAIKTPPDTSTLLAGKRTADGSEFEKRTADGSEFESPKKKAKVE

SEQ ID NO: 2080 - protein, 2094 aa, synthetic construct
MPAAKRVKLDGGDKKYSIGLDIGTNSVGWAVITDEYKVPSKKFKVLGNTDRHSIKKNLIGALLFDSGETAEATRLKRTARRRYTRRKNRICYLQEIFSNEMAKVDDSFFHRLEESFLVEEDKKHERHPIFGNIVDEVAYHEKYPTIYHLRKKLVDSTDKADLRLIYLALAHMIKFRGHFLIEGDLNPDNSDVDKLFIQLVQTYNQLFEENPINASGVDAKAILSARLSKSRRLENLIAQLPGEKKNGLFGNLIALSLGLTPNFKSNFDLAEDAKLQLSKDTYDDDLDNLLAQIGDQYADLFLAAKNLSDAILLSDILRVNTEITKAPLSASMIKRYDEHHQDLTLLKALVRQQLPEKYKEIFFDQSKNGYAGYIDGGASQEEFYKFIKPILEKMDGTEELLVKLNREDLLRKQRTFDNGSIPHQIHLGELHAILRRQEDFYPFLKDNREKIEKILTFRIPYYVGPLARGNSRFAWMTRKSEETITPWNFEEVVDKGASAQSFIERMTNFDKNLPNEKVLPKHSLLYEYFTVYNELTKVKYVTEGMRKPAFLSGEQKKAIVDLLFKTNRKVTVKQLKEDYFKKIECFDSVEISGVEDRFNASLGTYHDLLKIIKDKDFLDNEENEDILEDIVLTLTLFEDREMIEERLKTYAHLFDDKVMKQLKRRRYTGWGRLSRKLINGIRDKQSGKTILDFLKSDGFANRNFMQLIHDDSLTFKEDIQKAQVSGQGDSLHEHIANLAGSPAIKKGILQTVKVVDELVKVMGRHKPENIVIEMARENQTTQKGQKNSRERMKRIEEGIKELGSQILKEHPVENTQLQNEKLYLYYLQNGRDMYVDQELDINRLSDYDVDHIVPQSFLKDDSIDNKVLTRSDKARGKSDNVPSEEVVKKMKNYWRQLLNAKLITQRKFDNLTKAERGGLSELDKAGFIKRQLVETRQITKHVAQILDSRMNTKYDENDKLIREVKVITLKSKLVSDFRKDFQFYKVREINNYHHAHDAYLNAVVGTALIKKYPKLESEFVYGDYKVYDVRKMIAKSEQEIGKATAKYFFYSNIMNFFKTEITLANGEIRKRPLIETNGETGEIVWDKGRDFATVRKVLSMPQVNIVKKTEVQTGGFSKESILPKRNSDKLIARKKDWDPKKYGGFDSPTVAYSVLVVAKVEKGKSKKLKSVKELLGITIMERSSFEKNPIDFLEAKGYKEVKKDLIIKLPKYSLFELENGRKRMLASAGELQKGNELALPSKYVNFLYLASHYEKLKGSPEDNEQKQLFVEQHKHYLDEIIEQISEFSKRVILADANLDKVLSAYNKHRDKPIREQAENIIHLFTLTNLGAPAAFKYFDTTIDRKRYTSTKEVLDATLIHQSITGLYETRIDLSQLGGDGGGSSPAPGGSGGTLGIEDEYRLHETSTEPDVSLGSTWLSDFPQAWAETGGMGLAVRQAPLIIPLKATSTPVSIQQYPMSHEARLGIKPHIQRLLDQGILVPCQSPWNTPLLPVKKPGTNDYRPVQDLREVNKRVEDIHPTVPNPYNLLSGLPPSHQWYTVLDLKDAFFCLRLHPTSQPLFAFEWRDPGMGISGQLTWTRLPQGFKNSPTLFNEALHRDLADFRIQHPDLILLQYVDDILLAATSELDCQQGTRALLQTLGDLGYRASAKKAQICQKQVKYLGYLLREGQRWLTEARKETVMGQPVPKTPRQLREFLGTAGFCRLWIPGFAEMAAPLYPLTKPGTLFSWGPDQQKAYQEIKQALLTAPALGLPDLTKPFELFVDEKQGYAKGVLTQKLGPWRRPVAYLSKKLDPVAAGWPPCLRMVAAIAVLTKDAGKLTMGQPLVILAPHAVEALVKQPPDRWLSNARMTHYQAMLLDTDRVQFGPVVALNPATLLPLPEEGAPHDCLEILAETHGTRPDLTDQPIPDADHTWYTDGSSFLQEGQRKAGAAVTTETEVIWAGALPAGTSAQRAELIALTQALKMAEGKRLNVYTDSRYAFATAHIHGEIYRRRGWLTSEGREIKNKSEILALLKALFLPKRLSIIHCLGHQKGDSAEARGNRLADQAAREAAIKTPPDTSTLLAGKRTADGSEFEKRTADGSEFESPKKKAKVE

SEQ ID NO: 2081 - protein, 2093 aa, synthetic construct
MPAAKRVKLDGGDKKYSIGLDIGTNSVGWAVITDEYKVPSKKFKVLGNTDRHSIKKNLIGALLFDSGETAEATRLKRTARRRYTRRKNRICYLQEIFSNEMAKVDDSFFHRLEESFLVEEDKKHERHPIFGNIVDEVAYHEKYPTIYHLRKKLVDSTDKADLRLIYLALAHMIKFRGHFLIEGDLNPDNSDVDKLFIQLVQTYNQLFEENPINASGVDAKAILSARLSKSRRLENLIAQLPGEKKNGLFGNLIALSLGLTPNFKSNFDLAEDAKLQLSKDTYDDDLDNLLAQIGDQYADLFLAAKNLSDAILLSDILRVNTEITKAPLSASMIKRYDEHHQDLTLLKALVRQQLPEKYKEIFFDQSKNGYAGYIDGGASQEEFYKFIKPILEKMDGTEELLVKLNREDLLRKQRTFDNGSIPHQIHLGELHAILRRQEDFYPFLKDNREKIEKILTFRIPYYVGPLARGNSRFAWMTRKSEETITPWNFEEVVDKGASAQSFIERMTNFDKNLPNEKVLPKHSLLYEYFTVYNELTKVKYVTEGMRKPAFLSGEQKKAIVDLLFKTNRKVTVKQLKEDYFKKIECFDSVEISGVEDRFNASLGTYHDLLKIIKDKDFLDNEENEDILEDIVLTLTLFEDREMIEERLKTYAHLFDDKVMKQLKRRRYTGWGRLSRKLINGIRDKQSGKTILDFLKSDGFANRNFMQLIHDDSLTFKEDIQKAQVSGQGDSLHEHIANLAGSPAIKKGILQTVKVVDELVKVMGRHKPENIVIEMARENQTTQKGQKNSRERMKRIEEGIKELGSQILKEHPVENTQLQNEKLYLYYLQNGRDMYVDQELDINRLSDYDVDHIVPQSFLKDDSIDNKVLTRSDKARGKSDNVPSEEVVKKMKNYWRQLLNAKLITQRKFDNLTKAERGGLSELDKAGFIKRQLVETRQITKHVAQILDSRMNTKYDENDKLIREVKVITLKSKLVSDFRKDFQFYKVREINNYHHAHDAYLNAVVGTALIKKYPKLESEFVYGDYKVYDVRKMIAKSEQEIGKATAKYFFYSNIMNFFKTEITLANGEIRKRPLIETNGETGEIVWDKGRDFATVRKVLSMPQVNIVKKTEVQTGGFSKESILPKRNSDKLIARKKDWDPKKYGGFDSPTVAYSVLVVAKVEKGKSKKLKSVKELLGITIMERSSFEKNPIDFLEAKGYKEVKKDLIIKLPKYSLFELENGRKRMLASAGELQKGNELALPSKYVNFLYLASHYEKLKGSPEDNEQKQLFVEQHKHYLDEIIEQISEFSKRVILADANLDKVLSAYNKHRDKPIREQAENIIHLFTLTNLGAPAAFKYFDTTIDRKRYTSTKEVLDATLIHQSITGLYETRIDLSQLGGDGGEAAAKGGGGGTLGIEDEYRLHETSTEPDVSLGSTWLSDFPQAWAETGGMGLAVRQAPLIIPLKATSTPVSIQQYPMSHEARLGIKPHIQRLLDQGILVPCQSPWNTPLLPVKKPGTNDYRPVQDLREVNKRVEDIHPTVPNPYNLLSGLPPSHQWYTVLDLKDAFFCLRLHPTSQPLFAFEWRDPGMGISGQLTWTRLPQGFKNSPTLFNEALHRDLADFRIQHPDLILLQYVDDILLAATSELDCQQGTRALLQTLGDLGYRASAKKAQICQKQVKYLGYLLREGQRWLTEARKETVMGQPVPKTPRQLREFLGTAGFCRLWIPGFAEMAAPLYPLTKPGTLFSWGPDQQKAYQEIKQALLTAPALGLPDLTKPFELFVDEKQGYAKGVLTQKLGPWRRPVAYLSKKLDPVAAGWPPCLRMVAAIAVLTKDAGKLTMGQPLVILAPHAVEALVKQPPDRWLSNARMTHYQAMLLDTDRVQFGPVVALNPATLLPLPEEGAPHDCLEILAETHGTRPDLTDQPIPDADHTWYTDGSSFLQEGQRKAGAAVTTETEVIWAGALPAGTSAQRAELIALTQALKMAEGKRLNVYTDSRYAFATAHIHGEIYRRRGWLTSEGREIKNKSEILALLKALFLPKRLSIIHCLGHQKGDSAEARGNRLADQAAREAAIKTPPDTSTLLAGKRTADGSEFEKRTADGSEFESPKKKAKVE

SEQ ID NO: 2082 - protein, 2096 aa, synthetic construct
MPAAKRVKLDGGDKKYSIGLDIGTNSVGWAVITDEYKVPSKKFKVLGNTDRHSIKKNLIGALLFDSGETAEATRLKRTARRRYTRRKNRICYLQEIFSNEMAKVDDSFFHRLEESFLVEEDKKHERHPIFGNIVDEVAYHEKYPTIYHLRKKLVDSTDKADLRLIYLALAHMIKFRGHFLIEGDLNPDNSDVDKLFIQLVQTYNQLFEENPINASGVDAKAILSARLSKSRRLENLIAQLPGEKKNGLFGNLIALSLGLTPNFKSNFDLAEDAKLQLSKDTYDDDLDNLLAQIGDQYADLFLAAKNLSDAILLSDILRVNTEITKAPLSASMIKRYDEHHQDLTLLKALVRQQLPEKYKEIFFDQSKNGYAGYIDGGASQEEFYKFIKPILEKMDGTEELLVKLNREDLLRKQRTFDNGSIPHQIHLGELHAILRRQEDFYPFLKDNREKIEKILTFRIPYYVGPLARGNSRFAWMTRKSEETITPWNFEEVVDKGASAQSFIERMTNFDKNLPNEKVLPKHSLLYEYFTVYNELTKVKYVTEGMRKPAFLSGEQKKAIVDLLFKTNRKVTVKQLKEDYFKKIECFDSVEISGVEDRFNASLGTYHDLLKIIKDKDFLDNEENEDILEDIVLTLTLFEDREMIEERLKTYAHLFDDKVMKQLKRRRYTGWGRLSRKLINGIRDKQSGKTILDFLKSDGFANRNFMQLIHDDSLTFKEDIQKAQVSGQGDSLHEHIANLAGSPAIKKGILQTVKVVDELVKVMGRHKPENIVIEMARENQTTQKGQKNSRERMKRIEEGIKELGSQILKEHPVENTQLQNEKLYLYYLQNGRDMYVDQELDINRLSDYDVDHIVPQSFLKDDSIDNKVLTRSDKARGKSDNVPSEEVVKKMKNYWRQLLNAKLITQRKFDNLTKAERGGLSELDKAGFIKRQLVETRQITKHVAQILDSRMNTKYDENDKLIREVKVITLKSKLVSDFRKDFQFYKVREINNYHHAHDAYLNAVVGTALIKKYPKLESEFVYGDYKVYDVRKMIAKSEQEIGKATAKYFFYSNIMNFFKTEITLANGEIRKRPLIETNGETGEIVWDKGRDFATVRKVLSMPQVNIVKKTEVQTGGFSKESILPKRNSDKLIARKKDWDPKKYGGFDSPTVAYSVLVVAKVEKGKSKKLKSVKELLGITIMERSSFEKNPIDFLEAKGYKEVKKDLIIKLPKYSLFELENGRKRMLASAGELQKGNELALPSKYVNFLYLASHYEKLKGSPEDNEQKQLFVEQHKHYLDEIIEQISEFSKRVILADANLDKVLSAYNKHRDKPIREQAENIIHLFTLTNLGAPAAFKYFDTTIDRKRYTSTKEVLDATLIHQSITGLYETRIDLSQLGGDGGGGGGGSEAAAKGGTLGIEDEYRLHETSTEPDVSLGSTWLSDFPQAWAETGGMGLAVRQAPLIIPLKATSTPVSIQQYPMSHEARLGIKPHIQRLLDQGILVPCQSPWNTPLLPVKKPGTNDYRPVQDLREVNKRVEDIHPTVPNPYNLLSGLPPSHQWYTVLDLKDAFFCLRLHPTSQPLFAFEWRDPGMGISGQLTWTRLPQGFKNSPTLFNEALHRDLADFRIQHPDLILLQYVDDILLAATSELDCQQGTRALLQTLGDLGYRASAKKAQICQKQVKYLGYLLREGQRWLTEARKETVMGQPVPKTPRQLREFLGTAGFCRLWIPGFAEMAAPLYPLTKPGTLFSWGPDQQKAYQEIKQALLTAPALGLPDLTKPFELFVDEKQGYAKGVLTQKLGPWRRPVAYLSKKLDPVAAGWPPCLRMVAAIAVLTKDAGKLTMGQPLVILAPHAVEALVKQPPDRWLSNARMTHYQAMLLDTDRVQFGPVVALNPATLLPLPEEGAPHDCLEILAETHGTRPDLTDQPIPDADHTWYTDGSSFLQEGQRKAGAAVTTETEVIWAGALPAGTSAQRAELIALTQALKMAEGKRLNVYTDSRYAFATAHIHGEIYRRRGWLTSEGREIKNKSEILALLKALFLPKRLSIIHCLGHQKGDSAEARGNRLADQAAREAAIKTPPDTSTLLAGKRTADGSEFEKRTADGSEFESPKKKAKVE

SEQ ID NO: 2083 - protein, 2091 aa, synthetic construct
MPAAKRVKLDGGDKKYSIGLDIGTNSVGWAVITDEYKVPSKKFKVLGNTDRHSIKKNLIGALLFDSGETAEATRLKRTARRRYTRRKNRICYLQEIFSNEMAKVDDSFFHRLEESFLVEEDKKHERHPIFGNIVDEVAYHEKYPTIYHLRKKLVDSTDKADLRLIYLALAHMIKFRGHFLIEGDLNPDNSDVDKLFIQLVQTYNQLFEENPINASGVDAKAILSARLSKSRRLENLIAQLPGEKKNGLFGNLIALSLGLTPNFKSNFDLAEDAKLQLSKDTYDDDLDNLLAQIGDQYADLFLAAKNLSDAILLSDILRVNTEITKAPLSASMIKRYDEHHQDLTLLKALVRQQLPEKYKEIFFDQSKNGYAGYIDGGASQEEFYKFIKPILEKMDGTEELLVKLNREDLLRKQRTFDNGSIPHQIHLGELHAILRRQEDFYPFLKDNREKIEKILTFRIPYYVGPLARGNSRFAWMTRKSEETITPWNFEEVVDKGASAQSFIERMTNFDKNLPNEKVLPKHSLLYEYFTVYNELTKVKYVTEGMRKPAFLSGEQKKAIVDLLFKTNRKVTVKQLKEDYFKKIECFDSVEISGVEDRFNASLGTYHDLLKIIKDKDFLDNEENEDILEDIVLTLTLFEDREMIEERLKTYAHLFDDKVMKQLKRRRYTGWGRLSRKLINGIRDKQSGKTILDFLKSDGFANRNFMQLIHDDSLTFKEDIQKAQVSGQGDSLHEHIANLAGSPAIKKGILQTVKVVDELVKVMGRHKPENIVIEMARENQTTQKGQKNSRERMKRIEEGIKELGSQILKEHPVENTQLQNEKLYLYYLQNGRDMYVDQELDINRLSDYDVDHIVPQSFLKDDSIDNKVLTRSDKARGKSDNVPSEEVVKKMKNYWRQLLNAKLITQRKFDNLTKAERGGLSELDKAGFIKRQLVETRQITKHVAQILDSRMNTKYDENDKLIREVKVITLKSKLVSDFRKDFQFYKVREINNYHHAHDAYLNAVVGTALIKKYPKLESEFVYGDYKVYDVRKMIAKSEQEIGKATAKYFFYSNIMNFFKTEITLANGEIRKRPLIETNGETGEIVWDKGRDFATVRKVLSMPQVNIVKKTEVQTGGFSKESILPKRNSDKLIARKKDWDPKKYGGFDSPTVAYSVLVVAKVEKGKSKKLKSVKELLGITIMERSSFEKNPIDFLEAKGYKEVKKDLIIKLPKYSLFELENGRKRMLASAGELQKGNELALPSKYVNFLYLASHYEKLKGSPEDNEQKQLFVEQHKHYLDEIIEQISEFSKRVILADANLDKVLSAYNKHRDKPIREQAENIIHLFTLTNLGAPAAFKYFDTTIDRKRYTSTKEVLDATLIHQSITGLYETRIDLSQLGGDGGGGSPAPGGTLGIEDEYRLHETSTEPDVSLGSTWLSDFPQAWAETGGMGLAVRQAPLIIPLKATSTPVSIQQYPMSHEARLGIKPHIQRLLDQGILVPCQSPWNTPLLPVKKPGTNDYRPVQDLREVNKRVEDIHPTVPNPYNLLSGLPPSHQWYTVLDLKDAFFCLRLHPTSQPLFAFEWRDPGMGISGQLTWTRLPQGFKNSPTLFNEALHRDLADFRIQHPDLILLQYVDDILLAATSELDCQQGTRALLQTLGDLGYRASAKKAQICQKQVKYLGYLLREGQRWLTEARKETVMGQPVPKTPRQLREFLGTAGFCRLWIPGFAEMAAPLYPLTKPGTLFSWGPDQQKAYQEIKQALLTAPALGLPDLTKPFELFVDEKQGYAKGVLTQKLGPWRRPVAYLSKKLDPVAAGWPPCLRMVAAIAVLTKDAGKLTMGQPLVILAPHAVEALVKQPPDRWLSNARMTHYQAMLLDTDRVQFGPVVALNPATLLPLPEEGAPHDCLEILAETHGTRPDLTDQPIPDADHTWYTDGSSFLQEGQRKAGAAVTTETEVIWAGALPAGTSAQRAELIALTQALKMAEGKRLNVYTDSRYAFATAHIHGEIYRRRGWLTSEGREIKNKSEILALLKALFLPKRLSIIHCLGHQKGDSAEARGNRLADQAAREAAIKTPPDTSTLLAGKRTADGSEFEKRTADGSEFESPKKKAKVE

SEQ ID NO: 2084 - protein, 2110 aa, synthetic construct
MPAAKRVKLDGGDKKYSIGLDIGTNSVGWAVITDEYKVPSKKFKVLGNTDRHSIKKNLIGALLFDSGETAEATRLKRTARRRYTRRKNRICYLQEIFSNEMAKVDDSFFHRLEESFLVEEDKKHERHPIFGNIVDEVAYHEKYPTIYHLRKKLVDSTDKADLRLIYLALAHMIKFRGHFLIEGDLNPDNSDVDKLFIQLVQTYNQLFEENPINASGVDAKAILSARLSKSRRLENLIAQLPGEKKNGLFGNLIALSLGLTPNFKSNFDLAEDAKLQLSKDTYDDDLDNLLAQIGDQYADLFLAAKNLSDAILLSDILRVNTEITKAPLSASMIKRYDEHHQDLTLLKALVRQQLPEKYKEIFFDQSKNGYAGYIDGGASQEEFYKFIKPILEKMDGTEELLVKLNREDLLRKQRTFDNGSIPHQIHLGELHAILRRQEDFYPFLKDNREKIEKILTFRIPYYVGPLARGNSRFAWMTRKSEETITPWNFEEVVDKGASAQSFIERMTNFDKNLPNEKVLPKHSLLYEYFTVYNELTKVKYVTEGMRKPAFLSGEQKKAIVDLLFKTNRKVTVKQLKEDYFKKIECFDSVEISGVEDRFNASLGTYHDLLKIIKDKDFLDNEENEDILEDIVLTLTLFEDREMIEERLKTYAHLFDDKVMKQLKRRRYTGWGRLSRKLINGIRDKQSGKTILDFLKSDGFANRNFMQLIHDDSLTFKEDIQKAQVSGQGDSLHEHIANLAGSPAIKKGILQTVKVVDELVKVMGRHKPENIVIEMARENQTTQKGQKNSRERMKRIEEGIKELGSQILKEHPVENTQLQNEKLYLYYLQNGRDMYVDQELDINRLSDYDVDHIVPQSFLKDDSIDNKVLTRSDKARGKSDNVPSEEVVKKMKNYWRQLLNAKLITQRKFDNLTKAERGGLSELDKAGFIKRQLVETRQITKHVAQILDSRMNTKYDENDKLIREVKVITLKSKLVSDFRKDFQFYKVREINNYHHAHDAYLNAVVGTALIKKYPKLESEFVYGDYKVYDVRKMIAKSEQEIGKATAKYFFYSNIMNFFKTEITLANGEIRKRPLIETNGETGEIVWDKGRDFATVRKVLSMPQVNIVKKTEVQTGGFSKESILPKRNSDKLIARKKDWDPKKYGGFDSPTVAYSVLVVAKVEKGKSKKLKSVKELLGITIMERSSFEKNPIDFLEAKGYKEVKKDLIIKLPKYSLFELENGRKRMLASAGELQKGNELALPSKYVNFLYLASHYEKLKGSPEDNEQKQLFVEQHKHYLDEIIEQISEFSKRVILADANLDKVLSAYNKHRDKPIREQAENIIHLFTLTNLGAPAAFKYFDTTIDRKRYTSTKEVLDATLIHQSITGLYETRIDLSQLGGDGGGGGGSGGGGSGGGGSGGGGSGGGGSGGLGIEDEYRLHETSTEPDVSLGSTWLSDFPQAWAETGGMGLAVRQAPLIIPLKATSTPVSIQQYPMSHEARLGIKPHIQRLLDQGILVPCQSPWNTPLLPVKKPGTNDYRPVQDLREVNKRVEDIHPTVPNPYNLLSGLPPSHQWYTVLDLKDAFFCLRLHPTSQPLFAFEWRDPGMGISGQLTWTRLPQGFKNSPTLFNEALHRDLADFRIQHPDLILLQYVDDILLAATSELDCQQGTRALLQTLGDLGYRASAKKAQICQKQVKYLGYLLREGQRWLTEARKETVMGQPVPKTPRQLREFLGKAGFCRLFIPGFAEMAAPLYPLTKPGTLFSWGPDQQKAYQEIKQALLTAPALGLPDLTKPFELFVDEKQGYAKGVLTQKLGPWRRPVAYLSKKLDPVAAGWPPCLRMVAAIAVLTKDAGKLTMGQPLVILAPHAVEALVKQPPDRWLSNARMTHYQAMLLDTDRVQFGPVVALNPATLLPLPEEGAPHDCLEILAETHGTRPDLTDQPIPDADHTWYTDGSSFLQEGQRKAGAAVTTETEVIWAGALPAGTSAQRAELIALTQALKMAEGKRLNVYTDSRYAFATAHIHGEIYRRRGWLTSEGREIKNKSEILALLKALFLPKRLSIIHCLGHQKGDSAEARGNRLADQAAREAAIKTPPDTSTLLIAGKRTADGSEFEKRTADGSEFESPKKKAKVE

SEQ ID NO: 2085 - protein, 2105 aa, synthetic construct
MPAAKRVKLDGGDKKYSIGLDIGTNSVGWAVITDEYKVPSKKFKVLGNTDRHSIKKNLIGALLFDSGETAEATRLKRTARRRYTRRKNRICYLQEIFSNEMAKVDDSFFHRLEESFLVEEDKKHERHPIFGNIVDEVAYHEKYPTIYHLRKKLVDSTDKADLRLIYLALAHMIKFRGHFLIEGDLNPDNSDVDKLFIQLVQTYNQLFEENPINASGVDAKAILSARLSKSRRLENLIAQLPGEKKNGLFGNLIALSLGLTPNFKSNFDLAEDAKLQLSKDTYDDDLDNLLAQIGDQYADLFLAAKNLSDAILLSDILRVNTEITKAPLSASMIKRYDEHHQDLTLLKALVRQQLPEKYKEIFFDQSKNGYAGYIDGGASQEEFYKFIKPILEKMDGTEELLVKLNREDLLRKQRTFDNGSIPHQIHLGELHAILRRQEDFYPFLKDNREKIEKILTFRIPYYVGPLARGNSRFAWMTRKSEETITPWNFEEVVDKGASAQSFIERMTNFDKNLPNEKVLPKHSLLYEYFTVYNELTKVKYVTEGMRKPAFLSGEQKKAIVDLLFKTNRKVTVKQLKEDYFKKIECFDSVEISGVEDRFNASLGTYHDLLKIIKDKDFLDNEENEDILEDIVLTLTLFEDREMIEERLKTYAHLFDDKVMKQLKRRRYTGWGRLSRKLINGIRDKQSGKTILDFLKSDGFANRNFMQLIHDDSLTFKEDIQKAQVSGQGDSLHEHIANLAGSPAIKKGILQTVKVVDELVKVMGRHKPENIVIEMARENQTTQKGQKNSRERMKRIEEGIKELGSQILKEHPVENTQLQNEKLYLYYLQNGRDMYVDQELDINRLSDYDVDHIVPQSFLKDDSIDNKVLTRSDKARGKSDNVPSEEVVKKMKNYWRQLLNAKLITQRKFDNLTKAERGGLSELDKAGFIKRQLVETRQITKHVAQILDSRMNTKYDENDKLIREVKVITLKSKLVSDFRKDFQFYKVREINNYHHAHDAYLNAVVGTALIKKYPKLESEFVYGDYKVYDVRKMIAKSEQEIGKATAKYFFYSNIMNFFKTEITLANGEIRKRPLIETNGETGEIVWDKGRDFATVRKVLSMPQVNIVKKTEVQTGGFSKESILPKRNSDKLIARKKDWDPKKYGGFDSPTVAYSVLVVAKVEKGKSKKLKSVKELLGITIMERSSFEKNPIDFLEAKGYKEVKKDLIIKLPKYSLFELENGRKRMLASAGELQKGNELALPSKYVNFLYLASHYEKLKGSPEDNEQKQLFVEQHKHYLDEIIEQISEFSKRVILADANLDKVLSAYNKHRDKPIREQAENIIHLFTLTNLGAPAAFKYFDTTIDRKRYTSTKEVLDATLIHQSITGLYETRIDLSQLGGDGGGGGGSGGGGSGGGGSGGGGSGGLGIEDEYRLHETSTEPDVSLGSTWLSDFPQAWAETGGMGLAVRQAPLIIPLKATSTPVSIQQYPMSHEARLGIKPHIQRLLDQGILVPCQSPWNTPLLPVKKPGTNDYRPVQDLREVNKRVEDIHPTVPNPYNLLSGLPPSHQWYTVLDLKDAFFCLRLHPTSQPLFAFEWRDPGMGISGQLTWTRLPQGFKNSPTLFNEALHRDLADFRIQHPDLILLQYVDDILLAATSELDCQQGTRALLQTLGDLGYRASAKKAQICQKQVKYLGYLLREGQRWLTEARKETVMGQPVPKTPRQLREFLGKAGFCRLFIPGFAEMAAPLYPLTKPGTLFSWGPDQQKAYQEIKQALLTAPALGLPDLTKPFELFVDEKQGYAKGVLTQKLGPWRRPVAYLSKKLDPVAAGWPPCLRMVAAIAVLTKDAGKLTMGQPLVILAPHAVEALVKQPPDRWLSNARMTHYQAMLLDTDRVQFGPVVALNPATLLPLPEEGAPHDCLEILAETHGTRPDLTDQPIPDADHTWYTDGSSFLQEGQRKAGAAVTTETEVIWAGALPAGTSAQRAELIALTQALKMAEGKRLNVYTDSRYAFATAHIHGEIYRRRGWLTSEGREIKNKSEILALLKALFLPKRLSIIHCLGHQKGDSAEARGNRLADQAAREAAIKTPPDTSTLLIAGKRTADGSEFEKRTADGSEFESPKKKAKVE

SEQ ID NO: 2086 - protein, 2110 aa, synthetic construct
MPAAKRVKLDGGDKKYSIGLDIGTNSVGWAVITDEYKVPSKKFKVLGNTDRHSIKKNLIGALLFDSGETAEATRLKRTARRRYTRRKNRICYLQEIFSNEMAKVDDSFFHRLEESFLVEEDKKHERHPIFGNIVDEVAYHEKYPTIYHLRKKLVDSTDKADLRLIYLALAHMIKFRGHFLIEGDLNPDNSDVDKLFIQLVQTYNQLFEENPINASGVDAKAILSARLSKSRRLENLIAQLPGEKKNGLFGNLIALSLGLTPNFKSNFDLAEDAKLQLSKDTYDDDLDNLLAQIGDQYADLFLAAKNLSDAILLSDILRVNTEITKAPLSASMIKRYDEHHQDLTLLKALVRQQLPEKYKEIFFDQSKNGYAGYIDGGASQEEFYKFIKPILEKMDGTEELLVKLNREDLLRKQRTFDNGSIPHQIHLGELHAILRRQEDFYPFLKDNREKIEKILTFRIPYYVGPLARGNSRFAWMTRKSEETITPWNFEEVVDKGASAQSFIERMTNFDKNLPNEKVLPKHSLLYEYFTVYNELTKVKYVTEGMRKPAFLSGEQKKAIVDLLFKTNRKVTVKQLKEDYFKKIECFDSVEISGVEDRFNASLGTYHDLLKIIKDKDFLDNEENEDILEDIVLTLTLFEDREMIEERLKTYAHLFDDKVMKQLKRRRYTGWGRLSRKLINGIRDKQSGKTILDFLKSDGFANRNFMQLIHDDSLTFKEDIQKAQVSGQGDSLHEHIANLAGSPAIKKGILQTVKVVDELVKVMGRHKPENIVIEMARENQTTQKGQKNSRERMKRIEEGIKELGSQILKEHPVENTQLQNEKLYLYYLQNGRDMYVDQELDINRLSDYDVDHIVPQSFLKDDSIDNKVLTRSDKARGKSDNVPSEEVVKKMKNYWRQLLNAKLITQRKFDNLTKAERGGLSELDKAGFIKRQLVETRQITKHVAQILDSRMNTKYDENDKLIREVKVITLKSKLVSDFRKDFQFYKVREINNYHHAHDAYLNAVVGTALIKKYPKLESEFVYGDYKVYDVRKMIAKSEQEIGKATAKYFFYSNIMNFFKTEITLANGEIRKRPLIETNGETGEIVWDKGRDFATVRKVLSMPQVNIVKKTEVQTGGFSKESILPKRNSDKLIARKKDWDPKKYGGFDSPTVAYSVLVVAKVEKGKSKKLKSVKELLGITIMERSSFEKNPIDFLEAKGYKEVKKDLIIKLPKYSLFELENGRKRMLASAGELQKGNELALPSKYVNFLYLASHYEKLKGSPEDNEQKQLFVEQHKHYLDEIIEQISEFSKRVILADANLDKVLSAYNKHRDKPIREQAENIIHLFTLTNLGAPAAFKYFDTTIDRKRYTSTKEVLDATLIHQSITGLYETRIDLSQLGGDGGEAAAKEAAAKEAAAKEAAAKEAAAKGGLGIEDEYRLHETSTEPDVSLGSTWLSDFPQAWAETGGMGLAVRQAPLIIPLKATSTPVSIQQYPMSHEARLGIKPHIQRLLDQGILVPCQSPWNTPLLPVKKPGTNDYRPVQDLREVNKRVEDIHPTVPNPYNLLSGLPPSHQWYTVLDLKDAFFCLRLHPTSQPLFAFEWRDPGMGISGQLTWTRLPQGFKNSPTLFNEALHRDLADFRIQHPDLILLQYVDDILLAATSELDCQQGTRALLQTLGDLGYRASAKKAQICQKQVKYLGYLLREGQRWLTEARKETVMGQPVPKTPRQLREFLGKAGFCRLFIPGFAEMAAPLYPLTKPGTLFSWGPDQQKAYQEIKQALLTAPALGLPDLTKPFELFVDEKQGYAKGVLTQKLGPWRRPVAYLSKKLDPVAAGWPPCLRMVAAIAVLTKDAGKLTMGQPLVILAPHAVEALVKQPPDRWLSNARMTHYQAMLLDTDRVQFGPVVALNPATLLPLPEEGAPHDCLEILAETHGTRPDLTDQPIPDADHTWYTDGSSFLQEGQRKAGAAVTTETEVIWAGALPAGTSAQRAELIALTQALKMAEGKRLNVYTDSRYAFATAHIHGEIYRRRGWLTSEGREIKNKSEILALLKALFLPKRLSIIHCLGHQKGDSAEARGNRLADQAAREAAIKTPPDTSTLLIAGKRTADGSEFEKRTADGSEFESPKKKAKVE

SEQ ID NO: 2087 - protein, 2098 aa, synthetic construct
MPAAKRVKLDGGDKKYSIGLDIGTNSVGWAVITDEYKVPSKKFKVLGNTDRHSIKKNLIGALLFDSGETAEATRLKRTARRRYTRRKNRICYLQEIFSNEMAKVDDSFFHRLEESFLVEEDKKHERHPIFGNIVDEVAYHEKYPTIYHLRKKLVDSTDKADLRLIYLALAHMIKFRGHFLIEGDLNPDNSDVDKLFIQLVQTYNQLFEENPINASGVDAKAILSARLSKSRRLENLIAQLPGEKKNGLFGNLIALSLGLTPNFKSNFDLAEDAKLQLSKDTYDDDLDNLLAQIGDQYADLFLAAKNLSDAILLSDILRVNTEITKAPLSASMIKRYDEHHQDLTLLKALVRQQLPEKYKEIFFDQSKNGYAGYIDGGASQEEFYKFIKPILEKMDGTEELLVKLNREDLLRKQRTFDNGSIPHQIHLGELHAILRRQEDFYPFLKDNREKIEKILTFRIPYYVGPLARGNSRFAWMTRKSEETITPWNFEEVVDKGASAQSFIERMTNFDKNLPNEKVLPKHSLLYEYFTVYNELTKVKYVTEGMRKPAFLSGEQKKAIVDLLFKTNRKVTVKQLKEDYFKKIECFDSVEISGVEDRFNASLGTYHDLLKIIKDKDFLDNEENEDILEDIVLTLTLFEDREMIEERLKTYAHLFDDKVMKQLKRRRYTGWGRLSRKLINGIRDKQSGKTILDFLKSDGFANRNFMQLIHDDSLTFKEDIQKAQVSGQGDSLHEHIANLAGSPAIKKGILQTVKVVDELVKVMGRHKPENIVIEMARENQTTQKGQKNSRERMKRIEEGIKELGSQILKEHPVENTQLQNEKLYLYYLQNGRDMYVDQELDINRLSDYDVDHIVPQSFLKDDSIDNKVLTRSDKARGKSDNVPSEEVVKKMKNYWRQLLNAKLITQRKFDNLTKAERGGLSELDKAGFIKRQLVETRQITKHVAQILDSRMNTKYDENDKLIREVKVITLKSKLVSDFRKDFQFYKVREINNYHHAHDAYLNAVVGTALIKKYPKLESEFVYGDYKVYDVRKMIAKSEQEIGKATAKYFFYSNIMNFFKTEITLANGEIRKRPLIETNGETGEIVWDKGRDFATVRKVLSMPQVNIVKKTEVQTGGFSKESILPKRNSDKLIARKKDWDPKKYGGFDSPTVAYSVLVVAKVEKGKSKKLKSVKELLGITIMERSSFEKNPIDFLEAKGYKEVKKDLIIKLPKYSLFELENGRKRMLASAGELQKGNELALPSKYVNFLYLASHYEKLKGSPEDNEQKQLFVEQHKHYLDEIIEQISEFSKRVILADANLDKVLSAYNKHRDKPIREQAENIIHLFTLTNLGAPAAFKYFDTTIDRKRYTSTKEVLDATLIHQSITGLYETRIDLSQLGGDGGPAPAPAPAPAPAPGGLGIEDEYRLHETSTEPDVSLGSTWLSDFPQAWAETGGMGLAVRQAPLIIPLKATSTPVSIQQYPMSHEARLGIKPHIQRLLDQGILVPCQSPWNTPLLPVKKPGTNDYRPVQDLREVNKRVEDIHPTVPNPYNLLSGLPPSHQWYTVLDLKDAFFCLRLHPTSQPLFAFEWRDPGMGISGQLTWTRLPQGFKNSPTLFNEALHRDLADFRIQHPDLILLQYVDDILLAATSELDCQQGTRALLQTLGDLGYRASAKKAQICQKQVKYLGYLLREGQRWLTEARKETVMGQPVPKTPRQLREFLGKAGFCRLFIPGFAEMAAPLYPLTKPGTLFSWGPDQQKAYQEIKQALLTAPALGLPDLTKPFELFVDEKQGYAKGVLTQKLGPWRRPVAYLSKKLDPVAAGWPPCLRMVAAIAVLTKDAGKLTMGQPLVILAPHAVEALVKQPPDRWLSNARMTHYQAMLLDTDRVQFGPVVALNPATLLPLPEEGAPHDCLEILAETHGTRPDLTDQPIPDADHTWYTDGSSFLQEGQRKAGAAVTTETEVIWAGALPAGTSAQRAELIALTQALKMAEGKRLNVYTDSRYAFATAHIHGEIYRRRGWLTSEGREIKNKSEILALLKALFLPKRLSIIHCLGHQKGDSAEARGNRLADQAAREAAIKTPPDTSTLLIAGKRTADGSEFEKRTADGSEFESPKKKAKVE

SEQ ID NO: 2088 - protein, 2131 aa, synthetic construct
MPAAKRVKLDGGDKKYSIGLDIGTNSVGWAVITDEYKVPSKKFKVLGNTDRHSIKKNLIGALLFDSGETAEATRLKRTARRRYTRRKNRICYLQEIFSNEMAKVDDSFFHRLEESFLVEEDKKHERHPIFGNIVDEVAYHEKYPTIYHLRKKLVDSTDKADLRLIYLALAHMIKFRGHFLIEGDLNPDNSDVDKLFIQLVQTYNQLFEENPINASGVDAKAILSARLSKSRRLENLIAQLPGEKKNGLFGNLIALSLGLTPNFKSNFDLAEDAKLQLSKDTYDDDLDNLLAQIGDQYADLFLAAKNLSDAILLSDILRVNTEITKAPLSASMIKRYDEHHQDLTLLKALVRQQLPEKYKEIFFDQSKNGYAGYIDGGASQEEFYKFIKPILEKMDGTEELLVKLNREDLLRKQRTFDNGSIPHQIHLGELHAILRRQEDFYPFLKDNREKIEKILTFRIPYYVGPLARGNSRFAWMTRKSEETITPWNFEEVVDKGASAQSFIERMTNFDKNLPNEKVLPKHSLLYEYFTVYNELTKVKYVTEGMRKPAFLSGEQKKAIVDLLFKTNRKVTVKQLKEDYFKKIECFDSVEISGVEDRFNASLGTYHDLLKIIKDKDFLDNEENEDILEDIVLTLTLFEDREMIEERLKTYAHLFDDKVMKQLKRRRYTGWGRLSRKLINGIRDKQSGKTILDFLKSDGFANRNFMQLIHDDSLTFKEDIQKAQVSGQGDSLHEHIANLAGSPAIKKGILQTVKVVDELVKVMGRHKPENIVIEMARENQTTQKGQKNSRERMKRIEEGIKELGSQILKEHPVENTQLQNEKLYLYYLQNGRDMYVDQELDINRLSDYDVDHIVPQSFLKDDSIDNKVLTRSDKARGKSDNVPSEEVVKKMKNYWRQLLNAKLITQRKFDNLTKAERGGLSELDKAGFIKRQLVETRQITKHVAQILDSRMNTKYDENDKLIREVKVITLKSKLVSDFRKDFQFYKVREINNYHHAHDAYLNAVVGTALIKKYPKLESEFVYGDYKVYDVRKMIAKSEQEIGKATAKYFFYSNIMNFFKTEITLANGEIRKRPLIETNGETGEIVWDKGRDFATVRKVLSMPQVNIVKKTEVQTGGFSKESILPKRNSDKLIARKKDWDPKKYGGFDSPTVAYSVLVVAKVEKGKSKKLKSVKELLGITIMERSSFEKNPIDFLEAKGYKEVKKDLIIKLPKYSLFELENGRKRMLASAGELQKGNELALPSKYVNFLYLASHYEKLKGSPEDNEQKQLFVEQHKHYLDEIIEQISEFSKRVILADANLDKVLSAYNKHRDKPIREQAENIIHLFTLTNLGAPAAFKYFDTTIDRKRYTSTKEVLDATLIHQSITGLYETRIDLSQLGGDGGAEAAAKEAAAKEAAAKEAAAKALEAEAAAKEAAAKEAAAKEAAAKAGGLGIEDEYRLHETSTEPDVSLGSTWLSDFPQAWAETGGMGLAVRQAPLIIPLKATSTPVSIQQYPMSHEARLGIKPHIQRLLDQGILVPCQSPWNTPLLPVKKPGTNDYRPVQDLREVNKRVEDIHPTVPNPYNLLSGLPPSHQWYTVLDLKDAFFCLRLHPTSQPLFAFEWRDPGMGISGQLTWTRLPQGFKNSPTLFNEALHRDLADFRIQHPDLILLQYVDDILLAATSELDCQQGTRALLQTLGDLGYRASAKKAQICQKQVKYLGYLLREGQRWLTEARKETVMGQPVPKTPRQLREFLGKAGFCRLFIPGFAEMAAPLYPLTKPGTLFSWGPDQQKAYQEIKQALLTAPALGLPDLTKPFELFVDEKQGYAKGVLTQKLGPWRRPVAYLSKKLDPVAAGWPPCLRMVAAIAVLTKDAGKLTMGQPLVILAPHAVEALVKQPPDRWLSNARMTHYQAMLLDTDRVQFGPVVALNPATLLPLPEEGAPHDCLEILAETHGTRPDLTDQPIPDADHTWYTDGSSFLQEGQRKAGAAVTTETEVIWAGALPAGTSAQRAELIALTQALKMAEGKRLNVYTDSRYAFATAHIHGEIYRRRGWLTSEGREIKNKSEILALLKALFLPKRLSIIHCLGHQKGDSAEARGNRLADQAAREAAIKTPPDTSTLLIAGKRTADGSEFEKRTADGSEFESPKKKAKVE

SEQ ID NO: 2089 - protein, 2096 aa, synthetic construct; identical to SEQ ID NO: 2050

SEQ ID NO: 2090 - protein, 2100 aa, synthetic construct; identical to SEQ ID NO: 2049

SEQ ID NO: 2091 - protein, 2094 aa, synthetic construct
MPAAKRVKLDGGDKKYSIGLDIGTNSVGWAVITDEYKVPSKKFKVLGNTDRHSIKKNLIGALLFDSGETAEATRLKRTARRRYTRRKNRICYLQEIFSNEMAKVDDSFFHRLEESFLVEEDKKHERHPIFGNIVDEVAYHEKYPTIYHLRKKLVDSTDKADLRLIYLALAHMIKFRGHFLIEGDLNPDNSDVDKLFIQLVQTYNQLFEENPINASGVDAKAILSARLSKSRRLENLIAQLPGEKKNGLFGNLIALSLGLTPNFKSNFDLAEDAKLQLSKDTYDDDLDNLLAQIGDQYADLFLAAKNLSDAILLSDILRVNTEITKAPLSASMIKRYDEHHQDLTLLKALVRQQLPEKYKEIFFDQSKNGYAGYIDGGASQEEFYKFIKPILEKMDGTEELLVKLNREDLLRKQRTFDNGSIPHQIHLGELHAILRRQEDFYPFLKDNREKIEKILTFRIPYYVGPLARGNSRFAWMTRKSEETITPWNFEEVVDKGASAQSFIERMTNFDKNLPNEKVLPKHSLLYEYFTVYNELTKVKYVTEGMRKPAFLSGEQKKAIVDLLFKTNRKVTVKQLKEDYFKKIECFDSVEISGVEDRFNASLGTYHDLLKIIKDKDFLDNEENEDILEDIVLTLTLFEDREMIEERLKTYAHLFDDKVMKQLKRRRYTGWGRLSRKLINGIRDKQSGKTILDFLKSDGFANRNFMQLIHDDSLTFKEDIQKAQVSGQGDSLHEHIANLAGSPAIKKGILQTVKVVDELVKVMGRHKPENIVIEMARENQTTQKGQKNSRERMKRIEEGIKELGSQILKEHPVENTQLQNEKLYLYYLQNGRDMYVDQELDINRLSDYDVDHIVPQSFLKDDSIDNKVLTRSDKARGKSDNVPSEEVVKKMKNYWRQLLNAKLITQRKFDNLTKAERGGLSELDKAGFIKRQLVETRQITKHVAQILDSRMNTKYDENDKLIREVKVITLKSKLVSDFRKDFQFYKVREINNYHHAHDAYLNAVVGTALIKKYPKLESEFVYGDYKVYDVRKMIAKSEQEIGKATAKYFFYSNIMNFFKTEITLANGEIRKRPLIETNGETGEIVWDKGRDFATVRKVLSMPQVNIVKKTEVQTGGFSKESILPKRNSDKLIARKKDWDPKKYGGFDSPTVAYSVLVVAKVEKGKSKKLKSVKELLGITIMERSSFEKNPIDFLEAKGYKEVKKDLIIKLPKYSLFELENGRKRMLASAGELQKGNELALPSKYVNFLYLASHYEKLKGSPEDNEQKQLFVEQHKHYLDEIIEQISEFSKRVILADANLDKVLSAYNKHRDKPIREQAENIIHLFTLTNLGAPAAFKYFDTTIDRKRYTSTKEVLDATLIHQSITGLYETRIDLSQLGGDGGPAPGSSGGGGGLGIEDEYRLHETSTEPDVSLGSTWLSDFPQAWAETGGMGLAVRQAPLIIPLKATSTPVSIQQYPMSHEARLGIKPHIQRLLDQGILVPCQSPWNTPLLPVKKPGTNDYRPVQDLREVNKRVEDIHPTVPNPYNLLSGLPPSHQWYTVLDLKDAFFCLRLHPTSQPLFAFEWRDPGMGISGQLTWTRLPQGFKNSPTLFNEALHRDLADFRIQHPDLILLQYVDDILLAATSELDCQQGTRALLQTLGDLGYRASAKKAQICQKQVKYLGYLLREGQRWLTEARKETVMGQPVPKTPRQLREFLGKAGFCRLFIPGFAEMAAPLYPLTKPGTLFSWGPDQQKAYQEIKQALLTAPALGLPDLTKPFELFVDEKQGYAKGVLTQKLGPWRRPVAYLSKKLDPVAAGWPPCLRMVAAIAVLTKDAGKLTMGQPLVILAPHAVEALVKQPPDRWLSNARMTHYQAMLLDTDRVQFGPVVALNPATLLPLPEEGAPHDCLEILAETHGTRPDLTDQPIPDADHTWYTDGSSFLQEGQRKAGAAVTTETEVIWAGALPAGTSAQRAELIALTQALKMAEGKRLNVYTDSRYAFATAHIHGEIYRRRGWLTSEGREIKNKSEILALLKALFLPKRLSIIHCLGHQKGDSAEARGNRLADQAAREAAIKTPPDTSTLLIAGKRTADGSEFEKRTADGSEFESPKKKAKVE

SEQ ID NO: 2092 - protein, 2105 aa, synthetic construct
MPAAKRVKLDGGDKKYSIGLDIGTNSVGWAVITDEYKVPSKKFKVLGNTDRHSIKKNLIGALLFDSGETAEATRLKRTARRRYTRRKNRICYLQEIFSNEMAKVDDSFFHRLEESFLVEEDKKHERHPIFGNIVDEVAYHEKYPTIYHLRKKLVDSTDKADLRLIYLALAHMIKFRGHFLIEGDLNPDNSDVDKLFIQLVQTYNQLFEENPINASGVDAKAILSARLSKSRRLENLIAQLPGEKKNGLFGNLIALSLGLTPNFKSNFDLAEDAKLQLSKDTYDDDLDNLLAQIGDQYADLFLAAKNLSDAILLSDILRVNTEITKAPLSASMIKRYDEHHQDLTLLKALVRQQLPEKYKEIFFDQSKNGYAGYIDGGASQEEFYKFIKPILEKMDGTEELLVKLNREDLLRKQRTFDNGSIPHQIHLGELHAILRRQEDFYPFLKDNREKIEKILTFRIPYYVGPLARGNSRFAWMTRKSEETITPWNFEEVVDKGASAQSFIERMTNFDKNLPNEKVLPKHSLLYEYFTVYNELTKVKYVTEGMRKPAFLSGEQKKAIVDLLFKTNRKVTVKQLKEDYFKKIECFDSVEISGVEDRFNASLGTYHDLLKIIKDKDFLDNEENEDILEDIVLTLTLFEDREMIEERLKTYAHLFDDKVMKQLKRRRYTGWGRLSRKLINGIRDKQSGKTILDFLKSDGFANRNFMQLIHDDSLTFKEDIQKAQVSGQGDSLHEHIANLAGSPAIKKGILQTVKVVDELVKVMGRHKPENIVIEMARENQTTQKGQKNSRERMKRIEEGIKELGSQILKEHPVENTQLQNEKLYLYYLQNGRDMYVDQELDINRLSDYDVDHIVPQSFLKDDSIDNKVLTRSDKARGKSDNVPSEEVVKKMKNYWRQLLNAKLITQRKFDNLTKAERGGLSELDKAGFIKRQLVETRQITKHVAQILDSRMNTKYDENDKLIREVKVITLKSKLVSDFRKDFQFYKVREINNYHHAHDAYLNAVVGTALIKKYPKLESEFVYGDYKVYDVRKMIAKSEQEIGKATAKYFFYSNIMNFFKTEITLANGEIRKRPLIETNGETGEIVWDKGRDFATVRKVLSMPQVNIVKKTEVQTGGFSKESILPKRNSDKLIARKKDWDPKKYGGFDSPTVAYSVLVVAKVEKGKSKKLKSVKELLGITIMERSSFEKNPIDFLEAKGYKEVKKDLIIKLPKYSLFELENGRKRMLASAGELQKGNELALPSKYVNFLYLASHYEKLKGSPEDNEQKQLFVEQHKHYLDEIIEQISEFSKRVILADANLDKVLSAYNKHRDKPIREQAENIIHLFTLTNLGAPAAFKYFDTTIDRKRYTSTKEVLDATLIHQSITGLYETRIDLSQLGGDGGEAAAKEAAAKEAAAKEAAAKGGLGIEDEYRLHETSTEPDVSLGSTWLSDFPQAWAETGGMGLAVRQAPLIIPLKATSTPVSIQQYPMSHEARLGIKPHIQRLLDQGILVPCQSPWNTPLLPVKKPGTNDYRPVQDLREVNKRVEDIHPTVPNPYNLLSGLPPSHQWYTVLDLKDAFFCLRLHPTSQPLFAFEWRDPGMGISGQLTWTRLPQGFKNSPTLFNEALHRDLADFRIQHPDLILLQYVDDILLAATSELDCQQGTRALLQTLGDLGYRASAKKAQICQKQVKYLGYLLREGQRWLTEARKETVMGQPVPKTPRQLREFLGKAGFCRLFIPGFAEMAAPLYPLTKPGTLFSWGPDQQKAYQEIKQALLTAPALGLPDLTKPFELFVDEKQGYAKGVLTQKLGPWRRPVAYLSKKLDPVAAGWPPCLRMVAAIAVLTKDAGKLTMGQPLVILAPHAVEALVKQPPDRWLSNARMTHYQAMLLDTDRVQFGPVVALNPATLLPLPEEGAPHDCLEILAETHGTRPDLTDQPIPDADHTWYTDGSSFLQEGQRKAGAAVTTETEVIWAGALPAGTSAQRAELIALTQALKMAEGKRLNVYTDSRYAFATAHIHGEIYRRRGWLTSEGREIKNKSEILALLKALFLPKRLSIIHCLGHQKGDSAEARGNRLADQAAREAAIKTPPDTSTLLIAGKRTADGSEFEKRTADGSEFESPKKKAKVE

SEQ ID NO: 2093 - protein, 2096 aa, synthetic construct; identical to SEQ ID NO: 2048

SEQ ID NO: 2094 - protein, 2115 aa, synthetic construct
MPAAKRVKLDGGDKKYSIGLDIGTNSVGWAVITDEYKVPSKKFKVLGNTDRHSIKKNLIGALLFDSGETAEATRLKRTARRRYTRRKNRICYLQEIFSNEMAKVDDSFFHRLEESFLVEEDKKHERHPIFGNIVDEVAYHEKYPTIYHLRKKLVDSTDKADLRLIYLALAHMIKFRGHFLIEGDLNPDNSDVDKLFIQLVQTYNQLFEENPINASGVDAKAILSARLSKSRRLENLIAQLPGEKKNGLFGNLIALSLGLTPNFKSNFDLAEDAKLQLSKDTYDDDLDNLLAQIGDQYADLFLAAKNLSDAILLSDILRVNTEITKAPLSASMIKRYDEHHQDLTLLKALVRQQLPEKYKEIFFDQSKNGYAGYIDGGASQEEFYKFIKPILEKMDGTEELLVKLNREDLLRKQRTFDNGSIPHQIHLGELHAILRRQEDFYPFLKDNREKIEKILTFRIPYYVGPLARGNSRFAWMTRKSEETITPWNFEEVVDKGASAQSFIERMTNFDKNLPNEKVLPKHSLLYEYFTVYNELTKVKYVTEGMRKPAFLSGEQKKAIVDLLFKTNRKVTVKQLKEDYFKKIECFDSVEISGVEDRFNASLGTYHDLLKIIKDKDFLDNEENEDILEDIVLTLTLFEDREMIEERLKTYAHLFDDKVMKQLKRRRYTGWGRLSRKLINGIRDKQSGKTILDFLKSDGFANRNFMQLIHDDSLTFKEDIQKAQVSGQGDSLHEHIANLAGSPAIKKGILQTVKVVDELVKVMGRHKPENIVIEMARENQTTQKGQKNSRERMKRIEEGIKELGSQILKEHPVENTQLQNEKLYLYYLQNGRDMYVDQELDINRLSDYDVDHIVPQSFLKDDSIDNKVLTRSDKARGKSDNVPSEEVVKKMKNYWRQLLNAKLITQRKFDNLTKAERGGLSELDKAGFIKRQLVETRQITKHVAQILDSRMNTKYDENDKLIREVKVITLKSKLVSDFRKDFQFYKVREINNYHHAHDAYLNAVVGTALIKKYPKLESEFVYGDYKVYDVRKMIAKSEQEIGKATAKYFFYSNIMNFFKTEITLANGEIRKRPLIETNGETGEIVWDKGRDFATVRKVLSMPQVNIVKKTEVQTGGFSKESILPKRNSDKLIARKKDWDPKKYGGFDSPTVAYSVLVVAKVEKGKSKKLKSVKELLGITIMERSSFEKNPIDFLEAKGYKEVKKDLIIKLPKYSLFELENGRKRMLASAGELQKGNELALPSKYVNFLYLASHYEKLKGSPEDNEQKQLFVEQHKHYLDEIIEQISEFSKRVILADANLDKVLSAYNKHRDKPIREQAENIIHLFTLTNLGAPAAFKYFDTTIDRKRYTSTKEVLDATLIHQSITGLYETRIDLSQLGGDGGGGGGSGGGGSGGGGSGGGGSGGGGSGGGGSGGLGIEDEYRLHETSTEPDVSLGSTWLSDFPQAWAETGGMGLAVRQAPLIIPLKATSTPVSIQQYPMSHEARLGIKPHIQRLLDQGILVPCQSPWNTPLLPVKKPGTNDYRPVQDLREVNKRVEDIHPTVPNPYNLLSGLPPSHQWYTVLDLKDAFFCLRLHPTSQPLFAFEWRDPGMGISGQLTWTRLPQGFKNSPTLFNEALHRDLADFRIQHPDLILLQYVDDILLAATSELDCQQGTRALLQTLGDLGYRASAKKAQICQKQVKYLGYLLREGQRWLTEARKETVMGQPVPKTPRQLREFLGKAGFCRLFIPGFAEMAAPLYPLTKPGTLFSWGPDQQKAYQEIKQALLTAPALGLPDLTKPFELFVDEKQGYAKGVLTQKLGPWRRPVAYLSKKLDPVAAGWPPCLRMVAAIAVLTKDAGKLTMGQPLVILAPHAVEALVKQPPDRWLSNARMTHYQAMLLDTDRVQFGPVVALNPATLLPLPEEGAPHDCLEILAETHGTRPDLTDQPIPDADHTWYTDGSSFLQEGQRKAGAAVTTETEVIWAGALPAGTSAQRAELIALTQALKMAEGKRLNVYTDSRYAFATAHIHGEIYRRRGWLTSEGREIKNKSEILALLKALFLPKRLSIIHCLGHQKGDSAEARGNRLADQAAREAAIKTPPDTSTLLIAGKRTADGSEFEKRTADGSEFESPKKKAKVE

SEQ ID NO: 2095 - protein, 2096 aa, synthetic construct
MPAAKRVKLDGGDKKYSIGLDIGTNSVGWAVITDEYKVPSKKFKVLGNTDRHSIKKNLIGALLFDSGETAEATRLKRTARRRYTRRKNRICYLQEIFSNEMAKVDDSFFHRLEESFLVEEDKKHERHPIFGNIVDEVAYHEKYPTIYHLRKKLVDSTDKADLRLIYLALAHMIKFRGHFLIEGDLNPDNSDVDKLFIQLVQTYNQLFEENPINASGVDAKAILSARLSKSRRLENLIAQLPGEKKNGLFGNLIALSLGLTPNFKSNFDLAEDAKLQLSKDTYDDDLDNLLAQIGDQYADLFLAAKNLSDAILLSDILRVNTEITKAPLSASMIKRYDEHHQDLTLLKALVRQQLPEKYKEIFFDQSKNGYAGYIDGGASQEEFYKFIKPILEKMDGTEELLVKLNREDLLRKQRTFDNGSIPHQIHLGELHAILRRQEDFYPFLKDNREKIEKILTFRIPYYVGPLARGNSRFAWMTRKSEETITPWNFEEVVDKGASAQSFIERMTNFDKNLPNEKVLPKHSLLYEYFTVYNELTKVKYVTEGMRKPAFLSGEQKKAIVDLLFKTNRKVTVKQLKEDYFKKIECFDSVEISGVEDRFNASLGTYHDLLKIIKDKDFLDNEENEDILEDIVLTLTLFEDREMIEERLKTYAHLFDDKVMKQLKRRRYTGWGRLSRKLINGIRDKQSGKTILDFLKSDGFANRNFMQLIHDDSLTFKEDIQKAQVSGQGDSLHEHIANLAGSPAIKKGILQTVKVVDELVKVMGRHKPENIVIEMARENQTTQKGQKNSRERMKRIEEGIKELGSQILKEHPVENTQLQNEKLYLYYLQNGRDMYVDQELDINRLSDYDVDHIVPQSFLKDDSIDNKVLTRSDKARGKSDNVPSEEVVKKMKNYWRQLLNAKLITQRKFDNLTKAERGGLSELDKAGFIKRQLVETRQITKHVAQILDSRMNTKYDENDKLIREVKVITLKSKLVSDFRKDFQFYKVREINNYHHAHDAYLNAVVGTALIKKYPKLESEFVYGDYKVYDVRKMIAKSEQEIGKATAKYFFYSNIMNFFKTEITLANGEIRKRPLIETNGETGEIVWDKGRDFATVRKVLSMPQVNIVKKTEVQTGGFSKESILPKRNSDKLIARKKDWDPKKYGGFDSPTVAYSVLVVAKVEKGKSKKLKSVKELLGITIMERSSFEKNPIDFLEAKGYKEVKKDLIIKLPKYSLFELENGRKRMLASAGELQKGNELALPSKYVNFLYLASHYEKLKGSPEDNEQKQLFVEQHKHYLDEIIEQISEFSKRVILADANLDKVLSAYNKHRDKPIREQAENIIHLFTLTNLGAPAAFKYFDTTIDRKRYTSTKEVLDATLIHQSITGLYETRIDLSQLGGDGGPAPEAAAKGSSGGLGIEDEYRLHETSTEPDVSLGSTWLSDFPQAWAETGGMGLAVRQAPLIIPLKATSTPVSIQQYPMSHEARLGIKPHIQRLLDQGILVPCQSPWNTPLLPVKKPGTNDYRPVQDLREVNKRVEDIHPTVPNPYNLLSGLPPSHQWYTVLDLKDAFFCLRLHPTSQPLFAFEWRDPGMGISGQLTWTRLPQGFKNSPTLFNEALHRDLADFRIQHPDLILLQYVDDILLAATSELDCQQGTRALLQTLGDLGYRASAKKAQICQKQVKYLGYLLREGQRWLTEARKETVMGQPVPKTPRQLREFLGKAGFCRLFIPGFAEMAAPLYPLTKPGTLFSWGPDQQKAYQEIKQALLTAPALGLPDLTKPFELFVDEKQGYAKGVLTQKLGPWRRPVAYLSKKLDPVAAGWPPCLRMVAAIAVLTKDAGKLTMGQPLVILAPHAVEALVKQPPDRWLSNARMTHYQAMLLDTDRVQFGPVVALNPATLLPLPEEGAPHDCLEILAETHGTRPDLTDQPIPDADHTWYTDGSSFLQEGQRKAGAAVTTETEVIWAGALPAGTSAQRAELIALTQALKMAEGKRLNVYTDSRYAFATAHIHGEIYRRRGWLTSEGREIKNKSEILALLKALFLPKRLSIIHCLGHQKGDSAEARGNRLADQAAREAAIKTPPDTSTLLIAGKRTADGSEFEKRTADGSEFESPKKKAKVE

SEQ ID NO: 2096 - protein, 2090 aa, synthetic construct
MPAAKRVKLDGGDKKYSIGLDIGTNSVGWAVITDEYKVPSKKFKVLGNTDRHSIKKNLIGALLFDSGETAEATRLKRTARRRYTRRKNRICYLQEIFSNEMAKVDDSFFHRLEESFLVEEDKKHERHPIFGNIVDEVAYHEKYPTIYHLRKKLVDSTDKADLRLIYLALAHMIKFRGHFLIEGDLNPDNSDVDKLFIQLVQTYNQLFEENPINASGVDAKAILSARLSKSRRLENLIAQLPGEKKNGLFGNLIALSLGLTPNFKSNFDLAEDAKLQLSKDTYDDDLDNLLAQIGDQYADLFLAAKNLSDAILLSDILRVNTEITKAPLSASMIKRYDEHHQDLTLLKALVRQQLPEKYKEIFFDQSKNGYAGYIDGGASQEEFYKFIKPILEKMDGTEELLVKLNREDLLRKQRTFDNGSIPHQIHLGELHAILRRQEDFYPFLKDNREKIEKILTFRIPYYVGPLARGNSRFAWMTRKSEETITPWNFEEVVDKGASAQSFIERMTNFDKNLPNEKVLPKHSLLYEYFTVYNELTKVKYVTEGMRKPAFLSGEQKKAIVDLLFKTNRKVTVKQLKEDYFKKIECFDSVEISGVEDRFNASLGTYHDLLKIIKDKDFLDNEENEDILEDIVLTLTLFEDREMIEERLKTYAHLFDDKVMKQLKRRRYTGWGRLSRKLINGIRDKQSGKTILDFLKSDGFANRNFMQLIHDDSLTFKEDIQKAQVSGQGDSLHEHIANLAGSPAIKKGILQTVKVVDELVKVMGRHKPENIVIEMARENQTTQKGQKNSRERMKRIEEGIKELGSQILKEHPVENTQLQNEKLYLYYLQNGRDMYVDQELDINRLSDYDVDHIVPQSFLKDDSIDNKVLTRSDKARGKSDNVPSEEVVKKMKNYWRQLLNAKLITQRKFDNLTKAERGGLSELDKAGFIKRQLVETRQITKHVAQILDSRMNTKYDENDKLIREVKVITLKSKLVSDFRKDFQFYKVREINNYHHAHDAYLNAVVGTALIKKYPKLESEFVYGDYKVYDVRKMIAKSEQEIGKATAKYFFYSNIMNFFKTEITLANGEIRKRPLIETNGETGEIVWDKGRDFATVRKVLSMPQVNIVKKTEVQTGGFSKESILPKRNSDKLIARKKDWDPKKYGGFDSPTVAYSVLVVAKVEKGKSKKLKSVKELLGITIMERSSFEKNPIDFLEAKGYKEVKKDLIIKLPKYSLFELENGRKRMLASAGELQKGNELALPSKYVNFLYLASHYEKLKGSPEDNEQKQLFVEQHKHYLDEIIEQISEFSKRVILADANLDKVLSAYNKHRDKPIREQAENIIHLFTLTNLGAPAAFKYFDTTIDRKRYTSTKEVLDATLIHQSITGLYETRIDLSQLGGDGGEAAAKGGLGIEDEYRLHETSTEPDVSLGSTWLSDFPQAWAETGGMGLAVRQAPLIIPLKATSTPVSIQQYPMSHEARLGIKPHIQRLLDQGILVPCQSPWNTPLLPVKKPGTNDYRPVQDLREVNKRVEDIHPTVPNPYNLLSGLPPSHQWYTVLDLKDAFFCLRLHPTSQPLFAFEWRDPGMGISGQLTWTRLPQGFKNSPTLFNEALHRDLADFRIQHPDLILLQYVDDILLAATSELDCQQGTRALLQTLGDLGYRASAKKAQICQKQVKYLGYLLREGQRWLTEARKETVMGQPVPKTPRQLREFLGKAGFCRLFIPGFAEMAAPLYPLTKPGTLFSWGPDQQKAYQEIKQALLTAPALGLPDLTKPFELFVDEKQGYAKGVLTQKLGPWRRPVAYLSKKLDPVAAGWPPCLRMVAAIAVLTKDAGKLTMGQPLVILAPHAVEALVKQPPDRWLSNARMTHYQAMLLDTDRVQFGPVVALNPATLLPLPEEGAPHDCLEILAETHGTRPDLTDQPIPDADHTWYTDGSSFLQEGQRKAGAAVTTETEVIWAGALPAGTSAQRAELIALTQALKMAEGKRLNVYTDSRYAFATAHIHGEIYRRRGWLTSEGREIKNKSEILALLKALFLPKRLSIIHCLGHQKGDSAEARGNRLADQAAREAAIKTPPDTSTLLIAGKRTADGSEFEKRTADGSEFESPKKKAKVE

SEQ ID NO: 2097 - protein, 2096 aa, synthetic construct
MPAAKRVKLDGGDKKYSIGLDIGTNSVGWAVITDEYKVPSKKFKVLGNTDRHSIKKNLIGALLFDSGETAEATRLKRTARRRYTRRKNRICYLQEIFSNEMAKVDDSFFHRLEESFLVEEDKKHERHPIFGNIVDEVAYHEKYPTIYHLRKKLVDSTDKADLRLIYLALAHMIKFRGHFLIEGDLNPDNSDVDKLFIQLVQTYNQLFEENPINASGVDAKAILSARLSKSRRLENLIAQLPGEKKNGLFGNLIALSLGLTPNFKSNFDLAEDAKLQLSKDTYDDDLDNLLAQIGDQYADLFLAAKNLSDAILLSDILRVNTEITKAPLSASMIKRYDEHHQDLTLLKALVRQQLPEKYKEIFFDQSKNGYAGYIDGGASQEEFYKFIKPILEKMDGTEELLVKLNREDLLRKQRTFDNGSIPHQIHLGELHAILRRQEDFYPFLKDNREKIEKILTFRIPYYVGPLARGNSRFAWMTRKSEETITPWNFEEVVDKGASAQSFIERMTNFDKNLPNEKVLPKHSLLYEYFTVYNELTKVKYVTEGMRKPAFLSGEQKKAIVDLLFKTNRKVTVKQLKEDYFKKIECFDSVEISGVEDRFNASLGTYHDLLKIIKDKDFLDNEENEDILEDIVLTLTLFEDREMIEERLKTYAHLFDDKVMKQLKRRRYTGWGRLSRKLINGIRDKQSGKTILDFLKSDGFANRNFMQLIHDDSLTFKEDIQKAQVSGQGDSLHEHIANLAGSPAIKKGILQTVKVVDELVKVMGRHKPENIVIEMARENQTTQKGQKNSRERMKRIEEGIKELGSQILKEHPVENTQLQNEKLYLYYLQNGRDMYVDQELDINRLSDYDVDHIVPQSFLKDDSIDNKVLTRSDKARGKSDNVPSEEVVKKMKNYWRQLLNAKLITQRKFDNLTKAERGGLSELDKAGFIKRQLVETRQITKHVAQILDSRMNTKYDENDKLIREVKVITLKSKLVSDFRKDFQFYKVREINNYHHAHDAYLNAVVGTALIKKYPKLESEFVYGDYKVYDVRKMIAKSEQEIGKATAKYFFYSNIMNFFKTEITLANGEIRKRPLIETNGETGEIVWDKGRDFATVRKVLSMPQVNIVKKTEVQTGGFSKESILPKRNSDKLIARKKDWDPKKYGGFDSPTVAYSVLVVAKVEKGKSKKLKSVKELLGITIMERSSFEKNPIDFLEAKGYKEVKKDLIIKLPKYSLFELENGRKRMLASAGELQKGNELALPSKYVNFLYLASHYEKLKGSPEDNEQKQLFVEQHKHYLDEIIEQISEFSKRVILADANLDKVLSAYNKHRDKPIREQAENIIHLFTLTNLGAPAAFKYFDTTIDRKRYTSTKEVLDATLIHQSITGLYETRIDLSQLGGDGGPAPEAAAKGGSGGLGIEDEYRLHETSTEPDVSLGSTWLSDFPQAWAETGGMGLAVRQAPLIIPLKATSTPVSIQQYPMSHEARLGIKPHIQRLLDQGILVPCQSPWNTPLLPVKKPGTNDYRPVQDLREVNKRVEDIHPTVPNPYNLLSGLPPSHQWYTVLDLKDAFFCLRLHPTSQPLFAFEWRDPGMGISGQLTWTRLPQGFKNSPTLFNEALHRDLADFRIQHPDLILLQYVDDILLAATSELDCQQGTRALLQTLGDLGYRASAKKAQICQKQVKYLGYLLREGQRWLTEARKETVMGQPVPKTPRQLREFLGKAGFCRLFIPGFAEMAAPLYPLTKPGTLFSWGPDQQKAYQEIKQALLTAPALGLPDLTKPFELFVDEKQGYAKGVLTQKLGPWRRPVAYLSKKLDPVAAGWPPCLRMVAAIAVLTKDAGKLTMGQPLVILAPHAVEALVKQPPDRWLSNARMTHYQAMLLDTDRVQFGPVVALNPATLLPLPEEGAPHDCLEILAETHGTRPDLTDQPIPDADHTWYTDGSSFLQEGQRKAGAAVTTETEVIWAGALPAGTSAQRAELIALTQALKMAEGKRLNVYTDSRYAFATAHIHGEIYRRRGWLTSEGREIKNKSEILALLKALFLPKRLSIIHCLGHQKGDSAEARGNRLADQAAREAAIKTPPDTSTLLIAGKRTADGSEFEKRTADGSEFESPKKKAKVE

SEQ ID NO: 2098 - protein, 2115 aa, synthetic construct
MPAAKRVKLDGGDKKYSIGLDIGTNSVGWAVITDEYKVPSKKFKVLGNTDRHSIKKNLIGALLFDSGETAEATRLKRTARRRYTRRKNRICYLQEIFSNEMAKVDDSFFHRLEESFLVEEDKKHERHPIFGNIVDEVAYHEKYPTIYHLRKKLVDSTDKADLRLIYLALAHMIKFRGHFLIEGDLNPDNSDVDKLFIQLVQTYNQLFEENPINASGVDAKAILSARLSKSRRLENLIAQLPGEKKNGLFGNLIALSLGLTPNFKSNFDLAEDAKLQLSKDTYDDDLDNLLAQIGDQYADLFLAAKNLSDAILLSDILRVNTEITKAPLSASMIKRYDEHHQDLTLLKALVRQQLPEKYKEIFFDQSKNGYAGYIDGGASQEEFYKFIKPILEKMDGTEELLVKLNREDLLRKQRTFDNGSIPHQIHLGELHAILRRQEDFYPFLKDNREKIEKILTFRIPYYVGPLARGNSRFAWMTRKSEETITPWNFEEVVDKGASAQSFIERMTNFDKNLPNEKVLPKHSLLYEYFTVYNELTKVKYVTEGMRKPAFLSGEQKKAIVDLLFKTNRKVTVKQLKEDYFKKIECFDSVEISGVEDRFNASLGTYHDLLKIIKDKDFLDNEENEDILEDIVLTLTLFEDREMIEERLKTYAHLFDDKVMKQLKRRRYTGWGRLSRKLINGIRDKQSGKTILDFLKSDGFANRNFMQLIHDDSLTFKEDIQKAQVSGQGDSLHEHIANLAGSPAIKKGILQTVKVVDELVKVMGRHKPENIVIEMARENQTTQKGQKNSRERMKRIEEGIKELGSQILKEHPVENTQLQNEKLYLYYLQNGRDMYVDQELDINRLSDYDVDHIVPQSFLKDDSIDNKVLTRSDKARGKSDNVPSEEVVKKMKNYWRQLLNAKLITQRKFDNLTKAERGGLSELDKAGFIKRQLVETRQITKHVAQILDSRMNTKYDENDKLIREVKVITLKSKLVSDFRKDFQFYKVREINNYHHAHDAYLNAVVGTALIKKYPKLESEFVYGDYKVYDVRKMIAKSEQEIGKATAKYFFYSNIMNFFKTEITLANGEIRKRPLIETNGETGEIVWDKGRDFATVRKVLSMPQVNIVKKTEVQTGGFSKESILPKRNSDKLIARKKDWDPKKYGGFDSPTVAYSVLVVAKVEKGKSKKLKSVKELLGITIMERSSFEKNPIDFLEAKGYKEVKKDLIIKLPKYSLFELENGRKRMLASAGELQKGNELALPSKYVNFLYLASHYEKLKGSPEDNEQKQLFVEQHKHYLDEIIEQISEFSKRVILADANLDKVLSAYNKHRDKPIREQAENIIHLFTLTNLGAPAAFKYFDTTIDRKRYTSTKEVLDATLIHQSITGLYETRIDLSQLGGDGGEAAAKEAAAKEAAAKEAAAKEAAAKEAAAKGGLGIEDEYRLHETSTEPDVSLGSTWLSDFPQAWAETGGMGLAVRQAPLIIPLKATSTPVSIQQYPMSHEARLGIKPHIQRLLDQGILVPCQSPWNTPLLPVKKPGTNDYRPVQDLREVNKRVEDIHPTVPNPYNLLSGLPPSHQWYTVLDLKDAFFCLRLHPTSQPLFAFEWRDPGMGISGQLTWTRLPQGFKNSPTLFNEALHRDLADFRIQHPDLILLQYVDDILLAATSELDCQQGTRALLQTLGDLGYRASAKKAQICQKQVKYLGYLLREGQRWLTEARKETVMGQPVPKTPRQLREFLGKAGFCRLFIPGFAEMAAPLYPLTKPGTLFSWGPDQQKAYQEIKQALLTAPALGLPDLTKPFELFVDEKQGYAKGVLTQKLGPWRRPVAYLSKKLDPVAAGWPPCLRMVAAIAVLTKDAGKLTMGQPLVILAPHAVEALVKQPPDRWLSNARMTHYQAMLLDTDRVQFGPVVALNPATLLPLPEEGAPHDCLEILAETHGTRPDLTDQPIPDADHTWYTDGSSFLQEGQRKAGAAVTTETEVIWAGALPAGTSAQRAELIALTQALKMAEGKRLNVYTDSRYAFATAHIHGEIYRRRGWLTSEGREIKNKSEILALLKALFLPKRLSIIHCLGHQKGDSAEARGNRLADQAAREAAIKTPPDTSTLLIAGKRTADGSEFEKRTADGSEFESPKKKAKVE

SEQ ID NO: 2099 - protein, 2096 aa, synthetic construct
MPAAKRVKLDGGDKKYSIGLDIGTNSVGWAVITDEYKVPSKKFKVLGNTDRHSIKKNLIGALLFDSGETAEATRLKRTARRRYTRRKNRICYLQEIFSNEMAKVDDSFFHRLEESFLVEEDKKHERHPIFGNIVDEVAYHEKYPTIYHLRKKLVDSTDKADLRLIYLALAHMIKFRGHFLIEGDLNPDNSDVDKLFIQLVQTYNQLFEENPINASGVDAKAILSARLSKSRRLENLIAQLPGEKKNGLFGNLIALSLGLTPNFKSNFDLAEDAKLQLSKDTYDDDLDNLLAQIGDQYADLFLAAKNLSDAILLSDILRVNTEITKAPLSASMIKRYDEHHQDLTLLKALVRQQLPEKYKEIFFDQSKNGYAGYIDGGASQEEFYKFIKPILEKMDGTEELLVKLNREDLLRKQRTFDNGSIPHQIHLGELHAILRRQEDFYPFLKDNREKIEKILTFRIPYYVGPLARGNSRFAWMTRKSEETITPWNFEEVVDKGASAQSFIERMTNFDKNLPNEKVLPKHSLLYEYFTVYNELTKVKYVTEGMRKPAFLSGEQKKAIVDLLFKTNRKVTVKQLKEDYFKKIECFDSVEISGVEDRFNASLGTYHDLLKIIKDKDFLDNEENEDILEDIVLTLTLFEDREMIEERLKTYAHLFDDKVMKQLKRRRYTGWGRLSRKLINGIRDKQSGKTILDFLKSDGFANRNFMQLIHDDSLTFKEDIQKAQVSGQGDSLHEHIANLAGSPAIKKGILQTVKVVDELVKVMGRHKPENIVIEMARENQTTQKGQKNSRERMKRIEEGIKELGSQILKEHPVENTQLQNEKLYLYYLQNGRDMYVDQELDINRLSDYDVDHIVPQSFLKDDSIDNKVLTRSDKARGKSDNVPSEEVVKKMKNYWRQLLNAKLITQRKFDNLTKAERGGLSELDKAGFIKRQLVETRQITKHVAQILDSRMNTKYDENDKLIREVKVITLKSKLVSDFRKDFQFYKVREINNYHHAHDAYLNAVVGTALIKKYPKLESEFVYGDYKVYDVRKMIAKSEQEIGKATAKYFFYSNIMNFFKTEITLANGEIRKRPLIETNGETGEIVWDKGRDFATVRKVLSMPQVNIVKKTEVQTGGFSKESILPKRNSDKLIARKKDWDPKKYGGFDSPTVAYSVLVVAKVEKGKSKKLKSVKELLGITIMERSSFEKNPIDFLEAKGYKEVKKDLIIKLPKYSLFELENGRKRMLASAGELQKGNELALPSKYVNFLYLASHYEKLKGSPEDNEQKQLFVEQHKHYLDEIIEQISEFSKRVILADANLDKVLSAYNKHRDKPIREQAENIIHLFTLTNLGAPAAFKYFDTTIDRKRYTSTKEVLDATLIHQSITGLYETRIDLSQLGGDGGEAAAKPAPGGSGGLGIEDEYRLHETSTEPDVSLGSTWLSDFPQAWAETGGMGLAVRQAPLIIPLKATSTPVSIQQYPMSHEARLGIKPHIQRLLDQGILVPCQSPWNTPLLPVKKPGTNDYRPVQDLREVNKRVEDIHPTVPNPYNLLSGLPPSHQWYTVLDLKDAFFCLRLHPTSQPLFAFEWRDPGMGISGQLTWTRLPQGFKNSPTLFNEALHRDLADFRIQHPDLILLQYVDDILLAATSELDCQQGTRALLQTLGDLGYRASAKKAQICQKQVKYLGYLLREGQRWLTEARKETVMGQPVPKTPRQLREFLGKAGFCRLFIPGFAEMAAPLYPLTKPGTLFSWGPDQQKAYQEIKQALLTAPALGLPDLTKPFELFVDEKQGYAKGVLTQKLGPWRRPVAYLSKKLDPVAAGWPPCLRMVAAIAVLTKDAGKLTMGQPLVILAPHAVEALVKQPPDRWLSNARMTHYQAMLLDTDRVQFGPVVALNPATLLPLPEEGAPHDCLEILAETHGTRPDLTDQPIPDADHTWYTDGSSFLQEGQRKAGAAVTTETEVIWAGALPAGTSAQRAELIALTQALKMAEGKRLNVYTDSRYAFATAHIHGEIYRRRGWLTSEGREIKNKSEILALLKALFLPKRLSIIHCLGHQKGDSAEARGNRLADQAAREAAIKTPPDTSTLLIAGKRTADGSEFEKRTADGSEFESPKKKAKVE

SEQ ID NO: 2100 - protein, 2096 aa, synthetic construct
MPAAKRVKLDGGDKKYSIGLDIGTNSVGWAVITDEYKVPSKKFKVLGNTDRHSIKKNLIGALLFDSGETAEATRLKRTARRRYTRRKNRICYLQEIFSNEMAKVDDSFFHRLEESFLVEEDKKHERHPIFGNIVDEVAYHEKYPTIYHLRKKLVDSTDKADLRLIYLALAHMIKFRGHFLIEGDLNPDNSDVDKLFIQLVQTYNQLFEENPINASGVDAKAILSARLSKSRRLENLIAQLPGEKKNGLFGNLIALSLGLTPNFKSNFDLAEDAKLQLSKDTYDDDLDNLLAQIGDQYADLFLAAKNLSDAILLSDILRVNTEITKAPLSASMIKRYDEHHQDLTLLKALVRQQLPEKYKEIFFDQSKNGYAGYIDGGASQEEFYKFIKPILEKMDGTEELLVKLNREDLLRKQRTFDNGSIPHQIHLGELHAILRRQEDFYPFLKDNREKIEKILTFRIPYYVGPLARGNSRFAWMTRKSEETITPWNFEEVVDKGASAQSFIERMTNFDKNLPNEKVLPKHSLLYEYFTVYNELTKVKYVTEGMRKPAFLSGEQKKAIVDLLFKTNRKVTVKQLKEDYFKKIECFDSVEISGVEDRFNASLGTYHDLLKIIKDKDFLDNEENEDILEDIVLTLTLFEDREMIEERLKTYAHLFDDKVMKQLKRRRYTGWGRLSRKLINGIRDKQSGKTILDFLKSDGFANRNFMQLIHDDSLTFKEDIQKAQVSGQGDSLHEHIANLAGSPAIKKGILQTVKVVDELVKVMGRHKPENIVIEMARENQTTQKGQKNSRERMKRIEEGIKELGSQILKEHPVENTQLQNEKLYLYYLQNGRDMYVDQELDINRLSDYDVDHIVPQSFLKDDSIDNKVLTRSDKARGKSDNVPSEEVVKKMKNYWRQLLNAKLITQRKFDNLTKAERGGLSELDKAGFIKRQLVETRQITKHVAQILDSRMNTKYDENDKLIREVKVITLKSKLVSDFRKDFQFYKVREINNYHHAHDAYLNAVVGTALIKKYPKLESEFVYGDYKVYDVRKMIAKSEQEIGKATAKYFFYSNIMNFFKTEITLANGEIRKRPLIETNGETGEIVWDKGRDFATVRKVLSMPQVNIVKKTEVQTGGFSKESILPKRNSDKLIARKKDWDPKKYGGFDSPTVAYSVLVVAKVEKGKSKKLKSVKELLGITIMERSSFEKNPIDFLEAKGYKEVKKDLIIKLPKYSLFELENGRKRMLASAGELQKGNELALPSKYVNFLYLASHYEKLKGSPEDNEQKQLFVEQHKHYLDEIIEQISEFSKRVILADANLDKVLSAYNKHRDKPIREQAENIIHLFTLTNLGAPAAFKYFDTTIDRKRYTSTKEVLDATLIHQSITGLYETRIDLSQLGGDGGGGSGSSEAAAKGGLGIEDEYRLHETSTEPDVSLGSTWLSDFPQAWAETGGMGLAVRQAPLIIPLKATSTPVSIQQYPMSHEARLGIKPHIQRLLDQGILVPCQSPWNTPLLPVKKPGTNDYRPVQDLREVNKRVEDIHPTVPNPYNLLSGLPPSHQWYTVLDLKDAFFCLRLHPTSQPLFAFEWRDPGMGISGQLTWTRLPQGFKNSPTLFNEALHRDLADFRIQHPDLILLQYVDDILLAATSELDCQQGTRALLQTLGDLGYRASAKKAQICQKQVKYLGYLLREGQRWLTEARKETVMGQPVPKTPRQLREFLGKAGFCRLFIPGFAEMAAPLYPLTKPGTLFSWGPDQQKAYQEIKQALLTAPALGLPDLTKPFELFVDEKQGYAKGVLTQKLGPWRRPVAYLSKKLDPVAAGWPPCLRMVAAIAVLTKDAGKLTMGQPLVILAPHAVEALVKQPPDRWLSNARMTHYQAMLLDTDRVQFGPVVALNPATLLPLPEEGAPHDCLEILAETHGTRPDLTDQPIPDADHTWYTDGSSFLQEGQRKAGAAVTTETEVIWAGALPAGTSAQRAELIALTQALKMAEGKRLNVYTDSRYAFATAHIHGEIYRRRGWLTSEGREIKNKSEILALLKALFLPKRLSIIHCLGHQKGDSAEARGNRLADQAAREAAIKTPPDTSTLLIAGKRTADGSEFEKRTADGSEFESPKKKAKVE

SEQ ID NO: 2101 - protein, 2094 aa, synthetic construct
MPAAKRVKLDGGDKKYSIGLDIGTNSVGWAVITDEYKVPSKKFKVLGNTDRHSIKKNLIGALLFDSGETAEATRLKRTARRRYTRRKNRICYLQEIFSNEMAKVDDSFFHRLEESFLVEEDKKHERHPIFGNIVDEVAYHEKYPTIYHLRKKLVDSTDKADLRLIYLALAHMIKFRGHFLIEGDLNPDNSDVDKLFIQLVQTYNQLFEENPINASGVDAKAILSARLSKSRRLENLIAQLPGEKKNGLFGNLIALSLGLTPNFKSNFDLAEDAKLQLSKDTYDDDLDNLLAQIGDQYADLFLAAKNLSDAILLSDILRVNTEITKAPLSASMIKRYDEHHQDLTLLKALVRQQLPEKYKEIFFDQSKNGYAGYIDGGASQEEFYKFIKPILEKMDGTEELLVKLNREDLLRKQRTFDNGSIPHQIHLGELHAILRRQEDFYPFLKDNREKIEKILTFRIPYYVGPLARGNSRFAWMTRKSEETITPWNFEEVVDKGASAQSFIERMTNFDKNLPNEKVLPKHSLLYEYFTVYNELTKVKYVTEGMRKPAFLSGEQKKAIVDLLFKTNRKVTVKQLKEDYFKKIECFDSVEISGVEDRFNASLGTYHDLLKIIKDKDFLDNEENEDILEDIVLTLTLFEDREMIEERLKTYAHLFDDKVMKQLKRRRYTGWGRLSRKLINGIRDKQSGKTILDFLKSDGFANRNFMQLIHDDSLTFKEDIQKAQVSGQGDSLHEHIANLAGSPAIKKGILQTVKVVDELVKVMGRHKPENIVIEMARENQTTQKGQKNSRERMKRIEEGIKELGSQILKEHPVENTQLQNEKLYLYYLQNGRDMYVDQELDINRLSDYDVDHIVPQSFLKDDSIDNKVLTRSDKARGKSDNVPSEEVVKKMKNYWRQLLNAKLITQRKFDNLTKAERGGLSELDKAGFIKRQLVETRQITKHVAQILDSRMNTKYDENDKLIREVKVITLKSKLVSDFRKDFQFYKVREINNYHHAHDAYLNAVVGTALIKKYPKLESEFVYGDYKVYDVRKMIAKSEQEIGKATAKYFFYSNIMNFFKTEITLANGEIRKRPLIETNGETGEIVWDKGRDFATVRKVLSMPQVNIVKKTEVQTGGFSKESILPKRNSDKLIARKKDWDPKKYGGFDSPTVAYSVLVVAKVEKGKSKKLKSVKELLGITIMERSSFEKNPIDFLEAKGYKEVKKDLIIKLPKYSLFELENGRKRMLASAGELQKGNELALPSKYVNFLYLASHYEKLKGSPEDNEQKQLFVEQHKHYLDEIIEQISEFSKRVILADANLDKVLSAYNKHRDKPIREQAENIIHLFTLTNLGAPAAFKYFDTTIDRKRYTSTKEVLDATLIHQSITGLYETRIDLSQLGGDGGPAPGGGGSSGGLGIEDEYRLHETSTEPDVSLGSTWLSDFPQAWAETGGMGLAVRQAPLIIPLKATSTPVSIQQYPMSHEARLGIKPHIQRLLDQGILVPCQSPWNTPLLPVKKPGTNDYRPVQDLREVNKRVEDIHPTVPNPYNLLSGLPPSHQWYTVLDLKDAFFCLRLHPTSQPLFAFEWRDPGMGISGQLTWTRLPQGFKNSPTLFNEALHRDLADFRIQHPDLILLQYVDDILLAATSELDCQQGTRALLQTLGDLGYRASAKKAQICQKQVKYLGYLLREGQRWLTEARKETVMGQPVPKTPRQLREFLGKAGFCRLFIPGFAEMAAPLYPLTKPGTLFSWGPDQQKAYQEIKQALLTAPALGLPDLTKPFELFVDEKQGYAKGVLTQKLGPWRRPVAYLSKKLDPVAAGWPPCLRMVAAIAVLTKDAGKLTMGQPLVILAPHAVEALVKQPPDRWLSNARMTHYQAMLLDTDRVQFGPVVALNPATLLPLPEEGAPHDCLEILAETHGTRPDLTDQPIPDADHTWYTDGSSFLQEGQRKAGAAVTTETEVIWAGALPAGTSAQRAELIALTQALKMAEGKRLNVYTDSRYAFATAHIHGEIYRRRGWLTSEGREIKNKSEILALLKALFLPKRLSIIHCLGHQKGDSAEARGNRLADQAAREAAIKTPPDTSTLLIAGKRTADGSEFEKRTADGSEFESPKKKAKVE

SEQ ID NO: 2102 - protein, 2096 aa, synthetic construct
MPAAKRVKLDGGDKKYSIGLDIGTNSVGWAVITDEYKVPSKKFKVLGNTDRHSIKKNLIGALLFDSGETAEATRLKRTARRRYTRRKNRICYLQEIFSNEMAKVDDSFFHRLEESFLVEEDKKHERHPIFGNIVDEVAYHEKYPTIYHLRKKLVDSTDKADLRLIYLALAHMIKFRGHFLIEGDLNPDNSDVDKLFIQLVQTYNQLFEENPINASGVDAKAILSARLSKSRRLENLIAQLPGEKKNGLFGNLIALSLGLTPNFKSNFDLAEDAKLQLSKDTYDDDLDNLLAQIGDQYADLFLAAKNLSDAILLSDILRVNTEITKAPLSASMIKRYDEHHQDLTLLKALVRQQLPEKYKEIFFDQSKNGYAGYIDGGASQEEFYKFIKPILEKMDGTEELLVKLNREDLLRKQRTFDNGSIPHQIHLGELHAILRRQEDFYPFLKDNREKIEKILTFRIPYYVGPLARGNSRFAWMTRKSEETITPWNFEEVVDKGASAQSFIERMTNFDKNLPNEKVLPKHSLLYEYFTVYNELTKVKYVTEGMRKPAFLSGEQKKAIVDLLFKTNRKVTVKQLKEDYFKKIECFDSVEISGVEDRFNASLGTYHDLLKIIKDKDFLDNEENEDILEDIVLTLTLFEDREMIEERLKTYAHLFDDKVMKQLKRRRYTGWGRLSRKLINGIRDKQSGKTILDFLKSDGFANRNFMQLIHDDSLTFKEDIQKAQVSGQGDSLHEHIANLAGSPAIKKGILQTVKVVDELVKVMGRHKPENIVIEMARENQTTQKGQKNSRERMKRIEEGIKELGSQILKEHPVENTQLQNEKLYLYYLQNGRDMYVDQELDINRLSDYDVDHIVPQSFLKDDSIDNKVLTRSDKARGKSDNVPSEEVVKKMKNYWRQLLNAKLITQRKFDNLTKAERGGLSELDKAGFIKRQLVETRQITKHVAQILDSRMNTKYDENDKLIREVKVITLKSKLVSDFRKDFQFYKVREINNYHHAHDAYLNAVVGTALIKKYPKLESEFVYGDYKVYDVRKMIAKSEQEIGKATAKYFFYSNIMNFFKTEITLANGEIRKRPLIETNGETGEIVWDKGRDFATVRKVLSMPQVNIVKKTEVQTGGFSKESILPKRNSDKLIARKKDWDPKKYGGFDSPTVAYSVLVVAKVEKGKSKKLKSVKELLGITIMERSSFEKNPIDFLEAKGYKEVKKDLIIKLPKYSLFELENGRKRMLASAGELQKGNELALPSKYVNFLYLASHYEKLKGSPEDNEQKQLFVEQHKHYLDEIIEQISEFSKRVILADANLDKVLSAYNKHRDKPIREQAENIIHLFTLTNLGAPAAFKYFDTTIDRKRYTSTKEVLDATLIHQSITGLYETRIDLSQLGGDGGGGSEAAAKGGGGGLGIEDEYRLHETSTEPDVSLGSTWLSDFPQAWAETGGMGLAVRQAPLIIPLKATSTPVSIQQYPMSHEARLGIKPHIQRLLDQGILVPCQSPWNTPLLPVKKPGTNDYRPVQDLREVNKRVEDIHPTVPNPYNLLSGLPPSHQWYTVLDLKDAFFCLRLHPTSQPLFAFEWRDPGMGISGQLTWTRLPQGFKNSPTLFNEALHRDLADFRIQHPDLILLQYVDDILLAATSELDCQQGTRALLQTLGDLGYRASAKKAQICQKQVKYLGYLLREGQRWLTEARKETVMGQPVPKTPRQLREFLGKAGFCRLFIPGFAEMAAPLYPLTKPGTLFSWGPDQQKAYQEIKQALLTAPALGLPDLTKPFELFVDEKQGYAKGVLTQKLGPWRRPVAYLSKKLDPVAAGWPPCLRMVAAIAVLTKDAGKLTMGQPLVILAPHAVEALVKQPPDRWLSNARMTHYQAMLLDTDRVQFGPVVALNPATLLPLPEEGAPHDCLEILAETHGTRPDLTDQPIPDADHTWYTDGSSFLQEGQRKAGAAVTTETEVIWAGALPAGTSAQRAELIALTQALKMAEGKRLNVYTDSRYAFATAHIHGEIYRRRGWLTSEGREIKNKSEILALLKALFLPKRLSIIHCLGHQKGDSAEARGNRLADQAAREAAIKTPPDTSTLLIAGKRTADGSEFEKRTADGSEFESPKKKAKVE

SEQ ID NO: 2103 - protein, 2088 aa, synthetic construct
MPAAKRVKLDGGDKKYSIGLDIGTNSVGWAVITDEYKVPSKKFKVLGNTDRHSIKKNLIGALLFDSGETAEATRLKRTARRRYTRRKNRICYLQEIFSNEMAKVDDSFFHRLEESFLVEEDKKHERHPIFGNIVDEVAYHEKYPTIYHLRKKLVDSTDKADLRLIYLALAHMIKFRGHFLIEGDLNPDNSDVDKLFIQLVQTYNQLFEENPINASGVDAKAILSARLSKSRRLENLIAQLPGEKKNGLFGNLIALSLGLTPNFKSNFDLAEDAKLQLSKDTYDDDLDNLLAQIGDQYADLFLAAKNLSDAILLSDILRVNTEITKAPLSASMIKRYDEHHQDLTLLKALVRQQLPEKYKEIFFDQSKNGYAGYIDGGASQEEFYKFIKPILEKMDGTEELLVKLNREDLLRKQRTFDNGSIPHQIHLGELHAILRRQEDFYPFLKDNREKIEKILTFRIPYYVGPLARGNSRFAWMTRKSEETITPWNFEEVVDKGASAQSFIERMTNFDKNLPNEKVLPKHSLLYEYFTVYNELTKVKYVTEGMRKPAFLSGEQKKAIVDLLFKTNRKVTVKQLKEDYFKKIECFDSVEISGVEDRFNASLGTYHDLLKIIKDKDFLDNEENEDILEDIVLTLTLFEDREMIEERLKTYAHLFDDKVMKQLKRRRYTGWGRLSRKLINGIRDKQSGKTILDFLKSDGFANRNFMQLIHDDSLTFKEDIQKAQVSGQGDSLHEHIANLAGSPAIKKGILQTVKVVDELVKVMGRHKPENIVIEMARENQTTQKGQKNSRERMKRIEEGIKELGSQILKEHPVENTQLQNEKLYLYYLQNGRDMYVDQELDINRLSDYDVDHIVPQSFLKDDSIDNKVLTRSDKARGKSDNVPSEEVVKKMKNYWRQLLNAKLITQRKFDNLTKAERGGLSELDKAGFIKRQLVETRQITKHVAQILDSRMNTKYDENDKLIREVKVITLKSKLVSDFRKDFQFYKVREINNYHHAHDAYLNAVVGTALIKKYPKLESEFVYGDYKVYDVRKMIAKSEQEIGKATAKYFFYSNIMNFFKTEITLANGEIRKRPLIETNGETGEIVWDKGRDFATVRKVLSMPQVNIVKKTEVQTGGFSKESILPKRNSDKLIARKKDWDPKKYGGFDSPTVAYSVLVVAKVEKGKSKKLKSVKELLGITIMERSSFEKNPIDFLEAKGYKEVKKDLIIKLPKYSLFELENGRKRMLASAGELQKGNELALPSKYVNFLYLASHYEKLKGSPEDNEQKQLFVEQHKHYLDEIIEQISEFSKRVILADANLDKVLSAYNKHRDKPIREQAENIIHLFTLTNLGAPAAFKYFDTTIDRKRYTSTKEVLDATLIHQSITGLYETRIDLSQLGGDGGPAPGGLGIEDEYRLHETSTEPDVSLGSTWLSDFPQAWAETGGMGLAVRQAPLIIPLKATSTPVSIQQYPMSHEARLGIKPHIQRLLDQGILVPCQSPWNTPLLPVKKPGTNDYRPVQDLREVNKRVEDIHPTVPNPYNLLSGLPPSHQWYTVLDLKDAFFCLRLHPTSQPLFAFEWRDPGMGISGQLTWTRLPQGFKNSPTLFNEALHRDLADFRIQHPDLILLQYVDDILLAATSELDCQQGTRALLQTLGDLGYRASAKKAQICQKQVKYLGYLLREGQRWLTEARKETVMGQPVPKTPRQLREFLGKAGFCRLFIPGFAEMAAPLYPLTKPGTLFSWGPDQQKAYQEIKQALLTAPALGLPDLTKPFELFVDEKQGYAKGVLTQKLGPWRRPVAYLSKKLDPVAAGWPPCLRMVAAIAVLTKDAGKLTMGQPLVILAPHAVEALVKQPPDRWLSNARMTHYQAMLLDTDRVQFGPVVALNPATLLPLPEEGAPHDCLEILAETHGTRPDLTDQPIPDADHTWYTDGSSFLQEGQRKAGAAVTTETEVIWAGALPAGTSAQRAELIALTQALKMAEGKRLNVYTDSRYAFATAHIHGEIYRRRGWLTSEGREIKNKSEILALLKALFLPKRLSIIHCLGHQKGDSAEARGNRLADQAAREAAIKTPPDTSTLLIAGKRTADGSEFEKRTADGSEFESPKKKAKVE

SEQ ID NO: 2104 - protein, 2093 aa, synthetic construct
MPAAKRVKLDGGDKKYSIGLDIGTNSVGWAVITDEYKVPSKKFKVLGNTDRHSIKKNLIGALLFDSGETAEATRLKRTARRRYTRRKNRICYLQEIFSNEMAKVDDSFFHRLEESFLVEEDKKHERHPIFGNIVDEVAYHEKYPTIYHLRKKLVDSTDKADLRLIYLALAHMIKFRGHFLIEGDLNPDNSDVDKLFIQLVQTYNQLFEENPINASGVDAKAILSARLSKSRRLENLIAQLPGEKKNGLFGNLIALSLGLTPNFKSNFDLAEDAKLQLSKDTYDDDLDNLLAQIGDQYADLFLAAKNLSDAILLSDILRVNTEITKAPLSASMIKRYDEHHQDLTLLKALVRQQLPEKYKEIFFDQSKNGYAGYIDGGASQEEFYKFIKPILEKMDGTEELLVKLNREDLLRKQRTFDNGSIPHQIHLGELHAILRRQEDFYPFLKDNREKIEKILTFRIPYYVGPLARGNSRFAWMTRKSEETITPWNFEEVVDKGASAQSFIERMTNFDKNLPNEKVLPKHSLLYEYFTVYNELTKVKYVTEGMRKPAFLSGEQKKAIVDLLFKTNRKVTVKQLKEDYFKKIECFDSVEISGVEDRFNASLGTYHDLLKIIKDKDFLDNEENEDILEDIVLTLTLFEDREMIEERLKTYAHLFDDKVMKQLKRRRYTGWGRLSRKLINGIRDKQSGKTILDFLKSDGFANRNFMQLIHDDSLTFKEDIQKAQVSGQGDSLHEHIANLAGSPAIKKGILQTVKVVDELVKVMGRHKPENIVIEMARENQTTQKGQKNSRERMKRIEEGIKELGSQILKEHPVENTQLQNEKLYLYYLQNGRDMYVDQELDINRLSDYDVDHIVPQSFLKDDSIDNKVLTRSDKARGKSDNVPSEEVVKKMKNYWRQLLNAKLITQRKFDNLTKAERGGLSELDKAGFIKRQLVETRQITKHVAQILDSRMNTKYDENDKLIREVKVITLKSKLVSDFRKDFQFYKVREINNYHHAHDAYLNAVVGTALIKKYPKLESEFVYGDYKVYDVRKMIAKSEQEIGKATAKYFFYSNIMNFFKTEITLANGEIRKRPLIETNGETGEIVWDKGRDFATVRKVLSMPQVNIVKKTEVQTGGFSKESILPKRNSDKLIARKKDWDPKKYGGFDSPTVAYSVLVVAKVEKGKSKKLKSVKELLGITIMERSSFEKNPIDFLEAKGYKEVKKDLIIKLPKYSLFELENGRKRMLASAGELQKGNELALPSKYVNFLYLASHYEKLKGSPEDNEQKQLFVEQHKHYLDEIIEQISEFSKRVILADANLDKVLSAYNKHRDKPIREQAENIIHLFTLTNLGAPAAFKYFDTTIDRKRYTSTKEVLDATLIHQSITGLYETRIDLSQLGGDGGEAAAKGGSGGLGIEDEYRLHETSTEPDVSLGSTWLSDFPQAWAETGGMGLAVRQAPLIIPLKATSTPVSIQQYPMSHEARLGIKPHIQRLLDQGILVPCQSPWNTPLLPVKKPGTNDYRPVQDLREVNKRVEDIHPTVPNPYNLLSGLPPSHQWYTVLDLKDAFFCLRLHPTSQPLFAFEWRDPGMGISGQLTWTRLPQGFKNSPTLFNEALHRDLADFRIQHPDLILLQYVDDILLAATSELDCQQGTRALLQTLGDLGYRASAKKAQICQKQVKYLGYLLREGQRWLTEARKETVMGQPVPKTPRQLREFLGKAGFCRLFIPGFAEMAAPLYPLTKPGTLFSWGPDQQKAYQEIKQALLTAPALGLPDLTKPFELFVDEKQGYAKGVLTQKLGPWRRPVAYLSKKLDPVAAGWPPCLRMVAAIAVLTKDAGKLTMGQPLVILAPHAVEALVKQPPDRWLSNARMTHYQAMLLDTDRVQFGPVVALNPATLLPLPEEGAPHDCLEILAETHGTRPDLTDQPIPDADHTWYTDGSSFLQEGQRKAGAAVTTETEVIWAGALPAGTSAQRAELIALTQALKMAEGKRLNVYTDSRYAFATAHIHGEIYRRRGWLTSEGREIKNKSEILALLKALFLPKRLSIIHCLGHQKGDSAEARGNRLADQAAREAAIKTPPDTSTLLIAGKRTADGSEFEKRTADGSEFESPKKKAKVE

SEQ ID NO: 2105 - protein, 2093 aa, synthetic construct
MPAAKRVKLDGGDKKYSIGLDIGTNSVGWAVITDEYKVPSKKFKVLGNTDRHSIKKNLIGALLFDSGETAEATRLKRTARRRYTRRKNRICYLQEIFSNEMAKVDDSFFHRLEESFLVEEDKKHERHPIFGNIVDEVAYHEKYPTIYHLRKKLVDSTDKADLRLIYLALAHMIKFRGHFLIEGDLNPDNSDVDKLFIQLVQTYNQLFEENPINASGVDAKAILSARLSKSRRLENLIAQLPGEKKNGLFGNLIALSLGLTPNFKSNFDLAEDAKLQLSKDTYDDDLDNLLAQIGDQYADLFLAAKNLSDAILLSDILRVNTEITKAPLSASMIKRYDEHHQDLTLLKALVRQQLPEKYKEIFFDQSKNGYAGYIDGGASQEEFYKFIKPILEKMDGTEELLVKLNREDLLRKQRTFDNGSIPHQIHLGELHAILRRQEDFYPFLKDNREKIEKILTFRIPYYVGPLARGNSRFAWMTRKSEETITPWNFEEVVDKGASAQSFIERMTNFDKNLPNEKVLPKHSLLYEYFTVYNELTKVKYVTEGMRKPAFLSGEQKKAIVDLLFKTNRKVTVKQLKEDYFKKIECFDSVEISGVEDRFNASLGTYHDLLKIIKDKDFLDNEENEDILEDIVLTLTLFEDREMIEERLKTYAHLFDDKVMKQLKRRRYTGWGRLSRKLINGIRDKQSGKTILDFLKSDGFANRNFMQLIHDDSLTFKEDIQKAQVSGQGDSLHEHIANLAGSPAIKKGILQTVKVVDELVKVMGRHKPENIVIEMARENQTTQKGQKNSRERMKRIEEGIKELGSQILKEHPVENTQLQNEKLYLYYLQNGRDMYVDQELDINRLSDYDVDHIVPQSFLKDDSIDNKVLTRSDKARGKSDNVPSEEVVKKMKNYWRQLLNAKLITQRKFDNLTKAERGGLSELDKAGFIKRQLVETRQITKHVAQILDSRMNTKYDENDKLIREVKVITLKSKLVSDFRKDFQFYKVREINNYHHAHDAYLNAVVGTALIKKYPKLESEFVYGDYKVYDVRKMIAKSEQEIGKATAKYFFYSNIMNFFKTEITLANGEIRKRPLIETNGETGEIVWDKGRDFATVRKVLSMPQVNIVKKTEVQTGGFSKESILPKRNSDKLIARKKDWDPKKYGGFDSPTVAYSVLVVAKVEKGKSKKLKSVKELLGITIMERSSFEKNPIDFLEAKGYKEVKKDLIIKLPKYSLFELENGRKRMLASAGELQKGNELALPSKYVNFLYLASHYEKLKGSPEDNEQKQLFVEQHKHYLDEIIEQISEFSKRVILADANLDKVLSAYNKHRDKPIREQAENIIHLFTLTNLGAPAAFKYFDTTIDRKRYTSTKEVLDATLIHQSITGLYETRIDLSQLGGDGGGGSEAAAKGGLGIEDEYRLHETSTEPDVSLGSTWLSDFPQAWAETGGMGLAVRQAPLIIPLKATSTPVSIQQYPMSHEARLGIKPHIQRLLDQGILVPCQSPWNTPLLPVKKPGTNDYRPVQDLREVNKRVEDIHPTVPNPYNLLSGLPPSHQWYTVLDLKDAFFCLRLHPTSQPLFAFEWRDPGMGISGQLTWTRLPQGFKNSPTLFNEALHRDLADFRIQHPDLILLQYVDDILLAATSELDCQQGTRALLQTLGDLGYRASAKKAQICQKQVKYLGYLLREGQRWLTEARKETVMGQPVPKTPRQLREFLGKAGFCRLFIPGFAEMAAPLYPLTKPGTLFSWGPDQQKAYQEIKQALLTAPALGLPDLTKPFELFVDEKQGYAKGVLTQKLGPWRRPVAYLSKKLDPVAAGWPPCLRMVAAIAVLTKDAGKLTMGQPLVILAPHAVEALVKQPPDRWLSNARMTHYQAMLLDTDRVQFGPVVALNPATLLPLPEEGAPHDCLEILAETHGTRPDLTDQPIPDADHTWYTDGSSFLQEGQRKAGAAVTTETEVIWAGALPAGTSAQRAELIALTQALKMAEGKRLNVYTDSRYAFATAHIHGEIYRRRGWLTSEGREIKNKSEILALLKALFLPKRLSIIHCLGHQKGDSAEARGNRLADQAAREAAIKTPPDTSTLLIAGKRTADGSEFEKRTADGSEFESPKKKAKVE

SEQ ID NO: 2106 - protein, 2100 aa, synthetic construct
MPAAKRVKLDGGDKKYSIGLDIGTNSVGWAVITDEYKVPSKKFKVLGNTDRHSIKKNLIGALLFDSGETAEATRLKRTARRRYTRRKNRICYLQEIFSNEMAKVDDSFFHRLEESFLVEEDKKHERHPIFGNIVDEVAYHEKYPTIYHLRKKLVDSTDKADLRLIYLALAHMIKFRGHFLIEGDLNPDNSDVDKLFIQLVQTYNQLFEENPINASGVDAKAILSARLSKSRRLENLIAQLPGEKKNGLFGNLIALSLGLTPNFKSNFDLAEDAKLQLSKDTYDDDLDNLLAQIGDQYADLFLAAKNLSDAILLSDILRVNTEITKAPLSASMIKRYDEHHQDLTLLKALVRQQLPEKYKEIFFDQSKNGYAGYIDGGASQEEFYKFIKPILEKMDGTEELLVKLNREDLLRKQRTFDNGSIPHQIHLGELHAILRRQEDFYPFLKDNREKIEKILTFRIPYYVGPLARGNSRFAWMTRKSEETITPWNFEEVVDKGASAQSFIERMTNFDKNLPNEKVLPKHSLLYEYFTVYNELTKVKYVTEGMRKPAFLSGEQKKAIVDLLFKTNRKVTVKQLKEDYFKKIECFDSVEISGVEDRFNASLGTYHDLLKIIKDKDFLDNEENEDILEDIVLTLTLFEDREMIEERLKTYAHLFDDKVMKQLKRRRYTGWGRLSRKLINGIRDKQSGKTILDFLKSDGFANRNFMQLIHDDSLTFKEDIQKAQVSGQGDSLHEHIANLAGSPAIKKGILQTVKVVDELVKVMGRHKPENIVIEMARENQTTQKGQKNSRERMKRIEEGIKELGSQILKEHPVENTQLQNEKLYLYYLQNGRDMYVDQELDINRLSDYDVDHIVPQSFLKDDSIDNKVLTRSDKARGKSDNVPSEEVVKKMKNYWRQLLNAKLITQRKFDNLTKAERGGLSELDKAGFIKRQLVETRQITKHVAQILDSRMNTKYDENDKLIREVKVITLKSKLVSDFRKDFQFYKVREINNYHHAHDAYLNAVVGTALIKKYPKLESEFVYGDYKVYDVRKMIAKSEQEIGKATAKYFFYSNIMNFFKTEITLANGEIRKRPLIETNGETGEIVWDKGRDFATVRKVLSMPQVNIVKKTEVQTGGFSKESILPKRNSDKLIARKKDWDPKKYGGFDSPTVAYSVLVVAKVEKGKSKKLKSVKELLGITIMERSSFEKNPIDFLEAKGYKEVKKDLIIKLPKYSLFELENGRKRMLASAGELQKGNELALPSKYVNFLYLASHYEKLKGSPEDNEQKQLFVEQHKHYLDEIIEQISEFSKRVILADANLDKVLSAYNKHRDKPIREQAENIIHLFTLTNLGAPAAFKYFDTTIDRKRYTSTKEVLDATLIHQSITGLYETRIDLSQLGGDGGGGGGSEAAAKGGGGSGGLGIEDEYRLHETSTEPDVSLGSTWLSDFPQAWAETGGMGLAVRQAPLIIPLKATSTPVSIQQYPMSHEARLGIKPHIQRLLDQGILVPCQSPWNTPLLPVKKPGTNDYRPVQDLREVNKRVEDIHPTVPNPYNLLSGLPPSHQWYTVLDLKDAFFCLRLHPTSQPLFAFEWRDPGMGISGQLTWTRLPQGFKNSPTLFNEALHRDLADFRIQHPDLILLQYVDDILLAATSELDCQQGTRALLQTLGDLGYRASAKKAQICQKQVKYLGYLLREGQRWLTEARKETVMGQPVPKTPRQLREFLGKAGFCRLFIPGFAEMAAPLYPLTKPGTLFSWGPDQQKAYQEIKQALLTAPALGLPDLTKPFELFVDEKQGYAKGVLTQKLGPWRRPVAYLSKKLDPVAAGWPPCLRMVAAIAVLTKDAGKLTMGQPLVILAPHAVEALVKQPPDRWLSNARMTHYQAMLLDTDRVQFGPVVALNPATLLPLPEEGAPHDCLEILAETHGTRPDLTDQPIPDADHTWYTDGSSFLQEGQRKAGAAVTTETEVIWAGALPAGTSAQRAELIALTQALKMAEGKRLNVYTDSRYAFATAHIHGEIYRRRGWLTSEGREIKNKSEILALLKALFLPKRLSIIHCLGHQKGDSAEARGNRLADQAAREAAIKTPPDTSTLLIAGKRTADGSEFEKRTADGSEFESPKKKAKVE

SEQ ID NO: 2107 - protein, 2094 aa, synthetic construct
MPAAKRVKLDGGDKKYSIGLDIGTNSVGWAVITDEYKVPSKKFKVLGNTDRHSIKKNLIGALLFDSGETAEATRLKRTARRRYTRRKNRICYLQEIFSNEMAKVDDSFFHRLEESFLVEEDKKHERHPIFGNIVDEVAYHEKYPTIYHLRKKLVDSTDKADLRLIYLALAHMIKFRGHFLIEGDLNPDNSDVDKLFIQLVQTYNQLFEENPINASGVDAKAILSARLSKSRRLENLIAQLPGEKKNGLFGNLIALSLGLTPNFKSNFDLAEDAKLQLSKDTYDDDLDNLLAQIGDQYADLFLAAKNLSDAILLSDILRVNTEITKAPLSASMIKRYDEHHQDLTLLKALVRQQLPEKYKEIFFDQSKNGYAGYIDGGASQEEFYKFIKPILEKMDGTEELLVKLNREDLLRKQRTFDNGSIPHQIHLGELHAILRRQEDFYPFLKDNREKIEKILTFRIPYYVGPLARGNSRFAWMTRKSEETITPWNFEEVVDKGASAQSFIERMTNFDKNLPNEKVLPKHSLLYEYFTVYNELTKVKYVTEGMRKPAFLSGEQKKAIVDLLFKTNRKVTVKQLKEDYFKKIECFDSVEISGVEDRFNASLGTYHDLLKIIKDKDFLDNEENEDILEDIVLTLTLFEDREMIEERLKTYAHLFDDKVMKQLKRRRYTGWGRLSRKLINGIRDKQSGKTILDFLKSDGFANRNFMQLIHDDSLTFKEDIQKAQVSGQGDSLHEHIANLAGSPAIKKGILQTVKVVDELVKVMGRHKPENIVIEMARENQTTQKGQKNSRERMKRIEEGIKELGSQILKEHPVENTQLQNEKLYLYYLQNGRDMYVDQELDINRLSDYDVDHIVPQSFLKDDSIDNKVLTRSDKARGKSDNVPSEEVVKKMKNYWRQLLNAKLITQRKFDNLTKAERGGLSELDKAGFIKRQLVETRQITKHVAQILDSRMNTKYDENDKLIREVKVITLKSKLVSDFRKDFQFYKVREINNYHHAHDAYLNAVVGTALIKKYPKLESEFVYGDYKVYDVRKMIAKSEQEIGKATAKYFFYSNIMNFFKTEITLANGEIRKRPLIETNGETGEIVWDKGRDFATVRKVLSMPQVNIVKKTEVQTGGFSKESILPKRNSDKLIARKKDWDPKKYGGFDSPTVAYSVLVVAKVEKGKSKKLKSVKELLGITIMERSSFEKNPIDFLEAKGYKEVKKDLIIKLPKYSLFELENGRKRMLASAGELQKGNELALPSKYVNFLYLASHYEKLKGSPEDNEQKQLFVEQHKHYLDEIIEQISEFSKRVILADANLDKVLSAYNKHRDKPIREQAENIIHLFTLTNLGAPAAFKYFDTTIDRKRYTSTKEVLDATLIHQSITGLYETRIDLSQLGGDGGGGGGSSGGSGGLGIEDEYRLHETSTEPDVSLGSTWLSDFPQAWAETGGMGLAVRQAPLIIPLKATSTPVSIQQYPMSHEARLGIKPHIQRLLDQGILVPCQSPWNTPLLPVKKPGTNDYRPVQDLREVNKRVEDIHPTVPNPYNLLSGLPPSHQWYTVLDLKDAFFCLRLHPTSQPLFAFEWRDPGMGISGQLTWTRLPQGFKNSPTLFNEALHRDLADFRIQHPDLILLQYVDDILLAATSELDCQQGTRALLQTLGDLGYRASAKKAQICQKQVKYLGYLLREGQRWLTEARKETVMGQPVPKTPRQLREFLGKAGFCRLFIPGFAEMAAPLYPLTKPGTLFSWGPDQQKAYQEIKQALLTAPALGLPDLTKPFELFVDEKQGYAKGVLTQKLGPWRRPVAYLSKKLDPVAAGWPPCLRMVAAIAVLTKDAGKLTMGQPLVILAPHAVEALVKQPPDRWLSNARMTHYQAMLLDTDRVQFGPVVALNPATLLPLPEEGAPHDCLEILAETHGTRPDLTDQPIPDADHTWYTDGSSFLQEGQRKAGAAVTTETEVIWAGALPAGTSAQRAELIALTQALKMAEGKRLNVYTDSRYAFATAHIHGEIYRRRGWLTSEGREIKNKSEILALLKALFLPKRLSIIHCLGHQKGDSAEARGNRLADQAAREAAIKTPPDTSTLLIAGKRTADGSEFEKRTADGSEFESPKKKAKVE

SEQ ID NO: 2108 - protein, 2096 aa, synthetic construct
MPAAKRVKLDGGDKKYSIGLDIGTNSVGWAVITDEYKVPSKKFKVLGNTDRHSIKKNLIGALLFDSGETAEATRLKRTARRRYTRRKNRICYLQEIFSNEMAKVDDSFFHRLEESFLVEEDKKHERHPIFGNIVDEVAYHEKYPTIYHLRKKLVDSTDKADLRLIYLALAHMIKFRGHFLIEGDLNPDNSDVDKLFIQLVQTYNQLFEENPINASGVDAKAILSARLSKSRRLENLIAQLPGEKKNGLFGNLIALSLGLTPNFKSNFDLAEDAKLQLSKDTYDDDLDNLLAQIGDQYADLFLAAKNLSDAILLSDILRVNTEITKAPLSASMIKRYDEHHQDLTLLKALVRQQLPEKYKEIFFDQSKNGYAGYIDGGASQEEFYKFIKPILEKMDGTEELLVKLNREDLLRKQRTFDNGSIPHQIHLGELHAILRRQEDFYPFLKDNREKIEKILTFRIPYYVGPLARGNSRFAWMTRKSEETITPWNFEEVVDKGASAQSFIERMTNFDKNLPNEKVLPKHSLLYEYFTVYNELTKVKYVTEGMRKPAFLSGEQKKAIVDLLFKTNRKVTVKQLKEDYFKKIECFDSVEISGVEDRFNASLGTYHDLLKIIKDKDFLDNEENEDILEDIVLTLTLFEDREMIEERLKTYAHLFDDKVMKQLKRRRYTGWGRLSRKLINGIRDKQSGKTILDFLKSDGFANRNFMQLIHDDSLTFKEDIQKAQVSGQGDSLHEHIANLAGSPAIKKGILQTVKVVDELVKVMGRHKPENIVIEMARENQTTQKGQKNSRERMKRIEEGIKELGSQILKEHPVENTQLQNEKLYLYYLQNGRDMYVDQELDINRLSDYDVDHIVPQSFLKDDSIDNKVLTRSDKARGKSDNVPSEEVVKKMKNYWRQLLNAKLITQRKFDNLTKAERGGLSELDKAGFIKRQLVETRQITKHVAQILDSRMNTKYDENDKLIREVKVITLKSKLVSDFRKDFQFYKVREINNYHHAHDAYLNAVVGTALIKKYPKLESEFVYGDYKVYDVRKMIAKSEQEIGKATAKYFFYSNIMNFFKTEITLANGEIRKRPLIETNGETGEIVWDKGRDFATVRKVLSMPQVNIVKKTEVQTGGFSKESILPKRNSDKLIARKKDWDPKKYGGFDSPTVAYSVLVVAKVEKGKSKKLKSVKELLGITIMERSSFEKNPIDFLEAKGYKEVKKDLIIKLPKYSLFELENGRKRMLASAGELQKGNELALPSKYVNFLYLASHYEKLKGSPEDNEQKQLFVEQHKHYLDEIIEQISEFSKRVILADANLDKVLSAYNKHRDKPIREQAENIIHLFTLTNLGAPAAFKYFDTTIDRKRYTSTKEVLDATLIHQSITGLYETRIDLSQLGGDGGGSSGGGEAAAKGGLGIEDEYRLHETSTEPDVSLGSTWLSDFPQAWAETGGMGLAVRQAPLIIPLKATSTPVSIQQYPMSHEARLGIKPHIQRLLDQGILVPCQSPWNTPLLPVKKPGTNDYRPVQDLREVNKRVEDIHPTVPNPYNLLSGLPPSHQWYTVLDLKDAFFCLRLHPTSQPLFAFEWRDPGMGISGQLTWTRLPQGFKNSPTLFNEALHRDLADFRIQHPDLILLQYVDDILLAATSELDCQQGTRALLQTLGDLGYRASAKKAQICQKQVKYLGYLLREGQRWLTEARKETVMGQPVPKTPRQLREFLGKAGFCRLFIPGFAEMAAPLYPLTKPGTLFSWGPDQQKAYQEIKQALLTAPALGLPDLTKPFELFVDEKQGYAKGVLTQKLGPWRRPVAYLSKKLDPVAAGWPPCLRMVAAIAVLTKDAGKLTMGQPLVILAPHAVEALVKQPPDRWLSNARMTHYQAMLLDTDRVQFGPVVALNPATLLPLPEEGAPHDCLEILAETHGTRPDLTDQPIPDADHTWYTDGSSFLQEGQRKAGAAVTTETEVIWAGALPAGTSAQRAELIALTQALKMAEGKRLNVYTDSRYAFATAHIHGEIYRRRGWLTSEGREIKNKSEILALLKALFLPKRLSIIHCLGHQKGDSAEARGNRLADQAAREAAIKTPPDTSTLLIAGKRTADGSEFEKRTADGSEFESPKKKAKVE

SEQ ID NO: 2109 - protein, 2096 aa, synthetic construct
MPAAKRVKLDGGDKKYSIGLDIGTNSVGWAVITDEYKVPSKKFKVLGNTDRHSIKKNLIGALLFDSGETAEATRLKRTARRRYTRRKNRICYLQEIFSNEMAKVDDSFFHRLEESFLVEEDKKHERHPIFGNIVDEVAYHEKYPTIYHLRKKLVDSTDKADLRLIYLALAHMIKFRGHFLIEGDLNPDNSDVDKLFIQLVQTYNQLFEENPINASGVDAKAILSARLSKSRRLENLIAQLPGEKKNGLFGNLIALSLGLTPNFKSNFDLAEDAKLQLSKDTYDDDLDNLLAQIGDQYADLFLAAKNLSDAILLSDILRVNTEITKAPLSASMIKRYDEHHQDLTLLKALVRQQLPEKYKEIFFDQSKNGYAGYIDGGASQEEFYKFIKPILEKMDGTEELLVKLNREDLLRKQRTFDNGSIPHQIHLGELHAILRRQEDFYPFLKDNREKIEKILTFRIPYYVGPLARGNSRFAWMTRKSEETITPWNFEEVVDKGASAQSFIERMTNFDKNLPNEKVLPKHSLLYEYFTVYNELTKVKYVTEGMRKPAFLSGEQKKAIVDLLFKTNRKVTVKQLKEDYFKKIECFDSVEISGVEDRFNASLGTYHDLLKIIKDKDFLDNEENEDILEDIVLTLTLFEDREMIEERLKTYAHLFDDKVMKQLKRRRYTGWGRLSRKLINGIRDKQSGKTILDFLKSDGFANRNFMQLIHDDSLTFKEDIQKAQVSGQGDSLHEHIANLAGSPAIKKGILQTVKVVDELVKVMGRHKPENIVIEMARENQTTQKGQKNSRERMKRIEEGIKELGSQILKEHPVENTQLQNEKLYLYYLQNGRDMYVDQELDINRLSDYDVDHIVPQSFLKDDSIDNKVLTRSDKARGKSDNVPSEEVVKKMKNYWRQLLNAKLITQRKFDNLTKAERGGLSELDKAGFIKRQLVETRQITKHVAQILDSRMNTKYDENDKLIREVKVITLKSKLVSDFRKDFQFYKVREINNYHHAHDAYLNAVVGTALIKKYPKLESEFVYGDYKVYDVRKMIAKSEQEIGKATAKYFFYSNIMNFFKTEITLANGEIRKRPLIETNGETGEIVWDKGRDFATVRKVLSMPQVNIVKKTEVQTGGFSKESILPKRNSDKLIARKKDWDPKKYGGFDSPTVAYSVLVVAKVEKGKSKKLKSVKELLGITIMERSSFEKNPIDFLEAKGYKEVKKDLIIKLPKYSLFELENGRKRMLASAGELQKGNELALPSKYVNFLYLASHYEKLKGSPEDNEQKQLFVEQHKHYLDEIIEQISEFSKRVILADANLDKVLSAYNKHRDKPIREQAENIIHLFTLTNLGAPAAFKYFDTTIDRKRYTSTKEVLDATLIHQSITGLYETRIDLSQLGGDGGGSSEAAAKPAPGGLGIEDEYRLHETSTEPDVSLGSTWLSDFPQAWAETGGMGLAVRQAPLIIPLKATSTPVSIQQYPMSHEARLGIKPHIQRLLDQGILVPCQSPWNTPLLPVKKPGTNDYRPVQDLREVNKRVEDIHPTVPNPYNLLSGLPPSHQWYTVLDLKDAFFCLRLHPTSQPLFAFEWRDPGMGISGQLTWTRLPQGFKNSPTLFNEALHRDLADFRIQHPDLILLQYVDDILLAATSELDCQQGTRALLQTLGDLGYRASAKKAQICQKQVKYLGYLLREGQRWLTEARKETVMGQPVPKTPRQLREFLGKAGFCRLFIPGFAEMAAPLYPLTKPGTLFSWGPDQQKAYQEIKQALLTAPALGLPDLTKPFELFVDEKQGYAKGVLTQKLGPWRRPVAYLSKKLDPVAAGWPPCLRMVAAIAVLTKDAGKLTMGQPLVILAPHAVEALVKQPPDRWLSNARMTHYQAMLLDTDRVQFGPVVALNPATLLPLPEEGAPHDCLEILAETHGTRPDLTDQPIPDADHTWYTDGSSFLQEGQRKAGAAVTTETEVIWAGALPAGTSAQRAELIALTQALKMAEGKRLNVYTDSRYAFATAHIHGEIYRRRGWLTSEGREIKNKSEILALLKALFLPKRLSIIHCLGHQKGDSAEARGNRLADQAAREAAIKTPPDTSTLLIAGKRTADGSEFEKRTADGSEFESPKKKAKVE

SEQ ID NO: 2110 - protein, 2092 aa, synthetic construct
MPAAKRVKLDGGDKKYSIGLDIGTNSVGWAVITDEYKVPSKKFKVLGNTDRHSIKKNLIGALLFDSGETAEATRLKRTARRRYTRRKNRICYLQEIFSNEMAKVDDSFFHRLEESFLVEEDKKHERHPIFGNIVDEVAYHEKYPTIYHLRKKLVDSTDKADLRLIYLALAHMIKFRGHFLIEGDLNPDNSDVDKLFIQLVQTYNQLFEENPINASGVDAKAILSARLSKSRRLENLIAQLPGEKKNGLFGNLIALSLGLTPNFKSNFDLAEDAKLQLSKDTYDDDLDNLLAQIGDQYADLFLAAKNLSDAILLSDILRVNTEITKAPLSASMIKRYDEHHQDLTLLKALVRQQLPEKYKEIFFDQSKNGYAGYIDGGASQEEFYKFIKPILEKMDGTEELLVKLNREDLLRKQRTFDNGSIPHQIHLGELHAILRRQEDFYPFLKDNREKIEKILTFRIPYYVGPLARGNSRFAWMTRKSEETITPWNFEEVVDKGASAQSFIERMTNFDKNLPNEKVLPKHSLLYEYFTVYNELTKVKYVTEGMRKPAFLSGEQKKAIVDLLFKTNRKVTVKQLKEDYFKKIECFDSVEISGVEDRFNASLGTYHDLLKIIKDKDFLDNEENEDILEDIVLTLTLFEDREMIEERLKTYAHLFDDKVMKQLKRRRYTGWGRLSRKLINGIRDKQSGKTILDFLKSDGFANRNFMQLIHDDSLTFKEDIQKAQVSGQGDSLHEHIANLAGSPAIKKGILQTVKVVDELVKVMGRHKPENIVIEMARENQTTQKGQKNSRERMKRIEEGIKELGSQILKEHPVENTQLQNEKLYLYYLQNGRDMYVDQELDINRLSDYDVDHIVPQSFLKDDSIDNKVLTRSDKARGKSDNVPSEEVVKKMKNYWRQLLNAKLITQRKFDNLTKAERGGLSELDKAGFIKRQLVETRQITKHVAQILDSRMNTKYDENDKLIREVKVITLKSKLVSDFRKDFQFYKVREINNYHHAHDAYLNAVVGTALIKKYPKLESEFVYGDYKVYDVRKMIAKSEQEIGKATAKYFFYSNIMNFFKTEITLANGEIRKRPLIETNGETGEIVWDKGRDFATVRKVLSMPQVNIVKKTEVQTGGFSKESILPKRNSDKLIARKKDWDPKKYGGFDSPTVAYSVLVVAKVEKGKSKKLKSVKELLGITIMERSSFEKNPIDFLEAKGYKEVKKDLIIKLPKYSLFELENGRKRMLASAGELQKGNELALPSKYVNFLYLASHYEKLKGSPEDNEQKQLFVEQHKHYLDEIIEQISEFSKRVILADANLDKVLSAYNKHRDKPIREQAENIIHLFTLTNLGAPAAFKYFDTTIDRKRYTSTKEVLDATLIHQSITGLYETRIDLSQLGGDGGGGGGGGGGGLGIEDEYRLHETSTEPDVSLGSTWLSDFPQAWAETGGMGLAVRQAPLIIPLKATSTPVSIQQYPMSHEARLGIKPHIQRLLDQGILVPCQSPWNTPLLPVKKPGTNDYRPVQDLREVNKRVEDIHPTVPNPYNLLSGLPPSHQWYTVLDLKDAFFCLRLHPTSQPLFAFEWRDPGMGISGQLTWTRLPQGFKNSPTLFNEALHRDLADFRIQHPDLILLQYVDDILLAATSELDCQQGTRALLQTLGDLGYRASAKKAQICQKQVKYLGYLLREGQRWLTEARKETVMGQPVPKTPRQLREFLGKAGFCRLFIPGFAEMAAPLYPLTKPGTLFSWGPDQQKAYQEIKQALLTAPALGLPDLTKPFELFVDEKQGYAKGVLTQKLGPWRRPVAYLSKKLDPVAAGWPPCLRMVAAIAVLTKDAGKLTMGQPLVILAPHAVEALVKQPPDRWLSNARMTHYQAMLLDTDRVQFGPVVALNPATLLPLPEEGAPHDCLEILAETHGTRPDLTDQPIPDADHTWYTDGSSFLQEGQRKAGAAVTTETEVIWAGALPAGTSAQRAELIALTQALKMAEGKRLNVYTDSRYAFATAHIHGEIYRRRGWLTSEGREIKNKSEILALLKALFLPKRLSIIHCLGHQKGDSAEARGNRLADQAAREAAIKTPPDTSTLLIAGKRTADGSEFEKRTADGSEFESPKKKAKVE

SEQ ID NO: 2111 - protein, 2091 aa, synthetic construct
MPAAKRVKLDGGDKKYSIGLDIGTNSVGWAVITDEYKVPSKKFKVLGNTDRHSIKKNLIGALLFDSGETAEATRLKRTARRRYTRRKNRICYLQEIFSNEMAKVDDSFFHRLEESFLVEEDKKHERHPIFGNIVDEVAYHEKYPTIYHLRKKLVDSTDKADLRLIYLALAHMIKFRGHFLIEGDLNPDNSDVDKLFIQLVQTYNQLFEENPINASGVDAKAILSARLSKSRRLENLIAQLPGEKKNGLFGNLIALSLGLTPNFKSNFDLAEDAKLQLSKDTYDDDLDNLLAQIGDQYADLFLAAKNLSDAILLSDILRVNTEITKAPLSASMIKRYDEHHQDLTLLKALVRQQLPEKYKEIFFDQSKNGYAGYIDGGASQEEFYKFIKPILEKMDGTEELLVKLNREDLLRKQRTFDNGSIPHQIHLGELHAILRRQEDFYPFLKDNREKIEKILTFRIPYYVGPLARGNSRFAWMTRKSEETITPWNFEEVVDKGASAQSFIERMTNFDKNLPNEKVLPKHSLLYEYFTVYNELTKVKYVTEGMRKPAFLSGEQKKAIVDLLFKTNRKVTVKQLKEDYFKKIECFDSVEISGVEDRFNASLGTYHDLLKIIKDKDFLDNEENEDILEDIVLTLTLFEDREMIEERLKTYAHLFDDKVMKQLKRRRYTGWGRLSRKLINGIRDKQSGKTILDFLKSDGFANRNFMQLIHDDSLTFKEDIQKAQVSGQGDSLHEHIANLAGSPAIKKGILQTVKVVDELVKVMGRHKPENIVIEMARENQTTQKGQKNSRERMKRIEEGIKELGSQILKEHPVENTQLQNEKLYLYYLQNGRDMYVDQELDINRLSDYDVDHIVPQSFLKDDSIDNKVLTRSDKARGKSDNVPSEEVVKKMKNYWRQLLNAKLITQRKFDNLTKAERGGLSELDKAGFIKRQLVETRQITKHVAQILDSRMNTKYDENDKLIREVKVITLKSKLVSDFRKDFQFYKVREINNYHHAHDAYLNAVVGTALIKKYPKLESEFVYGDYKVYDVRKMIAKSEQEIGKATAKYFFYSNIMNFFKTEITLANGEIRKRPLIETNGETGEIVWDKGRDFATVRKVLSMPQVNIVKKTEVQTGGFSKESILPKRNSDKLIARKKDWDPKKYGGFDSPTVAYSVLVVAKVEKGKSKKLKSVKELLGITIMERSSFEKNPIDFLEAKGYKEVKKDLIIKLPKYSLFELENGRKRMLASAGELQKGNELALPSKYVNFLYLASHYEKLKGSPEDNEQKQLFVEQHKHYLDEIIEQISEFSKRVILADANLDKVLSAYNKHRDKPIREQAENIIHLFTLTNLGAPAAFKYFDTTIDRKRYTSTKEVLDATLIHQSITGLYETRIDLSQLGGDGGGGGGGGGGLGIEDEYRLHETSTEPDVSLGSTWLSDFPQAWAETGGMGLAVRQAPLIIPLKATSTPVSIQQYPMSHEARLGIKPHIQRLLDQGILVPCQSPWNTPLLPVKKPGTNDYRPVQDLREVNKRVEDIHPTVPNPYNLLSGLPPSHQWYTVLDLKDAFFCLRLHPTSQPLFAFEWRDPGMGISGQLTWTRLPQGFKNSPTLFNEALHRDLADFRIQHPDLILLQYVDDILLAATSELDCQQGTRALLQTLGDLGYRASAKKAQICQKQVKYLGYLLREGQRWLTEARKETVMGQPVPKTPRQLREFLGKAGFCRLFIPGFAEMAAPLYPLTKPGTLFSWGPDQQKAYQEIKQALLTAPALGLPDLTKPFELFVDEKQGYAKGVLTQKLGPWRRPVAYLSKKLDPVAAGWPPCLRMVAAIAVLTKDAGKLTMGQPLVILAPHAVEALVKQPPDRWLSNARMTHYQAMLLDTDRVQFGPVVALNPATLLPLPEEGAPHDCLEILAETHGTRPDLTDQPIPDADHTWYTDGSSFLQEGQRKAGAAVTTETEVIWAGALPAGTSAQRAELIALTQALKMAEGKRLNVYTDSRYAFATAHIHGEIYRRRGWLTSEGREIKNKSEILALLKALFLPKRLSIIHCLGHQKGDSAEARGNRLADQAAREAAIKTPPDTSTLLIAGKRTADGSEFEKRTADGSEFESPKKKAKVE

SEQ ID NO: 2112 - protein, 2096 aa, synthetic construct
MPAAKRVKLDGGDKKYSIGLDIGTNSVGWAVITDEYKVPSKKFKVLGNTDRHSIKKNLIGALLFDSGETAEATRLKRTARRRYTRRKNRICYLQEIFSNEMAKVDDSFFHRLEESFLVEEDKKHERHPIFGNIVDEVAYHEKYPTIYHLRKKLVDSTDKADLRLIYLALAHMIKFRGHFLIEGDLNPDNSDVDKLFIQLVQTYNQLFEENPINASGVDAKAILSARLSKSRRLENLIAQLPGEKKNGLFGNLIALSLGLTPNFKSNFDLAEDAKLQLSKDTYDDDLDNLLAQIGDQYADLFLAAKNLSDAILLSDILRVNTEITKAPLSASMIKRYDEHHQDLTLLKALVRQQLPEKYKEIFFDQSKNGYAGYIDGGASQEEFYKFIKPILEKMDGTEELLVKLNREDLLRKQRTFDNGSIPHQIHLGELHAILRRQEDFYPFLKDNREKIEKILTFRIPYYVGPLARGNSRFAWMTRKSEETITPWNFEEVVDKGASAQSFIERMTNFDKNLPNEKVLPKHSLLYEYFTVYNELTKVKYVTEGMRKPAFLSGEQKKAIVDLLFKTNRKVTVKQLKEDYFKKIECFDSVEISGVEDRFNASLGTYHDLLKIIKDKDFLDNEENEDILEDIVLTLTLFEDREMIEERLKTYAHLFDDKVMKQLKRRRYTGWGRLSRKLINGIRDKQSGKTILDFLKSDGFANRNFMQLIHDDSLTFKEDIQKAQVSGQGDSLHEHIANLAGSPAIKKGILQTVKVVDELVKVMGRHKPENIVIEMARENQTTQKGQKNSRERMKRIEEGIKELGSQILKEHPVENTQLQNEKLYLYYLQNGRDMYVDQELDINRLSDYDVDHIVPQSFLKDDSIDNKVLTRSDKARGKSDNVPSEEVVKKMKNYWRQLLNAKLITQRKFDNLTKAERGGLSELDKAGFIKRQLVETRQITKHVAQILDSRMNTKYDENDKLIREVKVITLKSKLVSDFRKDFQFYKVREINNYHHAHDAYLNAVVGTALIKKYPKLESEFVYGDYKVYDVRKMIAKSEQEIGKATAKYFFYSNIMNFFKTEITLANGEIRKRPLIETNGETGEIVWDKGRDFATVRKVLSMPQVNIVKKTEVQTGGFSKESILPKRNSDKLIARKKDWDPKKYGGFDSPTVAYSVLVVAKVEKGKSKKLKSVKELLGITIMERSSFEKNPIDFLEAKGYKEVKKDLIIKLPKYSLFELENGRKRMLASAGELQKGNELALPSKYVNFLYLASHYEKLKGSPEDNEQKQLFVEQHKHYLDEIIEQISEFSKRVILADANLDKVLSAYNKHRDKPIREQAENIIHLFTLTNLGAPAAFKYFDTTIDRKRYTSTKEVLDATLIHQSITGLYETRIDLSQLGGDGGEAAAKGGSPAPGGLGIEDEYRLHETSTEPDVSLGSTWLSDFPQAWAETGGMGLAVRQAPLIIPLKATSTPVSIQQYPMSHEARLGIKPHIQRLLDQGILVPCQSPWNTPLLPVKKPGTNDYRPVQDLREVNKRVEDIHPTVPNPYNLLSGLPPSHQWYTVLDLKDAFFCLRLHPTSQPLFAFEWRDPGMGISGQLTWTRLPQGFKNSPTLFNEALHRDLADFRIQHPDLILLQYVDDILLAATSELDCQQGTRALLQTLGDLGYRASAKKAQICQKQVKYLGYLLREGQRWLTEARKETVMGQPVPKTPRQLREFLGKAGFCRLFIPGFAEMAAPLYPLTKPGTLFSWGPDQQKAYQEIKQALLTAPALGLPDLTKPFELFVDEKQGYAKGVLTQKLGPWRRPVAYLSKKLDPVAAGWPPCLRMVAAIAVLTKDAGKLTMGQPLVILAPHAVEALVKQPPDRWLSNARMTHYQAMLLDTDRVQFGPVVALNPATLLPLPEEGAPHDCLEILAETHGTRPDLTDQPIPDADHTWYTDGSSFLQEGQRKAGAAVTTETEVIWAGALPAGTSAQRAELIALTQALKMAEGKRLNVYTDSRYAFATAHIHGEIYRRRGWLTSEGREIKNKSEILALLKALFLPKRLSIIHCLGHQKGDSAEARGNRLADQAAREAAIKTPPDTSTLLIAGKRTADGSEFEKRTADGSEFESPKKKAKVE

SEQ ID NO: 2113 - protein, 2088 aa, synthetic construct; identical to SEQ ID NO: 2053

SEQ ID NO: 2114 - protein, 2094 aa, synthetic construct; identical to SEQ ID NO: 2060

SEQ ID NO: 2115 - protein, 2093 aa, synthetic construct
MPAAKRVKLDGGDKKYSIGLDIGTNSVGWAVITDEYKVPSKKFKVLGNTDRHSIKKNLIGALLFDSGETAEATRLKRTARRRYTRRKNRICYLQEIFSNEMAKVDDSFFHRLEESFLVEEDKKHERHPIFGNIVDEVAYHEKYPTIYHLRKKLVDSTDKADLRLIYLALAHMIKFRGHFLIEGDLNPDNSDVDKLFIQLVQTYNQLFEENPINASGVDAKAILSARLSKSRRLENLIAQLPGEKKNGLFGNLIALSLGLTPNFKSNFDLAEDAKLQLSKDTYDDDLDNLLAQIGDQYADLFLAAKNLSDAILLSDILRVNTEITKAPLSASMIKRYDEHHQDLTLLKALVRQQLPEKYKEIFFDQSKNGYAGYIDGGASQEEFYKFIKPILEKMDGTEELLVKLNREDLLRKQRTFDNGSIPHQIHLGELHAILRRQEDFYPFLKDNREKIEKILTFRIPYYVGPLARGNSRFAWMTRKSEETITPWNFEEVVDKGASAQSFIERMTNFDKNLPNEKVLPKHSLLYEYFTVYNELTKVKYVTEGMRKPAFLSGEQKKAIVDLLFKTNRKVTVKQLKEDYFKKIECFDSVEISGVEDRFNASLGTYHDLLKIIKDKDFLDNEENEDILEDIVLTLTLFEDREMIEERLKTYAHLFDDKVMKQLKRRRYTGWGRLSRKLINGIRDKQSGKTILDFLKSDGFANRNFMQLIHDDSLTFKEDIQKAQVSGQGDSLHEHIANLAGSPAIKKGILQTVKVVDELVKVMGRHKPENIVIEMARENQTTQKGQKNSRERMKRIEEGIKELGSQILKEHPVENTQLQNEKLYLYYLQNGRDMYVDQELDINRLSDYDVDHIVPQSFLKDDSIDNKVLTRSDKARGKSDNVPSEEVVKKMKNYWRQLLNAKLITQRKFDNLTKAERGGLSELDKAGFIKRQLVETRQITKHVAQILDSRMNTKYDENDKLIREVKVITLKSKLVSDFRKDFQFYKVREINNYHHAHDAYLNAVVGTALIKKYPKLESEFVYGDYKVYDVRKMIAKSEQEIGKATAKYFFYSNIMNFFKTEITLANGEIRKRPLIETNGETGEIVWDKGRDFATVRKVLSMPQVNIVKKTEVQTGGFSKESILPKRNSDKLIARKKDWDPKKYGGFDSPTVAYSVLVVAKVEKGKSKKLKSVKELLGITIMERSSFEKNPIDFLEAKGYKEVKKDLIIKLPKYSLFELENGRKRMLASAGELQKGNELALPSKYVNFLYLASHYEKLKGSPEDNEQKQLFVEQHKHYLDEIIEQISEFSKRVILADANLDKVLSAYNKHRDKPIREQAENIIHLFTLTNLGAPAAFKYFDTTIDRKRYTSTKEVLDATLIHQSITGLYETRIDLSQLGGDGGGSSEAAAKGGLGIEDEYRLHETSTEPDVSLGSTWLSDFPQAWAETGGMGLAVRQAPLIIPLKATSTPVSIQQYPMSHEARLGIKPHIQRLLDQGILVPCQSPWNTPLLPVKKPGTNDYRPVQDLREVNKRVEDIHPTVPNPYNLLSGLPPSHQWYTVLDLKDAFFCLRLHPTSQPLFAFEWRDPGMGISGQLTWTRLPQGFKNSPTLFNEALHRDLADFRIQHPDLILLQYVDDILLAATSELDCQQGTRALLQTLGDLGYRASAKKAQICQKQVKYLGYLLREGQRWLTEARKETVMGQPVPKTPRQLREFLGKAGFCRLFIPGFAEMAAPLYPLTKPGTLFSWGPDQQKAYQEIKQALLTAPALGLPDLTKPFELFVDEKQGYAKGVLTQKLGPWRRPVAYLSKKLDPVAAGWPPCLRMVAAIAVLTKDAGKLTMGQPLVILAPHAVEALVKQPPDRWLSNARMTHYQAMLLDTDRVQFGPVVALNPATLLPLPEEGAPHDCLEILAETHGTRPDLTDQPIPDADHTWYTDGSSFLQEGQRKAGAAVTTETEVIWAGALPAGTSAQRAELIALTQALKMAEGKRLNVYTDSRYAFATAHIHGEIYRRRGWLTSEGREIKNKSEILALLKALFLPKRLSIIHCLGHQKGDSAEARGNRLADQAAREAAIKTPPDTSTLLIAGKRTADGSEFEKRTADGSEFESPKKKAKVE

SEQ ID NO: 2116 - protein, 2100 aa, synthetic construct
MPAAKRVKLDGGDKKYSIGLDIGTNSVGWAVITDEYKVPSKKFKVLGNTDRHSIKKNLIGALLFDSGETAEATRLKRTARRRYTRRKNRICYLQEIFSNEMAKVDDSFFHRLEESFLVEEDKKHERHPIFGNIVDEVAYHEKYPTIYHLRKKLVDSTDKADLRLIYLALAHMIKFRGHFLIEGDLNPDNSDVDKLFIQLVQTYNQLFEENPINASGVDAKAILSARLSKSRRLENLIAQLPGEKKNGLFGNLIALSLGLTPNFKSNFDLAEDAKLQLSKDTYDDDLDNLLAQIGDQYADLFLAAKNLSDAILLSDILRVNTEITKAPLSASMIKRYDEHHQDLTLLKALVRQQLPEKYKEIFFDQSKNGYAGYIDGGASQEEFYKFIKPILEKMDGTEELLVKLNREDLLRKQRTFDNGSIPHQIHLGELHAILRRQEDFYPFLKDNREKIEKILTFRIPYYVGPLARGNSRFAWMTRKSEETITPWNFEEVVDKGASAQSFIERMTNFDKNLPNEKVLPKHSLLYEYFTVYNELTKVKYVTEGMRKPAFLSGEQKKAIVDLLFKTNRKVTVKQLKEDYFKKIECFDSVEISGVEDRFNASLGTYHDLLKIIKDKDFLDNEENEDILEDIVLTLTLFEDREMIEERLKTYAHLFDDKVMKQLKRRRYTGWGRLSRKLINGIRDKQSGKTILDFLKSDGFANRNFMQLIHDDSLTFKEDIQKAQVSGQGDSLHEHIANLAGSPAIKKGILQTVKVVDELVKVMGRHKPENIVIEMARENQTTQKGQKNSRERMKRIEEGIKELGSQILKEHPVENTQLQNEKLYLYYLQNGRDMYVDQELDINRLSDYDVDHIVPQSFLKDDSIDNKVLTRSDKARGKSDNVPSEEVVKKMKNYWRQLLNAKLITQRKFDNLTKAERGGLSELDKAGFIKRQLVETRQITKHVAQILDSRMNTKYDENDKLIREVKVITLKSKLVSDFRKDFQFYKVREINNYHHAHDAYLNAVVGTALIKKYPKLESEFVYGDYKVYDVRKMIAKSEQEIGKATAKYFFYSNIMNFFKTEITLANGEIRKRPLIETNGETGEIVWDKGRDFATVRKVLSMPQVNIVKKTEVQTGGFSKESILPKRNSDKLIARKKDWDPKKYGGFDSPTVAYSVLVVAKVEKGKSKKLKSVKELLGITIMERSSFEKNPIDFLEAKGYKEVKKDLIIKLPKYSLFELENGRKRMLASAGELQKGNELALPSKYVNFLYLASHYEKLKGSPEDNEQKQLFVEQHKHYLDEIIEQISEFSKRVILADANLDKVLSAYNKHRDKPIREQAENIIHLFTLTNLGAPAAFKYFDTTIDRKRYTSTKEVLDATLIHQSITGLYETRIDLSQLGGDGGGGGGSGGGGSGGGGSGGLGIEDEYRLHETSTEPDVSLGSTWLSDFPQAWAETGGMGLAVRQAPLIIPLKATSTPVSIQQYPMSHEARLGIKPHIQRLLDQGILVPCQSPWNTPLLPVKKPGTNDYRPVQDLREVNKRVEDIHPTVPNPYNLLSGLPPSHQWYTVLDLKDAFFCLRLHPTSQPLFAFEWRDPGMGISGQLTWTRLPQGFKNSPTLFNEALHRDLADFRIQHPDLILLQYVDDILLAATSELDCQQGTRALLQTLGDLGYRASAKKAQICQKQVKYLGYLLREGQRWLTEARKETVMGQPVPKTPRQLREFLGKAGFCRLFIPGFAEMAAPLYPLTKPGTLFSWGPDQQKAYQEIKQALLTAPALGLPDLTKPFELFVDEKQGYAKGVLTQKLGPWRRPVAYLSKKLDPVAAGWPPCLRMVAAIAVLTKDAGKLTMGQPLVILAPHAVEALVKQPPDRWLSNARMTHYQAMLLDTDRVQFGPVVALNPATLLPLPEEGAPHDCLEILAETHGTRPDLTDQPIPDADHTWYTDGSSFLQEGQRKAGAAVTTETEVIWAGALPAGTSAQRAELIALTQALKMAEGKRLNVYTDSRYAFATAHIHGEIYRRRGWLTSEGREIKNKSEILALLKALFLPKRLSIIHCLGHQKGDSAEARGNRLADQAAREAAIKTPPDTSTLLIAGKRTADGSEFEKRTADGSEFESPKKKAKVE

SEQ ID NO: 2117 - protein, 2096 aa, synthetic construct
MPAAKRVKLDGGDKKYSIGLDIGTNSVGWAVITDEYKVPSKKFKVLGNTDRHSIKKNLIGALLFDSGETAEATRLKRTARRRYTRRKNRICYLQEIFSNEMAKVDDSFFHRLEESFLVEEDKKHERHPIFGNIVDEVAYHEKYPTIYHLRKKLVDSTDKADLRLIYLALAHMIKFRGHFLIEGDLNPDNSDVDKLFIQLVQTYNQLFEENPINASGVDAKAILSARLSKSRRLENLIAQLPGEKKNGLFGNLIALSLGLTPNFKSNFDLAEDAKLQLSKDTYDDDLDNLLAQIGDQYADLFLAAKNLSDAILLSDILRVNTEITKAPLSASMIKRYDEHHQDLTLLKALVRQQLPEKYKEIFFDQSKNGYAGYIDGGASQEEFYKFIKPILEKMDGTEELLVKLNREDLLRKQRTFDNGSIPHQIHLGELHAILRRQEDFYPFLKDNREKIEKILTFRIPYYVGPLARGNSRFAWMTRKSEETITPWNFEEVVDKGASAQSFIERMTNFDKNLPNEKVLPKHSLLYEYFTVYNELTKVKYVTEGMRKPAFLSGEQKKAIVDLLFKTNRKVTVKQLKEDYFKKIECFDSVEISGVEDRFNASLGTYHDLLKIIKDKDFLDNEENEDILEDIVLTLTLFEDREMIEERLKTYAHLFDDKVMKQLKRRRYTGWGRLSRKLINGIRDKQSGKTILDFLKSDGFANRNFMQLIHDDSLTFKEDIQKAQVSGQGDSLHEHIANLAGSPAIKKGILQTVKVVDELVKVMGRHKPENIVIEMARENQTTQKGQKNSRERMKRIEEGIKELGSQILKEHPVENTQLQNEKLYLYYLQNGRDMYVDQELDINRLSDYDVDHIVPQSFLKDDSIDNKVLTRSDKARGKSDNVPSEEVVKKMKNYWRQLLNAKLITQRKFDNLTKAERGGLSELDKAGFIKRQLVETRQITKHVAQILDSRMNTKYDENDKLIREVKVITLKSKLVSDFRKDFQFYKVREINNYHHAHDAYLNAVVGTALIKKYPKLESEFVYGDYKVYDVRKMIAKSEQEIGKATAKYFFYSNIMNFFKTEITLANGEIRKRPLIETNGETGEIVWDKGRDFATVRKVLSMPQVNIVKKTEVQTGGFSKESILPKRNSDKLIARKKDWDPKKYGGFDSPTVAYSVLVVAKVEKGKSKKLKSVKELLGITIMERSSFEKNPIDFLEAKGYKEVKKDLIIKLPKYSLFELENGRKRMLASAGELQKGNELALPSKYVNFLYLASHYEKLKGSPEDNEQKQLFVEQHKHYLDEIIEQISEFSKRVILADANLDKVLSAYNKHRDKPIREQAENIIHLFTLTNLGAPAAFKYFDTTIDRKRYTSTKEVLDATLIHQSITGLYETRIDLSQLGGDGGGSSGGSEAAAKGGLGIEDEYRLHETSTEPDVSLGSTWLSDFPQAWAETGGMGLAVRQAPLIIPLKATSTPVSIQQYPMSHEARLGIKPHIQRLLDQGILVPCQSPWNTPLLPVKKPGTNDYRPVQDLREVNKRVEDIHPTVPNPYNLLSGLPPSHQWYTVLDLKDAFFCLRLHPTSQPLFAFEWRDPGMGISGQLTWTRLPQGFKNSPTLFNEALHRDLADFRIQHPDLILLQYVDDILLAATSELDCQQGTRALLQTLGDLGYRASAKKAQICQKQVKYLGYLLREGQRWLTEARKETVMGQPVPKTPRQLREFLGKAGFCRLFIPGFAEMAAPLYPLTKPGTLFSWGPDQQKAYQEIKQALLTAPALGLPDLTKPFELFVDEKQGYAKGVLTQKLGPWRRPVAYLSKKLDPVAAGWPPCLRMVAAIAVLTKDAGKLTMGQPLVILAPHAVEALVKQPPDRWLSNARMTHYQAMLLDTDRVQFGPVVALNPATLLPLPEEGAPHDCLEILAETHGTRPDLTDQPIPDADHTWYTDGSSFLQEGQRKAGAAVTTETEVIWAGALPAGTSAQRAELIALTQALKMAEGKRLNVYTDSRYAFATAHIHGEIYRRRGWLTSEGREIKNKSEILALLKALFLPKRLSIIHCLGHQKGDSAEARGNRLADQAAREAAIKTPPDTSTLLIAGKRTADGSEFEKRTADGSEFESPKKKAKVE

SEQ ID NO: 2118 - protein, 2100 aa, synthetic construct
MPAAKRVKLDGGDKKYSIGLDIGTNSVGWAVITDEYKVPSKKFKVLGNTDRHSIKKNLIGALLFDSGETAEATRLKRTARRRYTRRKNRICYLQEIFSNEMAKVDDSFFHRLEESFLVEEDKKHERHPIFGNIVDEVAYHEKYPTIYHLRKKLVDSTDKADLRLIYLALAHMIKFRGHFLIEGDLNPDNSDVDKLFIQLVQTYNQLFEENPINASGVDAKAILSARLSKSRRLENLIAQLPGEKKNGLFGNLIALSLGLTPNFKSNFDLAEDAKLQLSKDTYDDDLDNLLAQIGDQYADLFLAAKNLSDAILLSDILRVNTEITKAPLSASMIKRYDEHHQDLTLLKALVRQQLPEKYKEIFFDQSKNGYAGYIDGGASQEEFYKFIKPILEKMDGTEELLVKLNREDLLRKQRTFDNGSIPHQIHLGELHAILRRQEDFYPFLKDNREKIEKILTFRIPYYVGPLARGNSRFAWMTRKSEETITPWNFEEVVDKGASAQSFIERMTNFDKNLPNEKVLPKHSLLYEYFTVYNELTKVKYVTEGMRKPAFLSGEQKKAIVDLLFKTNRKVTVKQLKEDYFKKIECFDSVEISGVEDRFNASLGTYHDLLKIIKDKDFLDNEENEDILEDIVLTLTLFEDREMIEERLKTYAHLFDDKVMKQLKRRRYTGWGRLSRKLINGIRDKQSGKTILDFLKSDGFANRNFMQLIHDDSLTFKEDIQKAQVSGQGDSLHEHIANLAGSPAIKKGILQTVKVVDELVKVMGRHKPENIVIEMARENQTTQKGQKNSRERMKRIEEGIKELGSQILKEHPVENTQLQNEKLYLYYLQNGRDMYVDQELDINRLSDYDVDHIVPQSFLKDDSIDNKVLTRSDKARGKSDNVPSEEVVKKMKNYWRQLLNAKLITQRKFDNLTKAERGGLSELDKAGFIKRQLVETRQITKHVAQILDSRMNTKYDENDKLIREVKVITLKSKLVSDFRKDFQFYKVREINNYHHAHDAYLNAVVGTALIKKYPKLESEFVYGDYKVYDVRKMIAKSEQEIGKATAKYFFYSNIMNFFKTEITLANGEIRKRPLIETNGETGEIVWDKGRDFATVRKVLSMPQVNIVKKTEVQTGGFSKESILPKRNSDKLIARKKDWDPKKYGGFDSPTVAYSVLVVAKVEKGKSKKLKSVKELLGITIMERSSFEKNPIDFLEAKGYKEVKKDLIIKLPKYSLFELENGRKRMLASAGELQKGNELALPSKYVNFLYLASHYEKLKGSPEDNEQKQLFVEQHKHYLDEIIEQISEFSKRVILADANLDKVLSAYNKHRDKPIREQAENIIHLFTLTNLGAPAAFKYFDTTIDRKRYTSTKEVLDATLIHQSITGLYETRIDLSQLGGDGGGGSGGSGGSGGSGGSGGLGIEDEYRLHETSTEPDVSLGSTWLSDFPQAWAETGGMGLAVRQAPLIIPLKATSTPVSIQQYPMSHEARLGIKPHIQRLLDQGILVPCQSPWNTPLLPVKKPGTNDYRPVQDLREVNKRVEDIHPTVPNPYNLLSGLPPSHQWYTVLDLKDAFFCLRLHPTSQPLFAFEWRDPGMGISGQLTWTRLPQGFKNSPTLFNEALHRDLADFRIQHPDLILLQYVDDILLAATSELDCQQGTRALLQTLGDLGYRASAKKAQICQKQVKYLGYLLREGQRWLTEARKETVMGQPVPKTPRQLREFLGKAGFCRLFIPGFAEMAAPLYPLTKPGTLFSWGPDQQKAYQEIKQALLTAPALGLPDLTKPFELFVDEKQGYAKGVLTQKLGPWRRPVAYLSKKLDPVAAGWPPCLRMVAAIAVLTKDAGKLTMGQPLVILAPHAVEALVKQPPDRWLSNARMTHYQAMLLDTDRVQFGPVVALNPATLLPLPEEGAPHDCLEILAETHGTRPDLTDQPIPDADHTWYTDGSSFLQEGQRKAGAAVTTETEVIWAGALPAGTSAQRAELIALTQALKMAEGKRLNVYTDSRYAFATAHIHGEIYRRRGWLTSEGREIKNKSEILALLKALFLPKRLSIIHCLGHQKGDSAEARGNRLADQAAREAAIKTPPDTSTLLIAGKRTADGSEFEKRTADGSEFESPKKKAKVE

SEQ ID NO: 2119 - protein, 2096 aa, synthetic construct
MPAAKRVKLDGGDKKYSIGLDIGTNSVGWAVITDEYKVPSKKFKVLGNTDRHSIKKNLIGALLFDSGETAEATRLKRTARRRYTRRKNRICYLQEIFSNEMAKVDDSFFHRLEESFLVEEDKKHERHPIFGNIVDEVAYHEKYPTIYHLRKKLVDSTDKADLRLIYLALAHMIKFRGHFLIEGDLNPDNSDVDKLFIQLVQTYNQLFEENPINASGVDAKAILSARLSKSRRLENLIAQLPGEKKNGLFGNLIALSLGLTPNFKSNFDLAEDAKLQLSKDTYDDDLDNLLAQIGDQYADLFLAAKNLSDAILLSDILRVNTEITKAPLSASMIKRYDEHHQDLTLLKALVRQQLPEKYKEIFFDQSKNGYAGYIDGGASQEEFYKFIKPILEKMDGTEELLVKLNREDLLRKQRTFDNGSIPHQIHLGELHAILRRQEDFYPFLKDNREKIEKILTFRIPYYVGPLARGNSRFAWMTRKSEETITPWNFEEVVDKGASAQSFIERMTNFDKNLPNEKVLPKHSLLYEYFTVYNELTKVKYVTEGMRKPAFLSGEQKKAIVDLLFKTNRKVTVKQLKEDYFKKIECFDSVEISGVEDRFNASLGTYHDLLKIIKDKDFLDNEENEDILEDIVLTLTLFEDREMIEERLKTYAHLFDDKVMKQLKRRRYTGWGRLSRKLINGIRDKQSGKTILDFLKSDGFANRNFMQLIHDDSLTFKEDIQKAQVSGQGDSLHEHIANLAGSPAIKKGILQTVKVVDELVKVMGRHKPENIVIEMARENQTTQKGQKNSRERMKRIEEGIKELGSQILKEHPVENTQLQNEKLYLYYLQNGRDMYVDQELDINRLSDYDVDHIVPQSFLKDDSIDNKVLTRSDKARGKSDNVPSEEVVKKMKNYWRQLLNAKLITQRKFDNLTKAERGGLSELDKAGFIKRQLVETRQITKHVAQILDSRMNTKYDENDKLIREVKVITLKSKLVSDFRKDFQFYKVREINNYHHAHDAYLNAVVGTALIKKYPKLESEFVYGDYKVYDVRKMIAKSEQEIGKATAKYFFYSNIMNFFKTEITLANGEIRKRPLIETNGETGEIVWDKGRDFATVRKVLSMPQVNIVKKTEVQTGGFSKESILPKRNSDKLIARKKDWDPKKYGGFDSPTVAYSVLVVAKVEKGKSKKLKSVKELLGITIMERSSFEKNPIDFLEAKGYKEVKKDLIIKLPKYSLFELENGRKRMLASAGELQKGNELALPSKYVNFLYLASHYEKLKGSPEDNEQKQLFVEQHKHYLDEIIEQISEFSKRVILADANLDKVLSAYNKHRDKPIREQAENIIHLFTLTNLGAPAAFKYFDTTIDRKRYTSTKEVLDATLIHQSITGLYETRIDLSQLGGDGGEAAAKGSSGGSGGLGIEDEYRLHETSTEPDVSLGSTWLSDFPQAWAETGGMGLAVRQAPLIIPLKATSTPVSIQQYPMSHEARLGIKPHIQRLLDQGILVPCQSPWNTPLLPVKKPGTNDYRPVQDLREVNKRVEDIHPTVPNPYNLLSGLPPSHQWYTVLDLKDAFFCLRLHPTSQPLFAFEWRDPGMGISGQLTWTRLPQGFKNSPTLFNEALHRDLADFRIQHPDLILLQYVDDILLAATSELDCQQGTRALLQTLGDLGYRASAKKAQICQKQVKYLGYLLREGQRWLTEARKETVMGQPVPKTPRQLREFLGKAGFCRLFIPGFAEMAAPLYPLTKPGTLFSWGPDQQKAYQEIKQALLTAPALGLPDLTKPFELFVDEKQGYAKGVLTQKLGPWRRPVAYLSKKLDPVAAGWPPCLRMVAAIAVLTKDAGKLTMGQPLVILAPHAVEALVKQPPDRWLSNARMTHYQAMLLDTDRVQFGPVVALNPATLLPLPEEGAPHDCLEILAETHGTRPDLTDQPIPDADHTWYTDGSSFLQEGQRKAGAAVTTETEVIWAGALPAGTSAQRAELIALTQALKMAEGKRLNVYTDSRYAFATAHIHGEIYRRRGWLTSEGREIKNKSEILALLKALFLPKRLSIIHCLGHQKGDSAEARGNRLADQAAREAAIKTPPDTSTLLIAGKRTADGSEFEKRTADGSEFESPKKKAKVE

SEQ ID NO: 2120 - protein, 2096 aa, synthetic construct
MPAAKRVKLDGGDKKYSIGLDIGTNSVGWAVITDEYKVPSKKFKVLGNTDRHSIKKNLIGALLFDSGETAEATRLKRTARRRYTRRKNRICYLQEIFSNEMAKVDDSFFHRLEESFLVEEDKKHERHPIFGNIVDEVAYHEKYPTIYHLRKKLVDSTDKADLRLIYLALAHMIKFRGHFLIEGDLNPDNSDVDKLFIQLVQTYNQLFEENPINASGVDAKAILSARLSKSRRLENLIAQLPGEKKNGLFGNLIALSLGLTPNFKSNFDLAEDAKLQLSKDTYDDDLDNLLAQIGDQYADLFLAAKNLSDAILLSDILRVNTEITKAPLSASMIKRYDEHHQDLTLLKALVRQQLPEKYKEIFFDQSKNGYAGYIDGGASQEEFYKFIKPILEKMDGTEELLVKLNREDLLRKQRTFDNGSIPHQIHLGELHAILRRQEDFYPFLKDNREKIEKILTFRIPYYVGPLARGNSRFAWMTRKSEETITPWNFEEVVDKGASAQSFIERMTNFDKNLPNEKVLPKHSLLYEYFTVYNELTKVKYVTEGMRKPAFLSGEQKKAIVDLLFKTNRKVTVKQLKEDYFKKIECFDSVEISGVEDRFNASLGTYHDLLKIIKDKDFLDNEENEDILEDIVLTLTLFEDREMIEERLKTYAHLFDDKVMKQLKRRRYTGWGRLSRKLINGIRDKQSGKTILDFLKSDGFANRNFMQLIHDDSLTFKEDIQKAQVSGQGDSLHEHIANLAGSPAIKKGILQTVKVVDELVKVMGRHKPENIVIEMARENQTTQKGQKNSRERMKRIEEGIKELGSQILKEHPVENTQLQNEKLYLYYLQNGRDMYVDQELDINRLSDYDVDHIVPQSFLKDDSIDNKVLTRSDKARGKSDNVPSEEVVKKMKNYWRQLLNAKLITQRKFDNLTKAERGGLSELDKAGFIKRQLVETRQITKHVAQILDSRMNTKYDENDKLIREVKVITLKSKLVSDFRKDFQFYKVREINNYHHAHDAYLNAVVGTALIKKYPKLESEFVYGDYKVYDVRKMIAKSEQEIGKATAKYFFYSNIMNFFKTEITLANGEIRKRPLIETNGETGEIVWDKGRDFATVRKVLSMPQVNIVKKTEVQTGGFSKESILPKRNSDKLIARKKDWDPKKYGGFDSPTVAYSVLVVAKVEKGKSKKLKSVKELLGITIMERSSFEKNPIDFLEAKGYKEVKKDLIIKLPKYSLFELENGRKRMLASAGELQKGNELALPSKYVNFLYLASHYEKLKGSPEDNEQKQLFVEQHKHYLDEIIEQISEFSKRVILADANLDKVLSAYNKHRDKPIREQAENIIHLFTLTNLGAPAAFKYFDTTIDRKRYTSTKEVLDATLIHQSITGLYETRIDLSQLGGDGGPAPEAAAKGGGGGLGIEDEYRLHETSTEPDVSLGSTWLSDFPQAWAETGGMGLAVRQAPLIIPLKATSTPVSIQQYPMSHEARLGIKPHIQRLLDQGILVPCQSPWNTPLLPVKKPGTNDYRPVQDLREVNKRVEDIHPTVPNPYNLLSGLPPSHQWYTVLDLKDAFFCLRLHPTSQPLFAFEWRDPGMGISGQLTWTRLPQGFKNSPTLFNEALHRDLADFRIQHPDLILLQYVDDILLAATSELDCQQGTRALLQTLGDLGYRASAKKAQICQKQVKYLGYLLREGQRWLTEARKETVMGQPVPKTPRQLREFLGKAGFCRLFIPGFAEMAAPLYPLTKPGTLFSWGPDQQKAYQEIKQALLTAPALGLPDLTKPFELFVDEKQGYAKGVLTQKLGPWRRPVAYLSKKLDPVAAGWPPCLRMVAAIAVLTKDAGKLTMGQPLVILAPHAVEALVKQPPDRWLSNARMTHYQAMLLDTDRVQFGPVVALNPATLLPLPEEGAPHDCLEILAETHGTRPDLTDQPIPDADHTWYTDGSSFLQEGQRKAGAAVTTETEVIWAGALPAGTSAQRAELIALTQALKMAEGKRLNVYTDSRYAFATAHIHGEIYRRRGWLTSEGREIKNKSEILALLKALFLPKRLSIIHCLGHQKGDSAEARGNRLADQAAREAAIKTPPDTSTLLIAGKRTADGSEFEKRTADGSEFESPKKKAKVE

SEQ ID NO: 2121 - protein, 2101 aa, synthetic construct
MPAAKRVKLDGGDKKYSIGLDIGTNSVGWAVITDEYKVPSKKFKVLGNTDRHSIKKNLIGALLFDSGETAEATRLKRTARRRYTRRKNRICYLQEIFSNEMAKVDDSFFHRLEESFLVEEDKKHERHPIFGNIVDEVAYHEKYPTIYHLRKKLVDSTDKADLRLIYLALAHMIKFRGHFLIEGDLNPDNSDVDKLFIQLVQTYNQLFEENPINASGVDAKAILSARLSKSRRLENLIAQLPGEKKNGLFGNLIALSLGLTPNFKSNFDLAEDAKLQLSKDTYDDDLDNLLAQIGDQYADLFLAAKNLSDAILLSDILRVNTEITKAPLSASMIKRYDEHHQDLTLLKALVRQQLPEKYKEIFFDQSKNGYAGYIDGGASQEEFYKFIKPILEKMDGTEELLVKLNREDLLRKQRTFDNGSIPHQIHLGELHAILRRQEDFYPFLKDNREKIEKILTFRIPYYVGPLARGNSRFAWMTRKSEETITPWNFEEVVDKGASAQSFIERMTNFDKNLPNEKVLPKHSLLYEYFTVYNELTKVKYVTEGMRKPAFLSGEQKKAIVDLLFKTNRKVTVKQLKEDYFKKIECFDSVEISGVEDRFNASLGTYHDLLKIIKDKDFLDNEENEDILEDIVLTLTLFEDREMIEERLKTYAHLFDDKVMKQLKRRRYTGWGRLSRKLINGIRDKQSGKTILDFLKSDGFANRNFMQLIHDDSLTFKEDIQKAQVSGQGDSLHEHIANLAGSPAIKKGILQTVKVVDELVKVMGRHKPENIVIEMARENQTTQKGQKNSRERMKRIEEGIKELGSQILKEHPVENTQLQNEKLYLYYLQNGRDMYVDQELDINRLSDYDVDHIVPQSFLKDDSIDNKVLTRSDKARGKSDNVPSEEVVKKMKNYWRQLLNAKLITQRKFDNLTKAERGGLSELDKAGFIKRQLVETRQITKHVAQILDSRMNTKYDENDKLIREVKVITLKSKLVSDFRKDFQFYKVREINNYHHAHDAYLNAVVGTALIKKYPKLESEFVYGDYKVYDVRKMIAKSEQEIGKATAKYFFYSNIMNFFKTEITLANGEIRKRPLIETNGETGEIVWDKGRDFATVRKVLSMPQVNIVKKTEVQTGGFSKESILPKRNSDKLIARKKDWDPKKYGGFDSPTVAYSVLVVAKVEKGKSKKLKSVKELLGITIMERSSFEKNPIDFLEAKGYKEVKKDLIIKLPKYSLFELENGRKRMLASAGELQKGNELALPSKYVNFLYLASHYEKLKGSPEDNEQKQLFVEQHKHYLDEIIEQISEFSKRVILADANLDKVLSAYNKHRDKPIREQAENIIHLFTLTNLGAPAAFKYFDTTIDRKRYTSTKEVLDATLIHQSITGLYETRIDLSQLGGDGGSGSETPGTSESATPESGGLGIEDEYRLHETSTEPDVSLGSTWLSDFPQAWAETGGMGLAVRQAPLIIPLKATSTPVSIQQYPMSHEARLGIKPHIQRLLDQGILVPCQSPWNTPLLPVKKPGTNDYRPVQDLREVNKRVEDIHPTVPNPYNLLSGLPPSHQWYTVLDLKDAFFCLRLHPTSQPLFAFEWRDPGMGISGQLTWTRLPQGFKNSPTLFNEALHRDLADFRIQHPDLILLQYVDDILLAATSELDCQQGTRALLQTLGDLGYRASAKKAQICQKQVKYLGYLLREGQRWLTEARKETVMGQPVPKTPRQLREFLGKAGFCRLFIPGFAEMAAPLYPLTKPGTLFSWGPDQQKAYQEIKQALLTAPALGLPDLTKPFELFVDEKQGYAKGVLTQKLGPWRRPVAYLSKKLDPVAAGWPPCLRMVAAIAVLTKDAGKLTMGQPLVILAPHAVEALVKQPPDRWLSNARMTHYQAMLLDTDRVQFGPVVALNPATLLPLPEEGAPHDCLEILAETHGTRPDLTDQPIPDADHTWYTDGSSFLQEGQRKAGAAVTTETEVIWAGALPAGTSAQRAELIALTQALKMAEGKRLNVYTDSRYAFATAHIHGEIYRRRGWLTSEGREIKNKSEILALLKALFLPKRLSIIHCLGHQKGDSAEARGNRLADQAAREAAIKTPPDTSTLLIAGKRTADGSEFEKRTADGSEFESPKKKAKVE

SEQ ID NO: 2122 - protein, 2094 aa, synthetic construct; identical to SEQ ID NO: 2058

SEQ ID NO: 2123 - protein, 2096 aa, synthetic construct; identical to SEQ ID NO: 2054

SEQ ID NO: 2124 - protein, 2091 aa, synthetic construct
MPAAKRVKLDGGDKKYSIGLDIGTNSVGWAVITDEYKVPSKKFKVLGNTDRHSIKKNLIGALLFDSGETAEATRLKRTARRRYTRRKNRICYLQEIFSNEMAKVDDSFFHRLEESFLVEEDKKHERHPIFGNIVDEVAYHEKYPTIYHLRKKLVDSTDKADLRLIYLALAHMIKFRGHFLIEGDLNPDNSDVDKLFIQLVQTYNQLFEENPINASGVDAKAILSARLSKSRRLENLIAQLPGEKKNGLFGNLIALSLGLTPNFKSNFDLAEDAKLQLSKDTYDDDLDNLLAQIGDQYADLFLAAKNLSDAILLSDILRVNTEITKAPLSASMIKRYDEHHQDLTLLKALVRQQLPEKYKEIFFDQSKNGYAGYIDGGASQEEFYKFIKPILEKMDGTEELLVKLNREDLLRKQRTFDNGSIPHQIHLGELHAILRRQEDFYPFLKDNREKIEKILTFRIPYYVGPLARGNSRFAWMTRKSEETITPWNFEEVVDKGASAQSFIERMTNFDKNLPNEKVLPKHSLLYEYFTVYNELTKVKYVTEGMRKPAFLSGEQKKAIVDLLFKTNRKVTVKQLKEDYFKKIECFDSVEISGVEDRFNASLGTYHDLLKIIKDKDFLDNEENEDILEDIVLTLTLFEDREMIEERLKTYAHLFDDKVMKQLKRRRYTGWGRLSRKLINGIRDKQSGKTILDFLKSDGFANRNFMQLIHDDSLTFKEDIQKAQVSGQGDSLHEHIANLAGSPAIKKGILQTVKVVDELVKVMGRHKPENIVIEMARENQTTQKGQKNSRERMKRIEEGIKELGSQILKEHPVENTQLQNEKLYLYYLQNGRDMYVDQELDINRLSDYDVDHIVPQSFLKDDSIDNKVLTRSDKARGKSDNVPSEEVVKKMKNYWRQLLNAKLITQRKFDNLTKAERGGLSELDKAGFIKRQLVETRQITKHVAQILDSRMNTKYDENDKLIREVKVITLKSKLVSDFRKDFQFYKVREINNYHHAHDAYLNAVVGTALIKKYPKLESEFVYGDYKVYDVRKMIAKSEQEIGKATAKYFFYSNIMNFFKTEITLANGEIRKRPLIETNGETGEIVWDKGRDFATVRKVLSMPQVNIVKKTEVQTGGFSKESILPKRNSDKLIARKKDWDPKKYGGFDSPTVAYSVLVVAKVEKGKSKKLKSVKELLGITIMERSSFEKNPIDFLEAKGYKEVKKDLIIKLPKYSLFELENGRKRMLASAGELQKGNELALPSKYVNFLYLASHYEKLKGSPEDNEQKQLFVEQHKHYLDEIIEQISEFSKRVILADANLDKVLSAYNKHRDKPIREQAENIIHLFTLTNLGAPAAFKYFDTTIDRKRYTSTKEVLDATLIHQSITGLYETRIDLSQLGGDGGGSSPAPGGLGIEDEYRLHETSTEPDVSLGSTWLSDFPQAWAETGGMGLAVRQAPLIIPLKATSTPVSIQQYPMSHEARLGIKPHIQRLLDQGILVPCQSPWNTPLLPVKKPGTNDYRPVQDLREVNKRVEDIHPTVPNPYNLLSGLPPSHQWYTVLDLKDAFFCLRLHPTSQPLFAFEWRDPGMGISGQLTWTRLPQGFKNSPTLFNEALHRDLADFRIQHPDLILLQYVDDILLAATSELDCQQGTRALLQTLGDLGYRASAKKAQICQKQVKYLGYLLREGQRWLTEARKETVMGQPVPKTPRQLREFLGKAGFCRLFIPGFAEMAAPLYPLTKPGTLFSWGPDQQKAYQEIKQALLTAPALGLPDLTKPFELFVDEKQGYAKGVLTQKLGPWRRPVAYLSKKLDPVAAGWPPCLRMVAAIAVLTKDAGKLTMGQPLVILAPHAVEALVKQPPDRWLSNARMTHYQAMLLDTDRVQFGPVVALNPATLLPLPEEGAPHDCLEILAETHGTRPDLTDQPIPDADHTWYTDGSSFLQEGQRKAGAAVTTETEVIWAGALPAGTSAQRAELIALTQALKMAEGKRLNVYTDSRYAFATAHIHGEIYRRRGWLTSEGREIKNKSEILALLKALFLPKRLSIIHCLGHQKGDSAEARGNRLADQAAREAAIKTPPDTSTLLIAGKRTADGSEFEKRTADGSEFESPKKKAKVE

SEQ ID NO: 2125 - protein, 2090 aa, synthetic construct
MPAAKRVKLDGGDKKYSIGLDIGTNSVGWAVITDEYKVPSKKFKVLGNTDRHSIKKNLIGALLFDSGETAEATRLKRTARRRYTRRKNRICYLQEIFSNEMAKVDDSFFHRLEESFLVEEDKKHERHPIFGNIVDEVAYHEKYPTIYHLRKKLVDSTDKADLRLIYLALAHMIKFRGHFLIEGDLNPDNSDVDKLFIQLVQTYNQLFEENPINASGVDAKAILSARLSKSRRLENLIAQLPGEKKNGLFGNLIALSLGLTPNFKSNFDLAEDAKLQLSKDTYDDDLDNLLAQIGDQYADLFLAAKNLSDAILLSDILRVNTEITKAPLSASMIKRYDEHHQDLTLLKALVRQQLPEKYKEIFFDQSKNGYAGYIDGGASQEEFYKFIKPILEKMDGTEELLVKLNREDLLRKQRTFDNGSIPHQIHLGELHAILRRQEDFYPFLKDNREKIEKILTFRIPYYVGPLARGNSRFAWMTRKSEETITPWNFEEVVDKGASAQSFIERMTNFDKNLPNEKVLPKHSLLYEYFTVYNELTKVKYVTEGMRKPAFLSGEQKKAIVDLLFKTNRKVTVKQLKEDYFKKIECFDSVEISGVEDRFNASLGTYHDLLKIIKDKDFLDNEENEDILEDIVLTLTLFEDREMIEERLKTYAHLFDDKVMKQLKRRRYTGWGRLSRKLINGIRDKQSGKTILDFLKSDGFANRNFMQLIHDDSLTFKEDIQKAQVSGQGDSLHEHIANLAGSPAIKKGILQTVKVVDELVKVMGRHKPENIVIEMARENQTTQKGQKNSRERMKRIEEGIKELGSQILKEHPVENTQLQNEKLYLYYLQNGRDMYVDQELDINRLSDYDVDHIVPQSFLKDDSIDNKVLTRSDKARGKSDNVPSEEVVKKMKNYWRQLLNAKLITQRKFDNLTKAERGGLSELDKAGFIKRQLVETRQITKHVAQILDSRMNTKYDENDKLIREVKVITLKSKLVSDFRKDFQFYKVREINNYHHAHDAYLNAVVGTALIKKYPKLESEFVYGDYKVYDVRKMIAKSEQEIGKATAKYFFYSNIMNFFKTEITLANGEIRKRPLIETNGETGEIVWDKGRDFATVRKVLSMPQVNIVKKTEVQTGGFSKESILPKRNSDKLIARKKDWDPKKYGGFDSPTVAYSVLVVAKVEKGKSKKLKSVKELLGITIMERSSFEKNPIDFLEAKGYKEVKKDLIIKLPKYSLFELENGRKRMLASAGELQKGNELALPSKYVNFLYLASHYEKLKGSPEDNEQKQLFVEQHKHYLDEIIEQISEFSKRVILADANLDKVLSAYNKHRDKPIREQAENIIHLFTLTNLGAPAAFKYFDTTIDRKRYTSTKEVLDATLIHQSITGLYETRIDLSQLGGDGGGGGGSGGLGIEDEYRLHETSTEPDVSLGSTWLSDFPQAWAETGGMGLAVRQAPLIIPLKATSTPVSIQQYPMSHEARLGIKPHIQRLLDQGILVPCQSPWNTPLLPVKKPGTNDYRPVQDLREVNKRVEDIHPTVPNPYNLLSGLPPSHQWYTVLDLKDAFFCLRLHPTSQPLFAFEWRDPGMGISGQLTWTRLPQGFKNSPTLFNEALHRDLADFRIQHPDLILLQYVDDILLAATSELDCQQGTRALLQTLGDLGYRASAKKAQICQKQVKYLGYLLREGQRWLTEARKETVMGQPVPKTPRQLREFLGKAGFCRLFIPGFAEMAAPLYPLTKPGTLFSWGPDQQKAYQEIKQALLTAPALGLPDLTKPFELFVDEKQGYAKGVLTQKLGPWRRPVAYLSKKLDPVAAGWPPCLRMVAAIAVLTKDAGKLTMGQPLVILAPHAVEALVKQPPDRWLSNARMTHYQAMLLDTDRVQFGPVVALNPATLLPLPEEGAPHDCLEILAETHGTRPDLTDQPIPDADHTWYTDGSSFLQEGQRKAGAAVTTETEVIWAGALPAGTSAQRAELIALTQALKMAEGKRLNVYTDSRYAFATAHIHGEIYRRRGWLTSEGREIKNKSEILALLKALFLPKRLSIIHCLGHQKGDSAEARGNRLADQAAREAAIKTPPDTSTLLIAGKRTADGSEFEKRTADGSEFESPKKKAKVE

SEQ ID NO: 2126 - protein, 2096 aa, synthetic construct; identical to SEQ ID NO: 2052

SEQ ID NO: 2127 - protein, 2091 aa, synthetic construct
MPAAKRVKLDGGDKKYSIGLDIGTNSVGWAVITDEYKVPSKKFKVLGNTDRHSIKKNLIGALLFDSGETAEATRLKRTARRRYTRRKNRICYLQEIFSNEMAKVDDSFFHRLEESFLVEEDKKHERHPIFGNIVDEVAYHEKYPTIYHLRKKLVDSTDKADLRLIYLALAHMIKFRGHFLIEGDLNPDNSDVDKLFIQLVQTYNQLFEENPINASGVDAKAILSARLSKSRRLENLIAQLPGEKKNGLFGNLIALSLGLTPNFKSNFDLAEDAKLQLSKDTYDDDLDNLLAQIGDQYADLFLAAKNLSDAILLSDILRVNTEITKAPLSASMIKRYDEHHQDLTLLKALVRQQLPEKYKEIFFDQSKNGYAGYIDGGASQEEFYKFIKPILEKMDGTEELLVKLNREDLLRKQRTFDNGSIPHQIHLGELHAILRRQEDFYPFLKDNREKIEKILTFRIPYYVGPLARGNSRFAWMTRKSEETITPWNFEEVVDKGASAQSFIERMTNFDKNLPNEKVLPKHSLLYEYFTVYNELTKVKYVTEGMRKPAFLSGEQKKAIVDLLFKTNRKVTVKQLKEDYFKKIECFDSVEISGVEDRFNASLGTYHDLLKIIKDKDFLDNEENEDILEDIVLTLTLFEDREMIEERLKTYAHLFDDKVMKQLKRRRYTGWGRLSRKLINGIRDKQSGKTILDFLKSDGFANRNFMQLIHDDSLTFKEDIQKAQVSGQGDSLHEHIANLAGSPAIKKGILQTVKVVDELVKVMGRHKPENIVIEMARENQTTQKGQKNSRERMKRIEEGIKELGSQILKEHPVENTQLQNEKLYLYYLQNGRDMYVDQELDINRLSDYDVDHIVPQSFLKDDSIDNKVLTRSDKARGKSDNVPSEEVVKKMKNYWRQLLNAKLITQRKFDNLTKAERGGLSELDKAGFIKRQLVETRQITKHVAQILDSRMNTKYDENDKLIREVKVITLKSKLVSDFRKDFQFYKVREINNYHHAHDAYLNAVVGTALIKKYPKLESEFVYGDYKVYDVRKMIAKSEQEIGKATAKYFFYSNIMNFFKTEITLANGEIRKRPLIETNGETGEIVWDKGRDFATVRKVLSMPQVNIVKKTEVQTGGFSKESILPKRNSDKLIARKKDWDPKKYGGFDSPTVAYSVLVVAKVEKGKSKKLKSVKELLGITIMERSSFEKNPIDFLEAKGYKEVKKDLIIKLPKYSLFELENGRKRMLASAGELQKGNELALPSKYVNFLYLASHYEKLKGSPEDNEQKQLFVEQHKHYLDEIIEQISEFSKRVILADANLDKVLSAYNKHRDKPIREQAENIIHLFTLTNLGAPAAFKYFDTTIDRKRYTSTKEVLDATLIHQSITGLYETRIDLSQLGGDGGGGGPAPGGLGIEDEYRLHETSTEPDVSLGSTWLSDFPQAWAETGGMGLAVRQAPLIIPLKATSTPVSIQQYPMSHEARLGIKPHIQRLLDQGILVPCQSPWNTPLLPVKKPGTNDYRPVQDLREVNKRVEDIHPTVPNPYNLLSGLPPSHQWYTVLDLKDAFFCLRLHPTSQPLFAFEWRDPGMGISGQLTWTRLPQGFKNSPTLFNEALHRDLADFRIQHPDLILLQYVDDILLAATSELDCQQGTRALLQTLGDLGYRASAKKAQICQKQVKYLGYLLREGQRWLTEARKETVMGQPVPKTPRQLREFLGKAGFCRLFIPGFAEMAAPLYPLTKPGTLFSWGPDQQKAYQEIKQALLTAPALGLPDLTKPFELFVDEKQGYAKGVLTQKLGPWRRPVAYLSKKLDPVAAGWPPCLRMVAAIAVLTKDAGKLTMGQPLVILAPHAVEALVKQPPDRWLSNARMTHYQAMLLDTDRVQFGPVVALNPATLLPLPEEGAPHDCLEILAETHGTRPDLTDQPIPDADHTWYTDGSSFLQEGQRKAGAAVTTETEVIWAGALPAGTSAQRAELIALTQALKMAEGKRLNVYTDSRYAFATAHIHGEIYRRRGWLTSEGREIKNKSEILALLKALFLPKRLSIIHCLGHQKGDSAEARGNRLADQAAREAAIKTPPDTSTLLIAGKRTADGSEFEKRTADGSEFESPKKKAKVE

SEQ ID NO: 2128 - protein, 2095 aa, synthetic construct
MPAAKRVKLDGGDKKYSIGLDIGTNSVGWAVITDEYKVPSKKFKVLGNTDRHSIKKNLIGALLFDSGETAEATRLKRTARRRYTRRKNRICYLQEIFSNEMAKVDDSFFHRLEESFLVEEDKKHERHPIFGNIVDEVAYHEKYPTIYHLRKKLVDSTDKADLRLIYLALAHMIKFRGHFLIEGDLNPDNSDVDKLFIQLVQTYNQLFEENPINASGVDAKAILSARLSKSRRLENLIAQLPGEKKNGLFGNLIALSLGLTPNFKSNFDLAEDAKLQLSKDTYDDDLDNLLAQIGDQYADLFLAAKNLSDAILLSDILRVNTEITKAPLSASMIKRYDEHHQDLTLLKALVRQQLPEKYKEIFFDQSKNGYAGYIDGGASQEEFYKFIKPILEKMDGTEELLVKLNREDLLRKQRTFDNGSIPHQIHLGELHAILRRQEDFYPFLKDNREKIEKILTFRIPYYVGPLARGNSRFAWMTRKSEETITPWNFEEVVDKGASAQSFIERMTNFDKNLPNEKVLPKHSLLYEYFTVYNELTKVKYVTEGMRKPAFLSGEQKKAIVDLLFKTNRKVTVKQLKEDYFKKIECFDSVEISGVEDRFNASLGTYHDLLKIIKDKDFLDNEENEDILEDIVLTLTLFEDREMIEERLKTYAHLFDDKVMKQLKRRRYTGWGRLSRKLINGIRDKQSGKTILDFLKSDGFANRNFMQLIHDDSLTFKEDIQKAQVSGQGDSLHEHIANLAGSPAIKKGILQTVKVVDELVKVMGRHKPENIVIEMARENQTTQKGQKNSRERMKRIEEGIKELGSQILKEHPVENTQLQNEKLYLYYLQNGRDMYVDQELDINRLSDYDVDHIVPQSFLKDDSIDNKVLTRSDKARGKSDNVPSEEVVKKMKNYWRQLLNAKLITQRKFDNLTKAERGGLSELDKAGFIKRQLVETRQITKHVAQILDSRMNTKYDENDKLIREVKVITLKSKLVSDFRKDFQFYKVREINNYHHAHDAYLNAVVGTALIKKYPKLESEFVYGDYKVYDVRKMIAKSEQEIGKATAKYFFYSNIMNFFKTEITLANGEIRKRPLIETNGETGEIVWDKGRDFATVRKVLSMPQVNIVKKTEVQTGGFSKESILPKRNSDKLIARKKDWDPKKYGGFDSPTVAYSVLVVAKVEKGKSKKLKSVKELLGITIMERSSFEKNPIDFLEAKGYKEVKKDLIIKLPKYSLFELENGRKRMLASAGELQKGNELALPSKYVNFLYLASHYEKLKGSPEDNEQKQLFVEQHKHYLDEIIEQISEFSKRVILADANLDKVLSAYNKHRDKPIREQAENIIHLFTLTNLGAPAAFKYFDTTIDRKRYTSTKEVLDATLIHQSITGLYETRIDLSQLGGDGGEAAAKEAAAKGGLGIEDEYRLHETSTEPDVSLGSTWLSDFPQAWAETGGMGLAVRQAPLIIPLKATSTPVSIQQYPMSHEARLGIKPHIQRLLDQGILVPCQSPWNTPLLPVKKPGTNDYRPVQDLREVNKRVEDIHPTVPNPYNLLSGLPPSHQWYTVLDLKDAFFCLRLHPTSQPLFAFEWRDPGMGISGQLTWTRLPQGFKNSPTLFNEALHRDLADFRIQHPDLILLQYVDDILLAATSELDCQQGTRALLQTLGDLGYRASAKKAQICQKQVKYLGYLLREGQRWLTEARKETVMGQPVPKTPRQLREFLGKAGFCRLFIPGFAEMAAPLYPLTKPGTLFSWGPDQQKAYQEIKQALLTAPALGLPDLTKPFELFVDEKQGYAKGVLTQKLGPWRRPVAYLSKKLDPVAAGWPPCLRMVAAIAVLTKDAGKLTMGQPLVILAPHAVEALVKQPPDRWLSNARMTHYQAMLLDTDRVQFGPVVALNPATLLPLPEEGAPHDCLEILAETHGTRPDLTDQPIPDADHTWYTDGSSFLQEGQRKAGAAVTTETEVIWAGALPAGTSAQRAELIALTQALKMAEGKRLNVYTDSRYAFATAHIHGEIYRRRGWLTSEGREIKNKSEILALLKALFLPKRLSIIHCLGHQKGDSAEARGNRLADQAAREAAIKTPPDTSTLLIAGKRTADGSEFEKRTADGSEFESPKKKAKVE

SEQ ID NO: 2129 - protein, 2096 aa, synthetic construct; identical to SEQ ID NO: 2059

SEQ ID NO: 2130 - protein, 2096 aa, synthetic construct
MPAAKRVKLDGGDKKYSIGLDIGTNSVGWAVITDEYKVPSKKFKVLGNTDRHSIKKNLIGALLFDSGETAEATRLKRTARRRYTRRKNRICYLQEIFSNEMAKVDDSFFHRLEESFLVEEDKKHERHPIFGNIVDEVAYHEKYPTIYHLRKKLVDSTDKADLRLIYLALAHMIKFRGHFLIEGDLNPDNSDVDKLFIQLVQTYNQLFEENPINASGVDAKAILSARLSKSRRLENLIAQLPGEKKNGLFGNLIALSLGLTPNFKSNFDLAEDAKLQLSKDTYDDDLDNLLAQIGDQYADLFLAAKNLSDAILLSDILRVNTEITKAPLSASMIKRYDEHHQDLTLLKALVRQQLPEKYKEIFFDQSKNGYAGYIDGGASQEEFYKFIKPILEKMDGTEELLVKLNREDLLRKQRTFDNGSIPHQIHLGELHAILRRQEDFYPFLKDNREKIEKILTFRIPYYVGPLARGNSRFAWMTRKSEETITPWNFEEVVDKGASAQSFIERMTNFDKNLPNEKVLPKHSLLYEYFTVYNELTKVKYVTEGMRKPAFLSGEQKKAIVDLLFKTNRKVTVKQLKEDYFKKIECFDSVEISGVEDRFNASLGTYHDLLKIIKDKDFLDNEENEDILEDIVLTLTLFEDREMIEERLKTYAHLFDDKVMKQLKRRRYTGWGRLSRKLINGIRDKQSGKTILDFLKSDGFANRNFMQLIHDDSLTFKEDIQKAQVSGQGDSLHEHIANLAGSPAIKKGILQTVKVVDELVKVMGRHKPENIVIEMARENQTTQKGQKNSRERMKRIEEGIKELGSQILKEHPVENTQLQNEKLYLYYLQNGRDMYVDQELDINRLSDYDVDHIVPQSFLKDDSIDNKVLTRSDKARGKSDNVPSEEVVKKMKNYWRQLLNAKLITQRKFDNLTKAERGGLSELDKAGFIKRQLVETRQITKHVAQILDSRMNTKYDENDKLIREVKVITLKSKLVSDFRKDFQFYKVREINNYHHAHDAYLNAVVGTALIKKYPKLESEFVYGDYKVYDVRKMIAKSEQEIGKATAKYFFYSNIMNFFKTEITLANGEIRKRPLIETNGETGEIVWDKGRDFATVRKVLSMPQVNIVKKTEVQTGGFSKESILPKRNSDKLIARKKDWDPKKYGGFDSPTVAYSVLVVAKVEKGKSKKLKSVKELLGITIMERSSFEKNPIDFLEAKGYKEVKKDLIIKLPKYSLFELENGRKRMLASAGELQKGNELALPSKYVNFLYLASHYEKLKGSPEDNEQKQLFVEQHKHYLDEIIEQISEFSKRVILADANLDKVLSAYNKHRDKPIREQAENIIHLFTLTNLGAPAAFKYFDTTIDRKRYTSTKEVLDATLIHQSITGLYETRIDLSQLGGDGGEAAAKPAPGGGGGLGIEDEYRLHETSTEPDVSLGSTWLSDFPQAWAETGGMGLAVRQAPLIIPLKATSTPVSIQQYPMSHEARLGIKPHIQRLLDQGILVPCQSPWNTPLLPVKKPGTNDYRPVQDLREVNKRVEDIHPTVPNPYNLLSGLPPSHQWYTVLDLKDAFFCLRLHPTSQPLFAFEWRDPGMGISGQLTWTRLPQGFKNSPTLFNEALHRDLADFRIQHPDLILLQYVDDILLAATSELDCQQGTRALLQTLGDLGYRASAKKAQICQKQVKYLGYLLREGQRWLTEARKETVMGQPVPKTPRQLREFLGKAGFCRLFIPGFAEMAAPLYPLTKPGTLFSWGPDQQKAYQEIKQALLTAPALGLPDLTKPFELFVDEKQGYAKGVLTQKLGPWRRPVAYLSKKLDPVAAGWPPCLRMVAAIAVLTKDAGKLTMGQPLVILAPHAVEALVKQPPDRWLSNARMTHYQAMLLDTDRVQFGPVVALNPATLLPLPEEGAPHDCLEILAETHGTRPDLTDQPIPDADHTWYTDGSSFLQEGQRKAGAAVTTETEVIWAGALPAGTSAQRAELIALTQALKMAEGKRLNVYTDSRYAFATAHIHGEIYRRRGWLTSEGREIKNKSEILALLKALFLPKRLSIIHCLGHQKGDSAEARGNRLADQAAREAAIKTPPDTSTLLIAGKRTADGSEFEKRTADGSEFESPKKKAKVE

SEQ ID NO: 2131 - protein, 2088 aa, synthetic construct
MPAAKRVKLDGGDKKYSIGLDIGTNSVGWAVITDEYKVPSKKFKVLGNTDRHSIKKNLIGALLFDSGETAEATRLKRTARRRYTRRKNRICYLQEIFSNEMAKVDDSFFHRLEESFLVEEDKKHERHPIFGNIVDEVAYHEKYPTIYHLRKKLVDSTDKADLRLIYLALAHMIKFRGHFLIEGDLNPDNSDVDKLFIQLVQTYNQLFEENPINASGVDAKAILSARLSKSRRLENLIAQLPGEKKNGLFGNLIALSLGLTPNFKSNFDLAEDAKLQLSKDTYDDDLDNLLAQIGDQYADLFLAAKNLSDAILLSDILRVNTEITKAPLSASMIKRYDEHHQDLTLLKALVRQQLPEKYKEIFFDQSKNGYAGYIDGGASQEEFYKFIKPILEKMDGTEELLVKLNREDLLRKQRTFDNGSIPHQIHLGELHAILRRQEDFYPFLKDNREKIEKILTFRIPYYVGPLARGNSRFAWMTRKSEETITPWNFEEVVDKGASAQSFIERMTNFDKNLPNEKVLPKHSLLYEYFTVYNELTKVKYVTEGMRKPAFLSGEQKKAIVDLLFKTNRKVTVKQLKEDYFKKIECFDSVEISGVEDRFNASLGTYHDLLKIIKDKDFLDNEENEDILEDIVLTLTLFEDREMIEERLKTYAHLFDDKVMKQLKRRRYTGWGRLSRKLINGIRDKQSGKTILDFLKSDGFANRNFMQLIHDDSLTFKEDIQKAQVSGQGDSLHEHIANLAGSPAIKKGILQTVKVVDELVKVMGRHKPENIVIEMARENQTTQKGQKNSRERMKRIEEGIKELGSQILKEHPVENTQLQNEKLYLYYLQNGRDMYVDQELDINRLSDYDVDHIVPQSFLKDDSIDNKVLTRSDKARGKSDNVPSEEVVKKMKNYWRQLLNAKLITQRKFDNLTKAERGGLSELDKAGFIKRQLVETRQITKHVAQILDSRMNTKYDENDKLIREVKVITLKSKLVSDFRKDFQFYKVREINNYHHAHDAYLNAVVGTALIKKYPKLESEFVYGDYKVYDVRKMIAKSEQEIGKATAKYFFYSNIMNFFKTEITLANGEIRKRPLIETNGETGEIVWDKGRDFATVRKVLSMPQVNIVKKTEVQTGGFSKESILPKRNSDKLIARKKDWDPKKYGGFDSPTVAYSVLVVAKVEKGKSKKLKSVKELLGITIMERSSFEKNPIDFLEAKGYKEVKKDLIIKLPKYSLFELENGRKRMLASAGELQKGNELALPSKYVNFLYLASHYEKLKGSPEDNEQKQLFVEQHKHYLDEIIEQISEFSKRVILADANLDKVLSAYNKHRDKPIREQAENIIHLFTLTNLGAPAAFKYFDTTIDRKRYTSTKEVLDATLIHQSITGLYETRIDLSQLGGDGGGGSGGLGIEDEYRLHETSTEPDVSLGSTWLSDFPQAWAETGGMGLAVRQAPLIIPLKATSTPVSIQQYPMSHEARLGIKPHIQRLLDQGILVPCQSPWNTPLLPVKKPGTNDYRPVQDLREVNKRVEDIHPTVPNPYNLLSGLPPSHQWYTVLDLKDAFFCLRLHPTSQPLFAFEWRDPGMGISGQLTWTRLPQGFKNSPTLFNEALHRDLADFRIQHPDLILLQYVDDILLAATSELDCQQGTRALLQTLGDLGYRASAKKAQICQKQVKYLGYLLREGQRWLTEARKETVMGQPVPKTPRQLREFLGKAGFCRLFIPGFAEMAAPLYPLTKPGTLFSWGPDQQKAYQEIKQALLTAPALGLPDLTKPFELFVDEKQGYAKGVLTQKLGPWRRPVAYLSKKLDPVAAGWPPCLRMVAAIAVLTKDAGKLTMGQPLVILAPHAVEALVKQPPDRWLSNARMTHYQAMLLDTDRVQFGPVVALNPATLLPLPEEGAPHDCLEILAETHGTRPDLTDQPIPDADHTWYTDGSSFLQEGQRKAGAAVTTETEVIWAGALPAGTSAQRAELIALTQALKMAEGKRLNVYTDSRYAFATAHIHGEIYRRRGWLTSEGREIKNKSEILALLKALFLPKRLSIIHCLGHQKGDSAEARGNRLADQAAREAAIKTPPDTSTLLIAGKRTADGSEFEKRTADGSEFESPKKKAKVE

SEQ ID NO: 2132 - protein, 2096 aa, synthetic construct
MPAAKRVKLDGGDKKYSIGLDIGTNSVGWAVITDEYKVPSKKFKVLGNTDRHSIKKNLIGALLFDSGETAEATRLKRTARRRYTRRKNRICYLQEIFSNEMAKVDDSFFHRLEESFLVEEDKKHERHPIFGNIVDEVAYHEKYPTIYHLRKKLVDSTDKADLRLIYLALAHMIKFRGHFLIEGDLNPDNSDVDKLFIQLVQTYNQLFEENPINASGVDAKAILSARLSKSRRLENLIAQLPGEKKNGLFGNLIALSLGLTPNFKSNFDLAEDAKLQLSKDTYDDDLDNLLAQIGDQYADLFLAAKNLSDAILLSDILRVNTEITKAPLSASMIKRYDEHHQDLTLLKALVRQQLPEKYKEIFFDQSKNGYAGYIDGGASQEEFYKFIKPILEKMDGTEELLVKLNREDLLRKQRTFDNGSIPHQIHLGELHAILRRQEDFYPFLKDNREKIEKILTFRIPYYVGPLARGNSRFAWMTRKSEETITPWNFEEVVDKGASAQSFIERMTNFDKNLPNEKVLPKHSLLYEYFTVYNELTKVKYVTEGMRKPAFLSGEQKKAIVDLLFKTNRKVTVKQLKEDYFKKIECFDSVEISGVEDRFNASLGTYHDLLKIIKDKDFLDNEENEDILEDIVLTLTLFEDREMIEERLKTYAHLFDDKVMKQLKRRRYTGWGRLSRKLINGIRDKQSGKTILDFLKSDGFANRNFMQLIHDDSLTFKEDIQKAQVSGQGDSLHEHIANLAGSPAIKKGILQTVKVVDELVKVMGRHKPENIVIEMARENQTTQKGQKNSRERMKRIEEGIKELGSQILKEHPVENTQLQNEKLYLYYLQNGRDMYVDQELDINRLSDYDVDHIVPQSFLKDDSIDNKVLTRSDKARGKSDNVPSEEVVKKMKNYWRQLLNAKLITQRKFDNLTKAERGGLSELDKAGFIKRQLVETRQITKHVAQILDSRMNTKYDENDKLIREVKVITLKSKLVSDFRKDFQFYKVREINNYHHAHDAYLNAVVGTALIKKYPKLESEFVYGDYKVYDVRKMIAKSEQEIGKATAKYFFYSNIMNFFKTEITLANGEIRKRPLIETNGETGEIVWDKGRDFATVRKVLSMPQVNIVKKTEVQTGGFSKESILPKRNSDKLIARKKDWDPKKYGGFDSPTVAYSVLVVAKVEKGKSKKLKSVKELLGITIMERSSFEKNPIDFLEAKGYKEVKKDLIIKLPKYSLFELENGRKRMLASAGELQKGNELALPSKYVNFLYLASHYEKLKGSPEDNEQKQLFVEQHKHYLDEIIEQISEFSKRVILADANLDKVLSAYNKHRDKPIREQAENIIHLFTLTNLGAPAAFKYFDTTIDRKRYTSTKEVLDATLIHQSITGLYETRIDLSQLGGDGGGGGEAAAKGGSGGLGIEDEYRLHETSTEPDVSLGSTWLSDFPQAWAETGGMGLAVRQAPLIIPLKATSTPVSIQQYPMSHEARLGIKPHIQRLLDQGILVPCQSPWNTPLLPVKKPGTNDYRPVQDLREVNKRVEDIHPTVPNPYNLLSGLPPSHQWYTVLDLKDAFFCLRLHPTSQPLFAFEWRDPGMGISGQLTWTRLPQGFKNSPTLFNEALHRDLADFRIQHPDLILLQYVDDILLAATSELDCQQGTRALLQTLGDLGYRASAKKAQICQKQVKYLGYLLREGQRWLTEARKETVMGQPVPKTPRQLREFLGKAGFCRLFIPGFAEMAAPLYPLTKPGTLFSWGPDQQKAYQEIKQALLTAPALGLPDLTKPFELFVDEKQGYAKGVLTQKLGPWRRPVAYLSKKLDPVAAGWPPCLRMVAAIAVLTKDAGKLTMGQPLVILAPHAVEALVKQPPDRWLSNARMTHYQAMLLDTDRVQFGPVVALNPATLLPLPEEGAPHDCLEILAETHGTRPDLTDQPIPDADHTWYTDGSSFLQEGQRKAGAAVTTETEVIWAGALPAGTSAQRAELIALTQALKMAEGKRLNVYTDSRYAFATAHIHGEIYRRRGWLTSEGREIKNKSEILALLKALFLPKRLSIIHCLGHQKGDSAEARGNRLADQAAREAAIKTPPDTSTLLIAGKRTADGSEFEKRTADGSEFESPKKKAKVE

SEQ ID NO: 2133 - protein, 2094 aa, synthetic construct
MPAAKRVKLDGGDKKYSIGLDIGTNSVGWAVITDEYKVPSKKFKVLGNTDRHSIKKNLIGALLFDSGETAEATRLKRTARRRYTRRKNRICYLQEIFSNEMAKVDDSFFHRLEESFLVEEDKKHERHPIFGNIVDEVAYHEKYPTIYHLRKKLVDSTDKADLRLIYLALAHMIKFRGHFLIEGDLNPDNSDVDKLFIQLVQTYNQLFEENPINASGVDAKAILSARLSKSRRLENLIAQLPGEKKNGLFGNLIALSLGLTPNFKSNFDLAEDAKLQLSKDTYDDDLDNLLAQIGDQYADLFLAAKNLSDAILLSDILRVNTEITKAPLSASMIKRYDEHHQDLTLLKALVRQQLPEKYKEIFFDQSKNGYAGYIDGGASQEEFYKFIKPILEKMDGTEELLVKLNREDLLRKQRTFDNGSIPHQIHLGELHAILRRQEDFYPFLKDNREKIEKILTFRIPYYVGPLARGNSRFAWMTRKSEETITPWNFEEVVDKGASAQSFIERMTNFDKNLPNEKVLPKHSLLYEYFTVYNELTKVKYVTEGMRKPAFLSGEQKKAIVDLLFKTNRKVTVKQLKEDYFKKIECFDSVEISGVEDRFNASLGTYHDLLKIIKDKDFLDNEENEDILEDIVLTLTLFEDREMIEERLKTYAHLFDDKVMKQLKRRRYTGWGRLSRKLINGIRDKQSGKTILDFLKSDGFANRNFMQLIHDDSLTFKEDIQKAQVSGQGDSLHEHIANLAGSPAIKKGILQTVKVVDELVKVMGRHKPENIVIEMARENQTTQKGQKNSRERMKRIEEGIKELGSQILKEHPVENTQLQNEKLYLYYLQNGRDMYVDQELDINRLSDYDVDHIVPQSFLKDDSIDNKVLTRSDKARGKSDNVPSEEVVKKMKNYWRQLLNAKLITQRKFDNLTKAERGGLSELDKAGFIKRQLVETRQITKHVAQILDSRMNTKYDENDKLIREVKVITLKSKLVSDFRKDFQFYKVREINNYHHAHDAYLNAVVGTALIKKYPKLESEFVYGDYKVYDVRKMIAKSEQEIGKATAKYFFYSNIMNFFKTEITLANGEIRKRPLIETNGETGEIVWDKGRDFATVRKVLSMPQVNIVKKTEVQTGGFSKESILPKRNSDKLIARKKDWDPKKYGGFDSPTVAYSVLVVAKVEKGKSKKLKSVKELLGITIMERSSFEKNPIDFLEAKGYKEVKKDLIIKLPKYSLFELENGRKRMLASAGELQKGNELALPSKYVNFLYLASHYEKLKGSPEDNEQKQLFVEQHKHYLDEIIEQISEFSKRVILADANLDKVLSAYNKHRDKPIREQAENIIHLFTLTNLGAPAAFKYFDTTIDRKRYTSTKEVLDATLIHQSITGLYETRIDLSQLGGDGGGGGGGSPAPGGLGIEDEYRLHETSTEPDVSLGSTWLSDFPQAWAETGGMGLAVRQAPLIIPLKATSTPVSIQQYPMSHEARLGIKPHIQRLLDQGILVPCQSPWNTPLLPVKKPGTNDYRPVQDLREVNKRVEDIHPTVPNPYNLLSGLPPSHQWYTVLDLKDAFFCLRLHPTSQPLFAFEWRDPGMGISGQLTWTRLPQGFKNSPTLFNEALHRDLADFRIQHPDLILLQYVDDILLAATSELDCQQGTRALLQTLGDLGYRASAKKAQICQKQVKYLGYLLREGQRWLTEARKETVMGQPVPKTPRQLREFLGKAGFCRLFIPGFAEMAAPLYPLTKPGTLFSWGPDQQKAYQEIKQALLTAPALGLPDLTKPFELFVDEKQGYAKGVLTQKLGPWRRPVAYLSKKLDPVAAGWPPCLRMVAAIAVLTKDAGKLTMGQPLVILAPHAVEALVKQPPDRWLSNARMTHYQAMLLDTDRVQFGPVVALNPATLLPLPEEGAPHDCLEILAETHGTRPDLTDQPIPDADHTWYTDGSSFLQEGQRKAGAAVTTETEVIWAGALPAGTSAQRAELIALTQALKMAEGKRLNVYTDSRYAFATAHIHGEIYRRRGWLTSEGREIKNKSEILALLKALFLPKRLSIIHCLGHQKGDSAEARGNRLADQAAREAAIKTPPDTSTLLIAGKRTADGSEFEKRTADGSEFESPKKKAKVE

SEQ ID NO: 2134 - protein, 2091 aa, synthetic construct
MPAAKRVKLDGGDKKYSIGLDIGTNSVGWAVITDEYKVPSKKFKVLGNTDRHSIKKNLIGALLFDSGETAEATRLKRTARRRYTRRKNRICYLQEIFSNEMAKVDDSFFHRLEESFLVEEDKKHERHPIFGNIVDEVAYHEKYPTIYHLRKKLVDSTDKADLRLIYLALAHMIKFRGHFLIEGDLNPDNSDVDKLFIQLVQTYNQLFEENPINASGVDAKAILSARLSKSRRLENLIAQLPGEKKNGLFGNLIALSLGLTPNFKSNFDLAEDAKLQLSKDTYDDDLDNLLAQIGDQYADLFLAAKNLSDAILLSDILRVNTEITKAPLSASMIKRYDEHHQDLTLLKALVRQQLPEKYKEIFFDQSKNGYAGYIDGGASQEEFYKFIKPILEKMDGTEELLVKLNREDLLRKQRTFDNGSIPHQIHLGELHAILRRQEDFYPFLKDNREKIEKILTFRIPYYVGPLARGNSRFAWMTRKSEETITPWNFEEVVDKGASAQSFIERMTNFDKNLPNEKVLPKHSLLYEYFTVYNELTKVKYVTEGMRKPAFLSGEQKKAIVDLLFKTNRKVTVKQLKEDYFKKIECFDSVEISGVEDRFNASLGTYHDLLKIIKDKDFLDNEENEDILEDIVLTLTLFEDREMIEERLKTYAHLFDDKVMKQLKRRRYTGWGRLSRKLINGIRDKQSGKTILDFLKSDGFANRNFMQLIHDDSLTFKEDIQKAQVSGQGDSLHEHIANLAGSPAIKKGILQTVKVVDELVKVMGRHKPENIVIEMARENQTTQKGQKNSRERMKRIEEGIKELGSQILKEHPVENTQLQNEKLYLYYLQNGRDMYVDQELDINRLSDYDVDHIVPQSFLKDDSIDNKVLTRSDKARGKSDNVPSEEVVKKMKNYWRQLLNAKLITQRKFDNLTKAERGGLSELDKAGFIKRQLVETRQITKHVAQILDSRMNTKYDENDKLIREVKVITLKSKLVSDFRKDFQFYKVREINNYHHAHDAYLNAVVGTALIKKYPKLESEFVYGDYKVYDVRKMIAKSEQEIGKATAKYFFYSNIMNFFKTEITLANGEIRKRPLIETNGETGEIVWDKGRDFATVRKVLSMPQVNIVKKTEVQTGGFSKESILPKRNSDKLIARKKDWDPKKYGGFDSPTVAYSVLVVAKVEKGKSKKLKSVKELLGITIMERSSFEKNPIDFLEAKGYKEVKKDLIIKLPKYSLFELENGRKRMLASAGELQKGNELALPSKYVNFLYLASHYEKLKGSPEDNEQKQLFVEQHKHYLDEIIEQISEFSKRVILADANLDKVLSAYNKHRDKPIREQAENIIHLFTLTNLGAPAAFKYFDTTIDRKRYTSTKEVLDATLIHQSITGLYETRIDLSQLGGDGGPAPGGGGGLGIEDEYRLHETSTEPDVSLGSTWLSDFPQAWAETGGMGLAVRQAPLIIPLKATSTPVSIQQYPMSHEARLGIKPHIQRLLDQGILVPCQSPWNTPLLPVKKPGTNDYRPVQDLREVNKRVEDIHPTVPNPYNLLSGLPPSHQWYTVLDLKDAFFCLRLHPTSQPLFAFEWRDPGMGISGQLTWTRLPQGFKNSPTLFNEALHRDLADFRIQHPDLILLQYVDDILLAATSELDCQQGTRALLQTLGDLGYRASAKKAQICQKQVKYLGYLLREGQRWLTEARKETVMGQPVPKTPRQLREFLGKAGFCRLFIPGFAEMAAPLYPLTKPGTLFSWGPDQQKAYQEIKQALLTAPALGLPDLTKPFELFVDEKQGYAKGVLTQKLGPWRRPVAYLSKKLDPVAAGWPPCLRMVAAIAVLTKDAGKLTMGQPLVILAPHAVEALVKQPPDRWLSNARMTHYQAMLLDTDRVQFGPVVALNPATLLPLPEEGAPHDCLEILAETHGTRPDLTDQPIPDADHTWYTDGSSFLQEGQRKAGAAVTTETEVIWAGALPAGTSAQRAELIALTQALKMAEGKRLNVYTDSRYAFATAHIHGEIYRRRGWLTSEGREIKNKSEILALLKALFLPKRLSIIHCLGHQKGDSAEARGNRLADQAAREAAIKTPPDTSTLLIAGKRTADGSEFEKRTADGSEFESPKKKAKVE

SEQ ID NO: 2135 - protein, 2096 aa, synthetic construct
MPAAKRVKLDGGDKKYSIGLDIGTNSVGWAVITDEYKVPSKKFKVLGNTDRHSIKKNLIGALLFDSGETAEATRLKRTARRRYTRRKNRICYLQEIFSNEMAKVDDSFFHRLEESFLVEEDKKHERHPIFGNIVDEVAYHEKYPTIYHLRKKLVDSTDKADLRLIYLALAHMIKFRGHFLIEGDLNPDNSDVDKLFIQLVQTYNQLFEENPINASGVDAKAILSARLSKSRRLENLIAQLPGEKKNGLFGNLIALSLGLTPNFKSNFDLAEDAKLQLSKDTYDDDLDNLLAQIGDQYADLFLAAKNLSDAILLSDILRVNTEITKAPLSASMIKRYDEHHQDLTLLKALVRQQLPEKYKEIFFDQSKNGYAGYIDGGASQEEFYKFIKPILEKMDGTEELLVKLNREDLLRKQRTFDNGSIPHQIHLGELHAILRRQEDFYPFLKDNREKIEKILTFRIPYYVGPLARGNSRFAWMTRKSEETITPWNFEEVVDKGASAQSFIERMTNFDKNLPNEKVLPKHSLLYEYFTVYNELTKVKYVTEGMRKPAFLSGEQKKAIVDLLFKTNRKVTVKQLKEDYFKKIECFDSVEISGVEDRFNASLGTYHDLLKIIKDKDFLDNEENEDILEDIVLTLTLFEDREMIEERLKTYAHLFDDKVMKQLKRRRYTGWGRLSRKLINGIRDKQSGKTILDFLKSDGFANRNFMQLIHDDSLTFKEDIQKAQVSGQGDSLHEHIANLAGSPAIKKGILQTVKVVDELVKVMGRHKPENIVIEMARENQTTQKGQKNSRERMKRIEEGIKELGSQILKEHPVENTQLQNEKLYLYYLQNGRDMYVDQELDINRLSDYDVDHIVPQSFLKDDSIDNKVLTRSDKARGKSDNVPSEEVVKKMKNYWRQLLNAKLITQRKFDNLTKAERGGLSELDKAGFIKRQLVETRQITKHVAQILDSRMNTKYDENDKLIREVKVITLKSKLVSDFRKDFQFYKVREINNYHHAHDAYLNAVVGTALIKKYPKLESEFVYGDYKVYDVRKMIAKSEQEIGKATAKYFFYSNIMNFFKTEITLANGEIRKRPLIETNGETGEIVWDKGRDFATVRKVLSMPQVNIVKKTEVQTGGFSKESILPKRNSDKLIARKKDWDPKKYGGFDSPTVAYSVLVVAKVEKGKSKKLKSVKELLGITIMERSSFEKNPIDFLEAKGYKEVKKDLIIKLPKYSLFELENGRKRMLASAGELQKGNELALPSKYVNFLYLASHYEKLKGSPEDNEQKQLFVEQHKHYLDEIIEQISEFSKRVILADANLDKVLSAYNKHRDKPIREQAENIIHLFTLTNLGAPAAFKYFDTTIDRKRYTSTKEVLDATLIHQSITGLYETRIDLSQLGGDGGGGGEAAAKPAPGGLGIEDEYRLHETSTEPDVSLGSTWLSDFPQAWAETGGMGLAVRQAPLIIPLKATSTPVSIQQYPMSHEARLGIKPHIQRLLDQGILVPCQSPWNTPLLPVKKPGTNDYRPVQDLREVNKRVEDIHPTVPNPYNLLSGLPPSHQWYTVLDLKDAFFCLRLHPTSQPLFAFEWRDPGMGISGQLTWTRLPQGFKNSPTLFNEALHRDLADFRIQHPDLILLQYVDDILLAATSELDCQQGTRALLQTLGDLGYRASAKKAQICQKQVKYLGYLLREGQRWLTEARKETVMGQPVPKTPRQLREFLGKAGFCRLFIPGFAEMAAPLYPLTKPGTLFSWGPDQQKAYQEIKQALLTAPALGLPDLTKPFELFVDEKQGYAKGVLTQKLGPWRRPVAYLSKKLDPVAAGWPPCLRMVAAIAVLTKDAGKLTMGQPLVILAPHAVEALVKQPPDRWLSNARMTHYQAMLLDTDRVQFGPVVALNPATLLPLPEEGAPHDCLEILAETHGTRPDLTDQPIPDADHTWYTDGSSFLQEGQRKAGAAVTTETEVIWAGALPAGTSAQRAELIALTQALKMAEGKRLNVYTDSRYAFATAHIHGEIYRRRGWLTSEGREIKNKSEILALLKALFLPKRLSIIHCLGHQKGDSAEARGNRLADQAAREAAIKTPPDTSTLLIAGKRTADGSEFEKRTADGSEFESPKKKAKVE

SEQ ID NO: 2136 - protein, 2091 aa, synthetic construct
MPAAKRVKLDGGDKKYSIGLDIGTNSVGWAVITDEYKVPSKKFKVLGNTDRHSIKKNLIGALLFDSGETAEATRLKRTARRRYTRRKNRICYLQEIFSNEMAKVDDSFFHRLEESFLVEEDKKHERHPIFGNIVDEVAYHEKYPTIYHLRKKLVDSTDKADLRLIYLALAHMIKFRGHFLIEGDLNPDNSDVDKLFIQLVQTYNQLFEENPINASGVDAKAILSARLSKSRRLENLIAQLPGEKKNGLFGNLIALSLGLTPNFKSNFDLAEDAKLQLSKDTYDDDLDNLLAQIGDQYADLFLAAKNLSDAILLSDILRVNTEITKAPLSASMIKRYDEHHQDLTLLKALVRQQLPEKYKEIFFDQSKNGYAGYIDGGASQEEFYKFIKPILEKMDGTEELLVKLNREDLLRKQRTFDNGSIPHQIHLGELHAILRRQEDFYPFLKDNREKIEKILTFRIPYYVGPLARGNSRFAWMTRKSEETITPWNFEEVVDKGASAQSFIERMTNFDKNLPNEKVLPKHSLLYEYFTVYNELTKVKYVTEGMRKPAFLSGEQKKAIVDLLFKTNRKVTVKQLKEDYFKKIECFDSVEISGVEDRFNASLGTYHDLLKIIKDKDFLDNEENEDILEDIVLTLTLFEDREMIEERLKTYAHLFDDKVMKQLKRRRYTGWGRLSRKLINGIRDKQSGKTILDFLKSDGFANRNFMQLIHDDSLTFKEDIQKAQVSGQGDSLHEHIANLAGSPAIKKGILQTVKVVDELVKVMGRHKPENIVIEMARENQTTQKGQKNSRERMKRIEEGIKELGSQILKEHPVENTQLQNEKLYLYYLQNGRDMYVDQELDINRLSDYDVDHIVPQSFLKDDSIDNKVLTRSDKARGKSDNVPSEEVVKKMKNYWRQLLNAKLITQRKFDNLTKAERGGLSELDKAGFIKRQLVETRQITKHVAQILDSRMNTKYDENDKLIREVKVITLKSKLVSDFRKDFQFYKVREINNYHHAHDAYLNAVVGTALIKKYPKLESEFVYGDYKVYDVRKMIAKSEQEIGKATAKYFFYSNIMNFFKTEITLANGEIRKRPLIETNGETGEIVWDKGRDFATVRKVLSMPQVNIVKKTEVQTGGFSKESILPKRNSDKLIARKKDWDPKKYGGFDSPTVAYSVLVVAKVEKGKSKKLKSVKELLGITIMERSSFEKNPIDFLEAKGYKEVKKDLIIKLPKYSLFELENGRKRMLASAGELQKGNELALPSKYVNFLYLASHYEKLKGSPEDNEQKQLFVEQHKHYLDEIIEQISEFSKRVILADANLDKVLSAYNKHRDKPIREQAENIIHLFTLTNLGAPAAFKYFDTTIDRKRYTSTKEVLDATLIHQSITGLYETRIDLSQLGGDGGGGSPAPGGLGIEDEYRLHETSTEPDVSLGSTWLSDFPQAWAETGGMGLAVRQAPLIIPLKATSTPVSIQQYPMSHEARLGIKPHIQRLLDQGILVPCQSPWNTPLLPVKKPGTNDYRPVQDLREVNKRVEDIHPTVPNPYNLLSGLPPSHQWYTVLDLKDAFFCLRLHPTSQPLFAFEWRDPGMGISGQLTWTRLPQGFKNSPTLFNEALHRDLADFRIQHPDLILLQYVDDILLAATSELDCQQGTRALLQTLGDLGYRASAKKAQICQKQVKYLGYLLREGQRWLTEARKETVMGQPVPKTPRQLREFLGKAGFCRLFIPGFAEMAAPLYPLTKPGTLFSWGPDQQKAYQEIKQALLTAPALGLPDLTKPFELFVDEKQGYAKGVLTQKLGPWRRPVAYLSKKLDPVAAGWPPCLRMVAAIAVLTKDAGKLTMGQPLVILAPHAVEALVKQPPDRWLSNARMTHYQAMLLDTDRVQFGPVVALNPATLLPLPEEGAPHDCLEILAETHGTRPDLTDQPIPDADHTWYTDGSSFLQEGQRKAGAAVTTETEVIWAGALPAGTSAQRAELIALTQALKMAEGKRLNVYTDSRYAFATAHIHGEIYRRRGWLTSEGREIKNKSEILALLKALFLPKRLSIIHCLGHQKGDSAEARGNRLADQAAREAAIKTPPDTSTLLIAGKRTADGSEFEKRTADGSEFESPKKKAKVE

SEQ ID NO: 2137 - protein, 2097 aa, synthetic construct
MPAAKRVKLDGGDKKYSIGLDIGTNSVGWAVITDEYKVPSKKFKVLGNTDRHSIKKNLIGALLFDSGETAEATRLKRTARRRYTRRKNRICYLQEIFSNEMAKVDDSFFHRLEESFLVEEDKKHERHPIFGNIVDEVAYHEKYPTIYHLRKKLVDSTDKADLRLIYLALAHMIKFRGHFLIEGDLNPDNSDVDKLFIQLVQTYNQLFEENPINASGVDAKAILSARLSKSRRLENLIAQLPGEKKNGLFGNLIALSLGLTPNFKSNFDLAEDAKLQLSKDTYDDDLDNLLAQIGDQYADLFLAAKNLSDAILLSDILRVNTEITKAPLSASMIKRYDEHHQDLTLLKALVRQQLPEKYKEIFFDQSKNGYAGYIDGGASQEEFYKFIKPILEKMDGTEELLVKLNREDLLRKQRTFDNGSIPHQIHLGELHAILRRQEDFYPFLKDNREKIEKILTFRIPYYVGPLARGNSRFAWMTRKSEETITPWNFEEVVDKGASAQSFIERMTNFDKNLPNEKVLPKHSLLYEYFTVYNELTKVKYVTEGMRKPAFLSGEQKKAIVDLLFKTNRKVTVKQLKEDYFKKIECFDSVEISGVEDRFNASLGTYHDLLKIIKDKDFLDNEENEDILEDIVLTLTLFEDREMIEERLKTYAHLFDDKVMKQLKRRRYTGWGRLSRKLINGIRDKQSGKTILDFLKSDGFANRNFMQLIHDDSLTFKEDIQKAQVSGQGDSLHEHIANLAGSPAIKKGILQTVKVVDELVKVMGRHKPENIVIEMARENQTTQKGQKNSRERMKRIEEGIKELGSQILKEHPVENTQLQNEKLYLYYLQNGRDMYVDQELDINRLSDYDVDHIVPQSFLKDDSIDNKVLTRSDKARGKSDNVPSEEVVKKMKNYWRQLLNAKLITQRKFDNLTKAERGGLSELDKAGFIKRQLVETRQITKHVAQILDSRMNTKYDENDKLIREVKVITLKSKLVSDFRKDFQFYKVREINNYHHAHDAYLNAVVGTALIKKYPKLESEFVYGDYKVYDVRKMIAKSEQEIGKATAKYFFYSNIMNFFKTEITLANGEIRKRPLIETNGETGEIVWDKGRDFATVRKVLSMPQVNIVKKTEVQTGGFSKESILPKRNSDKLIARKKDWDPKKYGGFDSPTVAYSVLVVAKVEKGKSKKLKSVKELLGITIMERSSFEKNPIDFLEAKGYKEVKKDLIIKLPKYSLFELENGRKRMLASAGELQKGNELALPSKYVNFLYLASHYEKLKGSPEDNEQKQLFVEQHKHYLDEIIEQISEFSKRVILADANLDKVLSAYNKHRDKPIREQAENIIHLFTLTNLGAPAAFKYFDTTIDRKRYTSTKEVLDATLIHQSITGLYETRIDLSQLGGDGGGGSGGSGGSGGSGGLGIEDEYRLHETSTEPDVSLGSTWLSDFPQAWAETGGMGLAVRQAPLIIPLKATSTPVSIQQYPMSHEARLGIKPHIQRLLDQGILVPCQSPWNTPLLPVKKPGTNDYRPVQDLREVNKRVEDIHPTVPNPYNLLSGLPPSHQWYTVLDLKDAFFCLRLHPTSQPLFAFEWRDPGMGISGQLTWTRLPQGFKNSPTLFNEALHRDLADFRIQHPDLILLQYVDDILLAATSELDCQQGTRALLQTLGDLGYRASAKKAQICQKQVKYLGYLLREGQRWLTEARKETVMGQPVPKTPRQLREFLGKAGFCRLFIPGFAEMAAPLYPLTKPGTLFSWGPDQQKAYQEIKQALLTAPALGLPDLTKPFELFVDEKQGYAKGVLTQKLGPWRRPVAYLSKKLDPVAAGWPPCLRMVAAIAVLTKDAGKLTMGQPLVILAPHAVEALVKQPPDRWLSNARMTHYQAMLLDTDRVQFGPVVALNPATLLPLPEEGAPHDCLEILAETHGTRPDLTDQPIPDADHTWYTDGSSFLQEGQRKAGAAVTTETEVIWAGALPAGTSAQRAELIALTQALKMAEGKRLNVYTDSRYAFATAHIHGEIYRRRGWLTSEGREIKNKSEILALLKALFLPKRLSIIHCLGHQKGDSAEARGNRLADQAAREAAIKTPPDTSTLLIAGKRTADGSEFEKRTADGSEFESPKKKAKVE

SEQ ID NO: 2138 - protein, 2094 aa, synthetic construct; identical to SEQ ID NO: 2061

SEQ ID NO: 2139 - protein, 2096 aa, synthetic construct
MPAAKRVKLDGGDKKYSIGLDIGTNSVGWAVITDEYKVPSKKFKVLGNTDRHSIKKNLIGALLFDSGETAEATRLKRTARRRYTRRKNRICYLQEIFSNEMAKVDDSFFHRLEESFLVEEDKKHERHPIFGNIVDEVAYHEKYPTIYHLRKKLVDSTDKADLRLIYLALAHMIKFRGHFLIEGDLNPDNSDVDKLFIQLVQTYNQLFEENPINASGVDAKAILSARLSKSRRLENLIAQLPGEKKNGLFGNLIALSLGLTPNFKSNFDLAEDAKLQLSKDTYDDDLDNLLAQIGDQYADLFLAAKNLSDAILLSDILRVNTEITKAPLSASMIKRYDEHHQDLTLLKALVRQQLPEKYKEIFFDQSKNGYAGYIDGGASQEEFYKFIKPILEKMDGTEELLVKLNREDLLRKQRTFDNGSIPHQIHLGELHAILRRQEDFYPFLKDNREKIEKILTFRIPYYVGPLARGNSRFAWMTRKSEETITPWNFEEVVDKGASAQSFIERMTNFDKNLPNEKVLPKHSLLYEYFTVYNELTKVKYVTEGMRKPAFLSGEQKKAIVDLLFKTNRKVTVKQLKEDYFKKIECFDSVEISGVEDRFNASLGTYHDLLKIIKDKDFLDNEENEDILEDIVLTLTLFEDREMIEERLKTYAHLFDDKVMKQLKRRRYTGWGRLSRKLINGIRDKQSGKTILDFLKSDGFANRNFMQLIHDDSLTFKEDIQKAQVSGQGDSLHEHIANLAGSPAIKKGILQTVKVVDELVKVMGRHKPENIVIEMARENQTTQKGQKNSRERMKRIEEGIKELGSQILKEHPVENTQLQNEKLYLYYLQNGRDMYVDQELDINRLSDYDVDHIVPQSFLKDDSIDNKVLTRSDKARGKSDNVPSEEVVKKMKNYWRQLLNAKLITQRKFDNLTKAERGGLSELDKAGFIKRQLVETRQITKHVAQILDSRMNTKYDENDKLIREVKVITLKSKLVSDFRKDFQFYKVREINNYHHAHDAYLNAVVGTALIKKYPKLESEFVYGDYKVYDVRKMIAKSEQEIGKATAKYFFYSNIMNFFKTEITLANGEIRKRPLIETNGETGEIVWDKGRDFATVRKVLSMPQVNIVKKTEVQTGGFSKESILPKRNSDKLIARKKDWDPKKYGGFDSPTVAYSVLVVAKVEKGKSKKLKSVKELLGITIMERSSFEKNPIDFLEAKGYKEVKKDLIIKLPKYSLFELENGRKRMLASAGELQKGNELALPSKYVNFLYLASHYEKLKGSPEDNEQKQLFVEQHKHYLDEIIEQISEFSKRVILADANLDKVLSAYNKHRDKPIREQAENIIHLFTLTNLGAPAAFKYFDTTIDRKRYTSTKEVLDATLIHQSITGLYETRIDLSQLGGDGGGGSPAPEAAAKGGLGIEDEYRLHETSTEPDVSLGSTWLSDFPQAWAETGGMGLAVRQAPLIIPLKATSTPVSIQQYPMSHEARLGIKPHIQRLLDQGILVPCQSPWNTPLLPVKKPGTNDYRPVQDLREVNKRVEDIHPTVPNPYNLLSGLPPSHQWYTVLDLKDAFFCLRLHPTSQPLFAFEWRDPGMGISGQLTWTRLPQGFKNSPTLFNEALHRDLADFRIQHPDLILLQYVDDILLAATSELDCQQGTRALLQTLGDLGYRASAKKAQICQKQVKYLGYLLREGQRWLTEARKETVMGQPVPKTPRQLREFLGKAGFCRLFIPGFAEMAAPLYPLTKPGTLFSWGPDQQKAYQEIKQALLTAPALGLPDLTKPFELFVDEKQGYAKGVLTQKLGPWRRPVAYLSKKLDPVAAGWPPCLRMVAAIAVLTKDAGKLTMGQPLVILAPHAVEALVKQPPDRWLSNARMTHYQAMLLDTDRVQFGPVVALNPATLLPLPEEGAPHDCLEILAETHGTRPDLTDQPIPDADHTWYTDGSSFLQEGQRKAGAAVTTETEVIWAGALPAGTSAQRAELIALTQALKMAEGKRLNVYTDSRYAFATAHIHGEIYRRRGWLTSEGREIKNKSEILALLKALFLPKRLSIIHCLGHQKGDSAEARGNRLADQAAREAAIKTPPDTSTLLIAGKRTADGSEFEKRTADGSEFESPKKKAKVE

SEQ ID NO: 2140 - protein, 2103 aa, synthetic construct
MPAAKRVKLDGGDKKYSIGLDIGTNSVGWAVITDEYKVPSKKFKVLGNTDRHSIKKNLIGALLFDSGETAEATRLKRTARRRYTRRKNRICYLQEIFSNEMAKVDDSFFHRLEESFLVEEDKKHERHPIFGNIVDEVAYHEKYPTIYHLRKKLVDSTDKADLRLIYLALAHMIKFRGHFLIEGDLNPDNSDVDKLFIQLVQTYNQLFEENPINASGVDAKAILSARLSKSRRLENLIAQLPGEKKNGLFGNLIALSLGLTPNFKSNFDLAEDAKLQLSKDTYDDDLDNLLAQIGDQYADLFLAAKNLSDAILLSDILRVNTEITKAPLSASMIKRYDEHHQDLTLLKALVRQQLPEKYKEIFFDQSKNGYAGYIDGGASQEEFYKFIKPILEKMDGTEELLVKLNREDLLRKQRTFDNGSIPHQIHLGELHAILRRQEDFYPFLKDNREKIEKILTFRIPYYVGPLARGNSRFAWMTRKSEETITPWNFEEVVDKGASAQSFIERMTNFDKNLPNEKVLPKHSLLYEYFTVYNELTKVKYVTEGMRKPAFLSGEQKKAIVDLLFKTNRKVTVKQLKEDYFKKIECFDSVEISGVEDRFNASLGTYHDLLKIIKDKDFLDNEENEDILEDIVLTLTLFEDREMIEERLKTYAHLFDDKVMKQLKRRRYTGWGRLSRKLINGIRDKQSGKTILDFLKSDGFANRNFMQLIHDDSLTFKEDIQKAQVSGQGDSLHEHIANLAGSPAIKKGILQTVKVVDELVKVMGRHKPENIVIEMARENQTTQKGQKNSRERMKRIEEGIKELGSQILKEHPVENTQLQNEKLYLYYLQNGRDMYVDQELDINRLSDYDVDHIVPQSFLKDDSIDNKVLTRSDKARGKSDNVPSEEVVKKMKNYWRQLLNAKLITQRKFDNLTKAERGGLSELDKAGFIKRQLVETRQITKHVAQILDSRMNTKYDENDKLIREVKVITLKSKLVSDFRKDFQFYKVREINNYHHAHDAYLNAVVGTALIKKYPKLESEFVYGDYKVYDVRKMIAKSEQEIGKATAKYFFYSNIMNFFKTEITLANGEIRKRPLIETNGETGEIVWDKGRDFATVRKVLSMPQVNIVKKTEVQTGGFSKESILPKRNSDKLIARKKDWDPKKYGGFDSPTVAYSVLVVAKVEKGKSKKLKSVKELLGITIMERSSFEKNPIDFLEAKGYKEVKKDLIIKLPKYSLFELENGRKRMLASAGELQKGNELALPSKYVNFLYLASHYEKLKGSPEDNEQKQLFVEQHKHYLDEIIEQISEFSKRVILADANLDKVLSAYNKHRDKPIREQAENIIHLFTLTNLGAPAAFKYFDTTIDRKRYTSTKEVLDATLIHQSITGLYETRIDLSQLGGDGGGSSGSSGSSGSSGSSGSSGGLGIEDEYRLHETSTEPDVSLGSTWLSDFPQAWAETGGMGLAVRQAPLIIPLKATSTPVSIQQYPMSHEARLGIKPHIQRLLDQGILVPCQSPWNTPLLPVKKPGTNDYRPVQDLREVNKRVEDIHPTVPNPYNLLSGLPPSHQWYTVLDLKDAFFCLRLHPTSQPLFAFEWRDPGMGISGQLTWTRLPQGFKNSPTLFNEALHRDLADFRIQHPDLILLQYVDDILLAATSELDCQQGTRALLQTLGDLGYRASAKKAQICQKQVKYLGYLLREGQRWLTEARKETVMGQPVPKTPRQLREFLGKAGFCRLFIPGFAEMAAPLYPLTKPGTLFSWGPDQQKAYQEIKQALLTAPALGLPDLTKPFELFVDEKQGYAKGVLTQKLGPWRRPVAYLSKKLDPVAAGWPPCLRMVAAIAVLTKDAGKLTMGQPLVILAPHAVEALVKQPPDRWLSNARMTHYQAMLLDTDRVQFGPVVALNPATLLPLPEEGAPHDCLEILAETHGTRPDLTDQPIPDADHTWYTDGSSFLQEGQRKAGAAVTTETEVIWAGALPAGTSAQRAELIALTQALKMAEGKRLNVYTDSRYAFATAHIHGEIYRRRGWLTSEGREIKNKSEILALLKALFLPKRLSIIHCLGHQKGDSAEARGNRLADQAAREAAIKTPPDTSTLLIAGKRTADGSEFEKRTADGSEFESPKKKAKVE

SEQ ID NO: 2141 - protein, 2096 aa, synthetic construct
MPAAKRVKLDGGDKKYSIGLDIGTNSVGWAVITDEYKVPSKKFKVLGNTDRHSIKKNLIGALLFDSGETAEATRLKRTARRRYTRRKNRICYLQEIFSNEMAKVDDSFFHRLEESFLVEEDKKHERHPIFGNIVDEVAYHEKYPTIYHLRKKLVDSTDKADLRLIYLALAHMIKFRGHFLIEGDLNPDNSDVDKLFIQLVQTYNQLFEENPINASGVDAKAILSARLSKSRRLENLIAQLPGEKKNGLFGNLIALSLGLTPNFKSNFDLAEDAKLQLSKDTYDDDLDNLLAQIGDQYADLFLAAKNLSDAILLSDILRVNTEITKAPLSASMIKRYDEHHQDLTLLKALVRQQLPEKYKEIFFDQSKNGYAGYIDGGASQEEFYKFIKPILEKMDGTEELLVKLNREDLLRKQRTFDNGSIPHQIHLGELHAILRRQEDFYPFLKDNREKIEKILTFRIPYYVGPLARGNSRFAWMTRKSEETITPWNFEEVVDKGASAQSFIERMTNFDKNLPNEKVLPKHSLLYEYFTVYNELTKVKYVTEGMRKPAFLSGEQKKAIVDLLFKTNRKVTVKQLKEDYFKKIECFDSVEISGVEDRFNASLGTYHDLLKIIKDKDFLDNEENEDILEDIVLTLTLFEDREMIEERLKTYAHLFDDKVMKQLKRRRYTGWGRLSRKLINGIRDKQSGKTILDFLKSDGFANRNFMQLIHDDSLTFKEDIQKAQVSGQGDSLHEHIANLAGSPAIKKGILQTVKVVDELVKVMGRHKPENIVIEMARENQTTQKGQKNSRERMKRIEEGIKELGSQILKEHPVENTQLQNEKLYLYYLQNGRDMYVDQELDINRLSDYDVDHIVPQSFLKDDSIDNKVLTRSDKARGKSDNVPSEEVVKKMKNYWRQLLNAKLITQRKFDNLTKAERGGLSELDKAGFIKRQLVETRQITKHVAQILDSRMNTKYDENDKLIREVKVITLKSKLVSDFRKDFQFYKVREINNYHHAHDAYLNAVVGTALIKKYPKLESEFVYGDYKVYDVRKMIAKSEQEIGKATAKYFFYSNIMNFFKTEITLANGEIRKRPLIETNGETGEIVWDKGRDFATVRKVLSMPQVNIVKKTEVQTGGFSKESILPKRNSDKLIARKKDWDPKKYGGFDSPTVAYSVLVVAKVEKGKSKKLKSVKELLGITIMERSSFEKNPIDFLEAKGYKEVKKDLIIKLPKYSLFELENGRKRMLASAGELQKGNELALPSKYVNFLYLASHYEKLKGSPEDNEQKQLFVEQHKHYLDEIIEQISEFSKRVILADANLDKVLSAYNKHRDKPIREQAENIIHLFTLTNLGAPAAFKYFDTTIDRKRYTSTKEVLDATLIHQSITGLYETRIDLSQLGGDGGEAAAKGSSGGGGGLGIEDEYRLHETSTEPDVSLGSTWLSDFPQAWAETGGMGLAVRQAPLIIPLKATSTPVSIQQYPMSHEARLGIKPHIQRLLDQGILVPCQSPWNTPLLPVKKPGTNDYRPVQDLREVNKRVEDIHPTVPNPYNLLSGLPPSHQWYTVLDLKDAFFCLRLHPTSQPLFAFEWRDPGMGISGQLTWTRLPQGFKNSPTLFNEALHRDLADFRIQHPDLILLQYVDDILLAATSELDCQQGTRALLQTLGDLGYRASAKKAQICQKQVKYLGYLLREGQRWLTEARKETVMGQPVPKTPRQLREFLGKAGFCRLFIPGFAEMAAPLYPLTKPGTLFSWGPDQQKAYQEIKQALLTAPALGLPDLTKPFELFVDEKQGYAKGVLTQKLGPWRRPVAYLSKKLDPVAAGWPPCLRMVAAIAVLTKDAGKLTMGQPLVILAPHAVEALVKQPPDRWLSNARMTHYQAMLLDTDRVQFGPVVALNPATLLPLPEEGAPHDCLEILAETHGTRPDLTDQPIPDADHTWYTDGSSFLQEGQRKAGAAVTTETEVIWAGALPAGTSAQRAELIALTQALKMAEGKRLNVYTDSRYAFATAHIHGEIYRRRGWLTSEGREIKNKSEILALLKALFLPKRLSIIHCLGHQKGDSAEARGNRLADQAAREAAIKTPPDTSTLLIAGKRTADGSEFEKRTADGSEFESPKKKAKVE

SEQ ID NO: 2142 - protein, 2094 aa, synthetic construct
MPAAKRVKLDGGDKKYSIGLDIGTNSVGWAVITDEYKVPSKKFKVLGNTDRHSIKKNLIGALLFDSGETAEATRLKRTARRRYTRRKNRICYLQEIFSNEMAKVDDSFFHRLEESFLVEEDKKHERHPIFGNIVDEVAYHEKYPTIYHLRKKLVDSTDKADLRLIYLALAHMIKFRGHFLIEGDLNPDNSDVDKLFIQLVQTYNQLFEENPINASGVDAKAILSARLSKSRRLENLIAQLPGEKKNGLFGNLIALSLGLTPNFKSNFDLAEDAKLQLSKDTYDDDLDNLLAQIGDQYADLFLAAKNLSDAILLSDILRVNTEITKAPLSASMIKRYDEHHQDLTLLKALVRQQLPEKYKEIFFDQSKNGYAGYIDGGASQEEFYKFIKPILEKMDGTEELLVKLNREDLLRKQRTFDNGSIPHQIHLGELHAILRRQEDFYPFLKDNREKIEKILTFRIPYYVGPLARGNSRFAWMTRKSEETITPWNFEEVVDKGASAQSFIERMTNFDKNLPNEKVLPKHSLLYEYFTVYNELTKVKYVTEGMRKPAFLSGEQKKAIVDLLFKTNRKVTVKQLKEDYFKKIECFDSVEISGVEDRFNASLGTYHDLLKIIKDKDFLDNEENEDILEDIVLTLTLFEDREMIEERLKTYAHLFDDKVMKQLKRRRYTGWGRLSRKLINGIRDKQSGKTILDFLKSDGFANRNFMQLIHDDSLTFKEDIQKAQVSGQGDSLHEHIANLAGSPAIKKGILQTVKVVDELVKVMGRHKPENIVIEMARENQTTQKGQKNSRERMKRIEEGIKELGSQILKEHPVENTQLQNEKLYLYYLQNGRDMYVDQELDINRLSDYDVDHIVPQSFLKDDSIDNKVLTRSDKARGKSDNVPSEEVVKKMKNYWRQLLNAKLITQRKFDNLTKAERGGLSELDKAGFIKRQLVETRQITKHVAQILDSRMNTKYDENDKLIREVKVITLKSKLVSDFRKDFQFYKVREINNYHHAHDAYLNAVVGTALIKKYPKLESEFVYGDYKVYDVRKMIAKSEQEIGKATAKYFFYSNIMNFFKTEITLANGEIRKRPLIETNGETGEIVWDKGRDFATVRKVLSMPQVNIVKKTEVQTGGFSKESILPKRNSDKLIARKKDWDPKKYGGFDSPTVAYSVLVVAKVEKGKSKKLKSVKELLGITIMERSSFEKNPIDFLEAKGYKEVKKDLIIKLPKYSLFELENGRKRMLASAGELQKGNELALPSKYVNFLYLASHYEKLKGSPEDNEQKQLFVEQHKHYLDEIIEQISEFSKRVILADANLDKVLSAYNKHRDKPIREQAENIIHLFTLTNLGAPAAFKYFDTTIDRKRYTSTKEVLDATLIHQSITGLYETRIDLSQLGGDGGGSSGSSGSSGGLGIEDEYRLHETSTEPDVSLGSTWLSDFPQAWAETGGMGLAVRQAPLIIPLKATSTPVSIQQYPMSHEARLGIKPHIQRLLDQGILVPCQSPWNTPLLPVKKPGTNDYRPVQDLREVNKRVEDIHPTVPNPYNLLSGLPPSHQWYTVLDLKDAFFCLRLHPTSQPLFAFEWRDPGMGISGQLTWTRLPQGFKNSPTLFNEALHRDLADFRIQHPDLILLQYVDDILLAATSELDCQQGTRALLQTLGDLGYRASAKKAQICQKQVKYLGYLLREGQRWLTEARKETVMGQPVPKTPRQLREFLGKAGFCRLFIPGFAEMAAPLYPLTKPGTLFSWGPDQQKAYQEIKQALLTAPALGLPDLTKPFELFVDEKQGYAKGVLTQKLGPWRRPVAYLSKKLDPVAAGWPPCLRMVAAIAVLTKDAGKLTMGQPLVILAPHAVEALVKQPPDRWLSNARMTHYQAMLLDTDRVQFGPVVALNPATLLPLPEEGAPHDCLEILAETHGTRPDLTDQPIPDADHTWYTDGSSFLQEGQRKAGAAVTTETEVIWAGALPAGTSAQRAELIALTQALKMAEGKRLNVYTDSRYAFATAHIHGEIYRRRGWLTSEGREIKNKSEILALLKALFLPKRLSIIHCLGHQKGDSAEARGNRLADQAAREAAIKTPPDTSTLLIAGKRTADGSEFEKRTADGSEFESPKKKAKVE

SEQ ID NO: 2143 - protein, 2094 aa, synthetic construct
MPAAKRVKLDGGDKKYSIGLDIGTNSVGWAVITDEYKVPSKKFKVLGNTDRHSIKKNLIGALLFDSGETAEATRLKRTARRRYTRRKNRICYLQEIFSNEMAKVDDSFFHRLEESFLVEEDKKHERHPIFGNIVDEVAYHEKYPTIYHLRKKLVDSTDKADLRLIYLALAHMIKFRGHFLIEGDLNPDNSDVDKLFIQLVQTYNQLFEENPINASGVDAKAILSARLSKSRRLENLIAQLPGEKKNGLFGNLIALSLGLTPNFKSNFDLAEDAKLQLSKDTYDDDLDNLLAQIGDQYADLFLAAKNLSDAILLSDILRVNTEITKAPLSASMIKRYDEHHQDLTLLKALVRQQLPEKYKEIFFDQSKNGYAGYIDGGASQEEFYKFIKPILEKMDGTEELLVKLNREDLLRKQRTFDNGSIPHQIHLGELHAILRRQEDFYPFLKDNREKIEKILTFRIPYYVGPLARGNSRFAWMTRKSEETITPWNFEEVVDKGASAQSFIERMTNFDKNLPNEKVLPKHSLLYEYFTVYNELTKVKYVTEGMRKPAFLSGEQKKAIVDLLFKTNRKVTVKQLKEDYFKKIECFDSVEISGVEDRFNASLGTYHDLLKIIKDKDFLDNEENEDILEDIVLTLTLFEDREMIEERLKTYAHLFDDKVMKQLKRRRYTGWGRLSRKLINGIRDKQSGKTILDFLKSDGFANRNFMQLIHDDSLTFKEDIQKAQVSGQGDSLHEHIANLAGSPAIKKGILQTVKVVDELVKVMGRHKPENIVIEMARENQTTQKGQKNSRERMKRIEEGIKELGSQILKEHPVENTQLQNEKLYLYYLQNGRDMYVDQELDINRLSDYDVDHIVPQSFLKDDSIDNKVLTRSDKARGKSDNVPSEEVVKKMKNYWRQLLNAKLITQRKFDNLTKAERGGLSELDKAGFIKRQLVETRQITKHVAQILDSRMNTKYDENDKLIREVKVITLKSKLVSDFRKDFQFYKVREINNYHHAHDAYLNAVVGTALIKKYPKLESEFVYGDYKVYDVRKMIAKSEQEIGKATAKYFFYSNIMNFFKTEITLANGEIRKRPLIETNGETGEIVWDKGRDFATVRKVLSMPQVNIVKKTEVQTGGFSKESILPKRNSDKLIARKKDWDPKKYGGFDSPTVAYSVLVVAKVEKGKSKKLKSVKELLGITIMERSSFEKNPIDFLEAKGYKEVKKDLIIKLPKYSLFELENGRKRMLASAGELQKGNELALPSKYVNFLYLASHYEKLKGSPEDNEQKQLFVEQHKHYLDEIIEQISEFSKRVILADANLDKVLSAYNKHRDKPIREQAENIIHLFTLTNLGAPAAFKYFDTTIDRKRYTSTKEVLDATLIHQSITGLYETRIDLSQLGGDGGGSSGGSPAPGGLGIEDEYRLHETSTEPDVSLGSTWLSDFPQAWAETGGMGLAVRQAPLIIPLKATSTPVSIQQYPMSHEARLGIKPHIQRLLDQGILVPCQSPWNTPLLPVKKPGTNDYRPVQDLREVNKRVEDIHPTVPNPYNLLSGLPPSHQWYTVLDLKDAFFCLRLHPTSQPLFAFEWRDPGMGISGQLTWTRLPQGFKNSPTLFNEALHRDLADFRIQHPDLILLQYVDDILLAATSELDCQQGTRALLQTLGDLGYRASAKKAQICQKQVKYLGYLLREGQRWLTEARKETVMGQPVPKTPRQLREFLGKAGFCRLFIPGFAEMAAPLYPLTKPGTLFSWGPDQQKAYQEIKQALLTAPALGLPDLTKPFELFVDEKQGYAKGVLTQKLGPWRRPVAYLSKKLDPVAAGWPPCLRMVAAIAVLTKDAGKLTMGQPLVILAPHAVEALVKQPPDRWLSNARMTHYQAMLLDTDRVQFGPVVALNPATLLPLPEEGAPHDCLEILAETHGTRPDLTDQPIPDADHTWYTDGSSFLQEGQRKAGAAVTTETEVIWAGALPAGTSAQRAELIALTQALKMAEGKRLNVYTDSRYAFATAHIHGEIYRRRGWLTSEGREIKNKSEILALLKALFLPKRLSIIHCLGHQKGDSAEARGNRLADQAAREAAIKTPPDTSTLLIAGKRTADGSEFEKRTADGSEFESPKKKAKVE

SEQ ID NO: 2144 - protein, 2090 aa, synthetic construct
MPAAKRVKLDGGDKKYSIGLDIGTNSVGWAVITDEYKVPSKKFKVLGNTDRHSIKKNLIGALLFDSGETAEATRLKRTARRRYTRRKNRICYLQEIFSNEMAKVDDSFFHRLEESFLVEEDKKHERHPIFGNIVDEVAYHEKYPTIYHLRKKLVDSTDKADLRLIYLALAHMIKFRGHFLIEGDLNPDNSDVDKLFIQLVQTYNQLFEENPINASGVDAKAILSARLSKSRRLENLIAQLPGEKKNGLFGNLIALSLGLTPNFKSNFDLAEDAKLQLSKDTYDDDLDNLLAQIGDQYADLFLAAKNLSDAILLSDILRVNTEITKAPLSASMIKRYDEHHQDLTLLKALVRQQLPEKYKEIFFDQSKNGYAGYIDGGASQEEFYKFIKPILEKMDGTEELLVKLNREDLLRKQRTFDNGSIPHQIHLGELHAILRRQEDFYPFLKDNREKIEKILTFRIPYYVGPLARGNSRFAWMTRKSEETITPWNFEEVVDKGASAQSFIERMTNFDKNLPNEKVLPKHSLLYEYFTVYNELTKVKYVTEGMRKPAFLSGEQKKAIVDLLFKTNRKVTVKQLKEDYFKKIECFDSVEISGVEDRFNASLGTYHDLLKIIKDKDFLDNEENEDILEDIVLTLTLFEDREMIEERLKTYAHLFDDKVMKQLKRRRYTGWGRLSRKLINGIRDKQSGKTILDFLKSDGFANRNFMQLIHDDSLTFKEDIQKAQVSGQGDSLHEHIANLAGSPAIKKGILQTVKVVDELVKVMGRHKPENIVIEMARENQTTQKGQKNSRERMKRIEEGIKELGSQILKEHPVENTQLQNEKLYLYYLQNGRDMYVDQELDINRLSDYDVDHIVPQSFLKDDSIDNKVLTRSDKARGKSDNVPSEEVVKKMKNYWRQLLNAKLITQRKFDNLTKAERGGLSELDKAGFIKRQLVETRQITKHVAQILDSRMNTKYDENDKLIREVKVITLKSKLVSDFRKDFQFYKVREINNYHHAHDAYLNAVVGTALIKKYPKLESEFVYGDYKVYDVRKMIAKSEQEIGKATAKYFFYSNIMNFFKTEITLANGEIRKRPLIETNGETGEIVWDKGRDFATVRKVLSMPQVNIVKKTEVQTGGFSKESILPKRNSDKLIARKKDWDPKKYGGFDSPTVAYSVLVVAKVEKGKSKKLKSVKELLGITIMERSSFEKNPIDFLEAKGYKEVKKDLIIKLPKYSLFELENGRKRMLASAGELQKGNELALPSKYVNFLYLASHYEKLKGSPEDNEQKQLFVEQHKHYLDEIIEQISEFSKRVILADANLDKVLSAYNKHRDKPIREQAENIIHLFTLTNLGAPAAFKYFDTTIDRKRYTSTKEVLDATLIHQSITGLYETRIDLSQLGGDGGPAPAPGGLGIEDEYRLHETSTEPDVSLGSTWLSDFPQAWAETGGMGLAVRQAPLIIPLKATSTPVSIQQYPMSHEARLGIKPHIQRLLDQGILVPCQSPWNTPLLPVKKPGTNDYRPVQDLREVNKRVEDIHPTVPNPYNLLSGLPPSHQWYTVLDLKDAFFCLRLHPTSQPLFAFEWRDPGMGISGQLTWTRLPQGFKNSPTLFNEALHRDLADFRIQHPDLILLQYVDDILLAATSELDCQQGTRALLQTLGDLGYRASAKKAQICQKQVKYLGYLLREGQRWLTEARKETVMGQPVPKTPRQLREFLGKAGFCRLFIPGFAEMAAPLYPLTKPGTLFSWGPDQQKAYQEIKQALLTAPALGLPDLTKPFELFVDEKQGYAKGVLTQKLGPWRRPVAYLSKKLDPVAAGWPPCLRMVAAIAVLTKDAGKLTMGQPLVILAPHAVEALVKQPPDRWLSNARMTHYQAMLLDTDRVQFGPVVALNPATLLPLPEEGAPHDCLEILAETHGTRPDLTDQPIPDADHTWYTDGSSFLQEGQRKAGAAVTTETEVIWAGALPAGTSAQRAELIALTQALKMAEGKRLNVYTDSRYAFATAHIHGEIYRRRGWLTSEGREIKNKSEILALLKALFLPKRLSIIHCLGHQKGDSAEARGNRLADQAAREAAIKTPPDTSTLLIAGKRTADGSEFEKRTADGSEFESPKKKAKVE

SEQ ID NO: 2145 - protein, 2096 aa, synthetic construct
MPAAKRVKLDGGDKKYSIGLDIGTNSVGWAVITDEYKVPSKKFKVLGNTDRHSIKKNLIGALLFDSGETAEATRLKRTARRRYTRRKNRICYLQEIFSNEMAKVDDSFFHRLEESFLVEEDKKHERHPIFGNIVDEVAYHEKYPTIYHLRKKLVDSTDKADLRLIYLALAHMIKFRGHFLIEGDLNPDNSDVDKLFIQLVQTYNQLFEENPINASGVDAKAILSARLSKSRRLENLIAQLPGEKKNGLFGNLIALSLGLTPNFKSNFDLAEDAKLQLSKDTYDDDLDNLLAQIGDQYADLFLAAKNLSDAILLSDILRVNTEITKAPLSASMIKRYDEHHQDLTLLKALVRQQLPEKYKEIFFDQSKNGYAGYIDGGASQEEFYKFIKPILEKMDGTEELLVKLNREDLLRKQRTFDNGSIPHQIHLGELHAILRRQEDFYPFLKDNREKIEKILTFRIPYYVGPLARGNSRFAWMTRKSEETITPWNFEEVVDKGASAQSFIERMTNFDKNLPNEKVLPKHSLLYEYFTVYNELTKVKYVTEGMRKPAFLSGEQKKAIVDLLFKTNRKVTVKQLKEDYFKKIECFDSVEISGVEDRFNASLGTYHDLLKIIKDKDFLDNEENEDILEDIVLTLTLFEDREMIEERLKTYAHLFDDKVMKQLKRRRYTGWGRLSRKLINGIRDKQSGKTILDFLKSDGFANRNFMQLIHDDSLTFKEDIQKAQVSGQGDSLHEHIANLAGSPAIKKGILQTVKVVDELVKVMGRHKPENIVIEMARENQTTQKGQKNSRERMKRIEEGIKELGSQILKEHPVENTQLQNEKLYLYYLQNGRDMYVDQELDINRLSDYDVDHIVPQSFLKDDSIDNKVLTRSDKARGKSDNVPSEEVVKKMKNYWRQLLNAKLITQRKFDNLTKAERGGLSELDKAGFIKRQLVETRQITKHVAQILDSRMNTKYDENDKLIREVKVITLKSKLVSDFRKDFQFYKVREINNYHHAHDAYLNAVVGTALIKKYPKLESEFVYGDYKVYDVRKMIAKSEQEIGKATAKYFFYSNIMNFFKTEITLANGEIRKRPLIETNGETGEIVWDKGRDFATVRKVLSMPQVNIVKKTEVQTGGFSKESILPKRNSDKLIARKKDWDPKKYGGFDSPTVAYSVLVVAKVEKGKSKKLKSVKELLGITIMERSSFEKNPIDFLEAKGYKEVKKDLIIKLPKYSLFELENGRKRMLASAGELQKGNELALPSKYVNFLYLASHYEKLKGSPEDNEQKQLFVEQHKHYLDEIIEQISEFSKRVILADANLDKVLSAYNKHRDKPIREQAENIIHLFTLTNLGAPAAFKYFDTTIDRKRYTSTKEVLDATLIHQSITGLYETRIDLSQLGGDGGGGGGSSEAAAKGGLGIEDEYRLHETSTEPDVSLGSTWLSDFPQAWAETGGMGLAVRQAPLIIPLKATSTPVSIQQYPMSHEARLGIKPHIQRLLDQGILVPCQSPWNTPLLPVKKPGTNDYRPVQDLREVNKRVEDIHPTVPNPYNLLSGLPPSHQWYTVLDLKDAFFCLRLHPTSQPLFAFEWRDPGMGISGQLTWTRLPQGFKNSPTLFNEALHRDLADFRIQHPDLILLQYVDDILLAATSELDCQQGTRALLQTLGDLGYRASAKKAQICQKQVKYLGYLLREGQRWLTEARKETVMGQPVPKTPRQLREFLGKAGFCRLFIPGFAEMAAPLYPLTKPGTLFSWGPDQQKAYQEIKQALLTAPALGLPDLTKPFELFVDEKQGYAKGVLTQKLGPWRRPVAYLSKKLDPVAAGWPPCLRMVAAIAVLTKDAGKLTMGQPLVILAPHAVEALVKQPPDRWLSNARMTHYQAMLLDTDRVQFGPVVALNPATLLPLPEEGAPHDCLEILAETHGTRPDLTDQPIPDADHTWYTDGSSFLQEGQRKAGAAVTTETEVIWAGALPAGTSAQRAELIALTQALKMAEGKRLNVYTDSRYAFATAHIHGEIYRRRGWLTSEGREIKNKSEILALLKALFLPKRLSIIHCLGHQKGDSAEARGNRLADQAAREAAIKTPPDTSTLLIAGKRTADGSEFEKRTADGSEFESPKKKAKVE

SEQ ID NO: 2146 - protein, 2096 aa, synthetic construct
MPAAKRVKLDGGDKKYSIGLDIGTNSVGWAVITDEYKVPSKKFKVLGNTDRHSIKKNLIGALLFDSGETAEATRLKRTARRRYTRRKNRICYLQEIFSNEMAKVDDSFFHRLEESFLVEEDKKHERHPIFGNIVDEVAYHEKYPTIYHLRKKLVDSTDKADLRLIYLALAHMIKFRGHFLIEGDLNPDNSDVDKLFIQLVQTYNQLFEENPINASGVDAKAILSARLSKSRRLENLIAQLPGEKKNGLFGNLIALSLGLTPNFKSNFDLAEDAKLQLSKDTYDDDLDNLLAQIGDQYADLFLAAKNLSDAILLSDILRVNTEITKAPLSASMIKRYDEHHQDLTLLKALVRQQLPEKYKEIFFDQSKNGYAGYIDGGASQEEFYKFIKPILEKMDGTEELLVKLNREDLLRKQRTFDNGSIPHQIHLGELHAILRRQEDFYPFLKDNREKIEKILTFRIPYYVGPLARGNSRFAWMTRKSEETITPWNFEEVVDKGASAQSFIERMTNFDKNLPNEKVLPKHSLLYEYFTVYNELTKVKYVTEGMRKPAFLSGEQKKAIVDLLFKTNRKVTVKQLKEDYFKKIECFDSVEISGVEDRFNASLGTYHDLLKIIKDKDFLDNEENEDILEDIVLTLTLFEDREMIEERLKTYAHLFDDKVMKQLKRRRYTGWGRLSRKLINGIRDKQSGKTILDFLKSDGFANRNFMQLIHDDSLTFKEDIQKAQVSGQGDSLHEHIANLAGSPAIKKGILQTVKVVDELVKVMGRHKPENIVIEMARENQTTQKGQKNSRERMKRIEEGIKELGSQILKEHPVENTQLQNEKLYLYYLQNGRDMYVDQELDINRLSDYDVDHIVPQSFLKDDSIDNKVLTRSDKARGKSDNVPSEEVVKKMKNYWRQLLNAKLITQRKFDNLTKAERGGLSELDKAGFIKRQLVETRQITKHVAQILDSRMNTKYDENDKLIREVKVITLKSKLVSDFRKDFQFYKVREINNYHHAHDAYLNAVVGTALIKKYPKLESEFVYGDYKVYDVRKMIAKSEQEIGKATAKYFFYSNIMNFFKTEITLANGEIRKRPLIETNGETGEIVWDKGRDFATVRKVLSMPQVNIVKKTEVQTGGFSKESILPKRNSDKLIARKKDWDPKKYGGFDSPTVAYSVLVVAKVEKGKSKKLKSVKELLGITIMERSSFEKNPIDFLEAKGYKEVKKDLIIKLPKYSLFELENGRKRMLASAGELQKGNELALPSKYVNFLYLASHYEKLKGSPEDNEQKQLFVEQHKHYLDEIIEQISEFSKRVILADANLDKVLSAYNKHRDKPIREQAENIIHLFTLTNLGAPAAFKYFDTTIDRKRYTSTKEVLDATLIHQSITGLYETRIDLSQLGGDGGGGSEAAAKPAPGGLGIEDEYRLHETSTEPDVSLGSTWLSDFPQAWAETGGMGLAVRQAPLIIPLKATSTPVSIQQYPMSHEARLGIKPHIQRLLDQGILVPCQSPWNTPLLPVKKPGTNDYRPVQDLREVNKRVEDIHPTVPNPYNLLSGLPPSHQWYTVLDLKDAFFCLRLHPTSQPLFAFEWRDPGMGISGQLTWTRLPQGFKNSPTLFNEALHRDLADFRIQHPDLILLQYVDDILLAATSELDCQQGTRALLQTLGDLGYRASAKKAQICQKQVKYLGYLLREGQRWLTEARKETVMGQPVPKTPRQLREFLGKAGFCRLFIPGFAEMAAPLYPLTKPGTLFSWGPDQQKAYQEIKQALLTAPALGLPDLTKPFELFVDEKQGYAKGVLTQKLGPWRRPVAYLSKKLDPVAAGWPPCLRMVAAIAVLTKDAGKLTMGQPLVILAPHAVEALVKQPPDRWLSNARMTHYQAMLLDTDRVQFGPVVALNPATLLPLPEEGAPHDCLEILAETHGTRPDLTDQPIPDADHTWYTDGSSFLQEGQRKAGAAVTTETEVIWAGALPAGTSAQRAELIALTQALKMAEGKRLNVYTDSRYAFATAHIHGEIYRRRGWLTSEGREIKNKSEILALLKALFLPKRLSIIHCLGHQKGDSAEARGNRLADQAAREAAIKTPPDTSTLLIAGKRTADGSEFEKRTADGSEFESPKKKAKVE

SEQ ID NO: 2147 - protein, 2093 aa, synthetic construct
MPAAKRVKLDGGDKKYSIGLDIGTNSVGWAVITDEYKVPSKKFKVLGNTDRHSIKKNLIGALLFDSGETAEATRLKRTARRRYTRRKNRICYLQEIFSNEMAKVDDSFFHRLEESFLVEEDKKHERHPIFGNIVDEVAYHEKYPTIYHLRKKLVDSTDKADLRLIYLALAHMIKFRGHFLIEGDLNPDNSDVDKLFIQLVQTYNQLFEENPINASGVDAKAILSARLSKSRRLENLIAQLPGEKKNGLFGNLIALSLGLTPNFKSNFDLAEDAKLQLSKDTYDDDLDNLLAQIGDQYADLFLAAKNLSDAILLSDILRVNTEITKAPLSASMIKRYDEHHQDLTLLKALVRQQLPEKYKEIFFDQSKNGYAGYIDGGASQEEFYKFIKPILEKMDGTEELLVKLNREDLLRKQRTFDNGSIPHQIHLGELHAILRRQEDFYPFLKDNREKIEKILTFRIPYYVGPLARGNSRFAWMTRKSEETITPWNFEEVVDKGASAQSFIERMTNFDKNLPNEKVLPKHSLLYEYFTVYNELTKVKYVTEGMRKPAFLSGEQKKAIVDLLFKTNRKVTVKQLKEDYFKKIECFDSVEISGVEDRFNASLGTYHDLLKIIKDKDFLDNEENEDILEDIVLTLTLFEDREMIEERLKTYAHLFDDKVMKQLKRRRYTGWGRLSRKLINGIRDKQSGKTILDFLKSDGFANRNFMQLIHDDSLTFKEDIQKAQVSGQGDSLHEHIANLAGSPAIKKGILQTVKVVDELVKVMGRHKPENIVIEMARENQTTQKGQKNSRERMKRIEEGIKELGSQILKEHPVENTQLQNEKLYLYYLQNGRDMYVDQELDINRLSDYDVDHIVPQSFLKDDSIDNKVLTRSDKARGKSDNVPSEEVVKKMKNYWRQLLNAKLITQRKFDNLTKAERGGLSELDKAGFIKRQLVETRQITKHVAQILDSRMNTKYDENDKLIREVKVITLKSKLVSDFRKDFQFYKVREINNYHHAHDAYLNAVVGTALIKKYPKLESEFVYGDYKVYDVRKMIAKSEQEIGKATAKYFFYSNIMNFFKTEITLANGEIRKRPLIETNGETGEIVWDKGRDFATVRKVLSMPQVNIVKKTEVQTGGFSKESILPKRNSDKLIARKKDWDPKKYGGFDSPTVAYSVLVVAKVEKGKSKKLKSVKELLGITIMERSSFEKNPIDFLEAKGYKEVKKDLIIKLPKYSLFELENGRKRMLASAGELQKGNELALPSKYVNFLYLASHYEKLKGSPEDNEQKQLFVEQHKHYLDEIIEQISEFSKRVILADANLDKVLSAYNKHRDKPIREQAENIIHLFTLTNLGAPAAFKYFDTTIDRKRYTSTKEVLDATLIHQSITGLYETRIDLSQLGGDGGEAAAKPAPGGLGIEDEYRLHETSTEPDVSLGSTWLSDFPQAWAETGGMGLAVRQAPLIIPLKATSTPVSIQQYPMSHEARLGIKPHIQRLLDQGILVPCQSPWNTPLLPVKKPGTNDYRPVQDLREVNKRVEDIHPTVPNPYNLLSGLPPSHQWYTVLDLKDAFFCLRLHPTSQPLFAFEWRDPGMGISGQLTWTRLPQGFKNSPTLFNEALHRDLADFRIQHPDLILLQYVDDILLAATSELDCQQGTRALLQTLGDLGYRASAKKAQICQKQVKYLGYLLREGQRWLTEARKETVMGQPVPKTPRQLREFLGKAGFCRLFIPGFAEMAAPLYPLTKPGTLFSWGPDQQKAYQEIKQALLTAPALGLPDLTKPFELFVDEKQGYAKGVLTQKLGPWRRPVAYLSKKLDPVAAGWPPCLRMVAAIAVLTKDAGKLTMGQPLVILAPHAVEALVKQPPDRWLSNARMTHYQAMLLDTDRVQFGPVVALNPATLLPLPEEGAPHDCLEILAETHGTRPDLTDQPIPDADHTWYTDGSSFLQEGQRKAGAAVTTETEVIWAGALPAGTSAQRAELIALTQALKMAEGKRLNVYTDSRYAFATAHIHGEIYRRRGWLTSEGREIKNKSEILALLKALFLPKRLSIIHCLGHQKGDSAEARGNRLADQAAREAAIKTPPDTSTLLIAGKRTADGSEFEKRTADGSEFESPKKKAKVE

SEQ ID NO: 2148 - protein, 2091 aa, synthetic construct
MPAAKRVKLDGGDKKYSIGLDIGTNSVGWAVITDEYKVPSKKFKVLGNTDRHSIKKNLIGALLFDSGETAEATRLKRTARRRYTRRKNRICYLQEIFSNEMAKVDDSFFHRLEESFLVEEDKKHERHPIFGNIVDEVAYHEKYPTIYHLRKKLVDSTDKADLRLIYLALAHMIKFRGHFLIEGDLNPDNSDVDKLFIQLVQTYNQLFEENPINASGVDAKAILSARLSKSRRLENLIAQLPGEKKNGLFGNLIALSLGLTPNFKSNFDLAEDAKLQLSKDTYDDDLDNLLAQIGDQYADLFLAAKNLSDAILLSDILRVNTEITKAPLSASMIKRYDEHHQDLTLLKALVRQQLPEKYKEIFFDQSKNGYAGYIDGGASQEEFYKFIKPILEKMDGTEELLVKLNREDLLRKQRTFDNGSIPHQIHLGELHAILRRQEDFYPFLKDNREKIEKILTFRIPYYVGPLARGNSRFAWMTRKSEETITPWNFEEVVDKGASAQSFIERMTNFDKNLPNEKVLPKHSLLYEYFTVYNELTKVKYVTEGMRKPAFLSGEQKKAIVDLLFKTNRKVTVKQLKEDYFKKIECFDSVEISGVEDRFNASLGTYHDLLKIIKDKDFLDNEENEDILEDIVLTLTLFEDREMIEERLKTYAHLFDDKVMKQLKRRRYTGWGRLSRKLINGIRDKQSGKTILDFLKSDGFANRNFMQLIHDDSLTFKEDIQKAQVSGQGDSLHEHIANLAGSPAIKKGILQTVKVVDELVKVMGRHKPENIVIEMARENQTTQKGQKNSRERMKRIEEGIKELGSQILKEHPVENTQLQNEKLYLYYLQNGRDMYVDQELDINRLSDYDVDHIVPQSFLKDDSIDNKVLTRSDKARGKSDNVPSEEVVKKMKNYWRQLLNAKLITQRKFDNLTKAERGGLSELDKAGFIKRQLVETRQITKHVAQILDSRMNTKYDENDKLIREVKVITLKSKLVSDFRKDFQFYKVREINNYHHAHDAYLNAVVGTALIKKYPKLESEFVYGDYKVYDVRKMIAKSEQEIGKATAKYFFYSNIMNFFKTEITLANGEIRKRPLIETNGETGEIVWDKGRDFATVRKVLSMPQVNIVKKTEVQTGGFSKESILPKRNSDKLIARKKDWDPKKYGGFDSPTVAYSVLVVAKVEKGKSKKLKSVKELLGITIMERSSFEKNPIDFLEAKGYKEVKKDLIIKLPKYSLFELENGRKRMLASAGELQKGNELALPSKYVNFLYLASHYEKLKGSPEDNEQKQLFVEQHKHYLDEIIEQISEFSKRVILADANLDKVLSAYNKHRDKPIREQAENIIHLFTLTNLGAPAAFKYFDTTIDRKRYTSTKEVLDATLIHQSITGLYETRIDLSQLGGDGGGGSGGGGGLGIEDEYRLHETSTEPDVSLGSTWLSDFPQAWAETGGMGLAVRQAPLIIPLKATSTPVSIQQYPMSHEARLGIKPHIQRLLDQGILVPCQSPWNTPLLPVKKPGTNDYRPVQDLREVNKRVEDIHPTVPNPYNLLSGLPPSHQWYTVLDLKDAFFCLRLHPTSQPLFAFEWRDPGMGISGQLTWTRLPQGFKNSPTLFNEALHRDLADFRIQHPDLILLQYVDDILLAATSELDCQQGTRALLQTLGDLGYRASAKKAQICQKQVKYLGYLLREGQRWLTEARKETVMGQPVPKTPRQLREFLGKAGFCRLFIPGFAEMAAPLYPLTKPGTLFSWGPDQQKAYQEIKQALLTAPALGLPDLTKPFELFVDEKQGYAKGVLTQKLGPWRRPVAYLSKKLDPVAAGWPPCLRMVAAIAVLTKDAGKLTMGQPLVILAPHAVEALVKQPPDRWLSNARMTHYQAMLLDTDRVQFGPVVALNPATLLPLPEEGAPHDCLEILAETHGTRPDLTDQPIPDADHTWYTDGSSFLQEGQRKAGAAVTTETEVIWAGALPAGTSAQRAELIALTQALKMAEGKRLNVYTDSRYAFATAHIHGEIYRRRGWLTSEGREIKNKSEILALLKALFLPKRLSIIHCLGHQKGDSAEARGNRLADQAAREAAIKTPPDTSTLLIAGKRTADGSEFEKRTADGSEFESPKKKAKVE

SEQ ID NO: 2149 - protein, 2096 aa, synthetic construct
MPAAKRVKLDGGDKKYSIGLDIGTNSVGWAVITDEYKVPSKKFKVLGNTDRHSIKKNLIGALLFDSGETAEATRLKRTARRRYTRRKNRICYLQEIFSNEMAKVDDSFFHRLEESFLVEEDKKHERHPIFGNIVDEVAYHEKYPTIYHLRKKLVDSTDKADLRLIYLALAHMIKFRGHFLIEGDLNPDNSDVDKLFIQLVQTYNQLFEENPINASGVDAKAILSARLSKSRRLENLIAQLPGEKKNGLFGNLIALSLGLTPNFKSNFDLAEDAKLQLSKDTYDDDLDNLLAQIGDQYADLFLAAKNLSDAILLSDILRVNTEITKAPLSASMIKRYDEHHQDLTLLKALVRQQLPEKYKEIFFDQSKNGYAGYIDGGASQEEFYKFIKPILEKMDGTEELLVKLNREDLLRKQRTFDNGSIPHQIHLGELHAILRRQEDFYPFLKDNREKIEKILTFRIPYYVGPLARGNSRFAWMTRKSEETITPWNFEEVVDKGASAQSFIERMTNFDKNLPNEKVLPKHSLLYEYFTVYNELTKVKYVTEGMRKPAFLSGEQKKAIVDLLFKTNRKVTVKQLKEDYFKKIECFDSVEISGVEDRFNASLGTYHDLLKIIKDKDFLDNEENEDILEDIVLTLTLFEDREMIEERLKTYAHLFDDKVMKQLKRRRYTGWGRLSRKLINGIRDKQSGKTILDFLKSDGFANRNFMQLIHDDSLTFKEDIQKAQVSGQGDSLHEHIANLAGSPAIKKGILQTVKVVDELVKVMGRHKPENIVIEMARENQTTQKGQKNSRERMKRIEEGIKELGSQILKEHPVENTQLQNEKLYLYYLQNGRDMYVDQELDINRLSDYDVDHIVPQSFLKDDSIDNKVLTRSDKARGKSDNVPSEEVVKKMKNYWRQLLNAKLITQRKFDNLTKAERGGLSELDKAGFIKRQLVETRQITKHVAQILDSRMNTKYDENDKLIREVKVITLKSKLVSDFRKDFQFYKVREINNYHHAHDAYLNAVVGTALIKKYPKLESEFVYGDYKVYDVRKMIAKSEQEIGKATAKYFFYSNIMNFFKTEITLANGEIRKRPLIETNGETGEIVWDKGRDFATVRKVLSMPQVNIVKKTEVQTGGFSKESILPKRNSDKLIARKKDWDPKKYGGFDSPTVAYSVLVVAKVEKGKSKKLKSVKELLGITIMERSSFEKNPIDFLEAKGYKEVKKDLIIKLPKYSLFELENGRKRMLASAGELQKGNELALPSKYVNFLYLASHYEKLKGSPEDNEQKQLFVEQHKHYLDEIIEQISEFSKRVILADANLDKVLSAYNKHRDKPIREQAENIIHLFTLTNLGAPAAFKYFDTTIDRKRYTSTKEVLDATLIHQSITGLYETRIDLSQLGGDGGGSSPAPEAAAKGGLGIEDEYRLHETSTEPDVSLGSTWLSDFPQAWAETGGMGLAVRQAPLIIPLKATSTPVSIQQYPMSHEARLGIKPHIQRLLDQGILVPCQSPWNTPLLPVKKPGTNDYRPVQDLREVNKRVEDIHPTVPNPYNLLSGLPPSHQWYTVLDLKDAFFCLRLHPTSQPLFAFEWRDPGMGISGQLTWTRLPQGFKNSPTLFNEALHRDLADFRIQHPDLILLQYVDDILLAATSELDCQQGTRALLQTLGDLGYRASAKKAQICQKQVKYLGYLLREGQRWLTEARKETVMGQPVPKTPRQLREFLGKAGFCRLFIPGFAEMAAPLYPLTKPGTLFSWGPDQQKAYQEIKQALLTAPALGLPDLTKPFELFVDEKQGYAKGVLTQKLGPWRRPVAYLSKKLDPVAAGWPPCLRMVAAIAVLTKDAGKLTMGQPLVILAPHAVEALVKQPPDRWLSNARMTHYQAMLLDTDRVQFGPVVALNPATLLPLPEEGAPHDCLEILAETHGTRPDLTDQPIPDADHTWYTDGSSFLQEGQRKAGAAVTTETEVIWAGALPAGTSAQRAELIALTQALKMAEGKRLNVYTDSRYAFATAHIHGEIYRRRGWLTSEGREIKNKSEILALLKALFLPKRLSIIHCLGHQKGDSAEARGNRLADQAAREAAIKTPPDTSTLLIAGKRTADGSEFEKRTADGSEFESPKKKAKVE

SEQ ID NO: 2150 - protein, 2091 aa, synthetic construct; identical to SEQ ID NO: 2057

SEQ ID NO: 2151 - protein, 2094 aa, synthetic construct
MPAAKRVKLDGGDKKYSIGLDIGTNSVGWAVITDEYKVPSKKFKVLGNTDRHSIKKNLIGALLFDSGETAEATRLKRTARRRYTRRKNRICYLQEIFSNEMAKVDDSFFHRLEESFLVEEDKKHERHPIFGNIVDEVAYHEKYPTIYHLRKKLVDSTDKADLRLIYLALAHMIKFRGHFLIEGDLNPDNSDVDKLFIQLVQTYNQLFEENPINASGVDAKAILSARLSKSRRLENLIAQLPGEKKNGLFGNLIALSLGLTPNFKSNFDLAEDAKLQLSKDTYDDDLDNLLAQIGDQYADLFLAAKNLSDAILLSDILRVNTEITKAPLSASMIKRYDEHHQDLTLLKALVRQQLPEKYKEIFFDQSKNGYAGYIDGGASQEEFYKFIKPILEKMDGTEELLVKLNREDLLRKQRTFDNGSIPHQIHLGELHAILRRQEDFYPFLKDNREKIEKILTFRIPYYVGPLARGNSRFAWMTRKSEETITPWNFEEVVDKGASAQSFIERMTNFDKNLPNEKVLPKHSLLYEYFTVYNELTKVKYVTEGMRKPAFLSGEQKKAIVDLLFKTNRKVTVKQLKEDYFKKIECFDSVEISGVEDRFNASLGTYHDLLKIIKDKDFLDNEENEDILEDIVLTLTLFEDREMIEERLKTYAHLFDDKVMKQLKRRRYTGWGRLSRKLINGIRDKQSGKTILDFLKSDGFANRNFMQLIHDDSLTFKEDIQKAQVSGQGDSLHEHIANLAGSPAIKKGILQTVKVVDELVKVMGRHKPENIVIEMARENQTTQKGQKNSRERMKRIEEGIKELGSQILKEHPVENTQLQNEKLYLYYLQNGRDMYVDQELDINRLSDYDVDHIVPQSFLKDDSIDNKVLTRSDKARGKSDNVPSEEVVKKMKNYWRQLLNAKLITQRKFDNLTKAERGGLSELDKAGFIKRQLVETRQITKHVAQILDSRMNTKYDENDKLIREVKVITLKSKLVSDFRKDFQFYKVREINNYHHAHDAYLNAVVGTALIKKYPKLESEFVYGDYKVYDVRKMIAKSEQEIGKATAKYFFYSNIMNFFKTEITLANGEIRKRPLIETNGETGEIVWDKGRDFATVRKVLSMPQVNIVKKTEVQTGGFSKESILPKRNSDKLIARKKDWDPKKYGGFDSPTVAYSVLVVAKVEKGKSKKLKSVKELLGITIMERSSFEKNPIDFLEAKGYKEVKKDLIIKLPKYSLFELENGRKRMLASAGELQKGNELALPSKYVNFLYLASHYEKLKGSPEDNEQKQLFVEQHKHYLDEIIEQISEFSKRVILADANLDKVLSAYNKHRDKPIREQAENIIHLFTLTNLGAPAAFKYFDTTIDRKRYTSTKEVLDATLIHQSITGLYETRIDLSQLGGDGGPAPGGGGGSGGLGIEDEYRLHETSTEPDVSLGSTWLSDFPQAWAETGGMGLAVRQAPLIIPLKATSTPVSIQQYPMSHEARLGIKPHIQRLLDQGILVPCQSPWNTPLLPVKKPGTNDYRPVQDLREVNKRVEDIHPTVPNPYNLLSGLPPSHQWYTVLDLKDAFFCLRLHPTSQPLFAFEWRDPGMGISGQLTWTRLPQGFKNSPTLFNEALHRDLADFRIQHPDLILLQYVDDILLAATSELDCQQGTRALLQTLGDLGYRASAKKAQICQKQVKYLGYLLREGQRWLTEARKETVMGQPVPKTPRQLREFLGKAGFCRLFIPGFAEMAAPLYPLTKPGTLFSWGPDQQKAYQEIKQALLTAPALGLPDLTKPFELFVDEKQGYAKGVLTQKLGPWRRPVAYLSKKLDPVAAGWPPCLRMVAAIAVLTKDAGKLTMGQPLVILAPHAVEALVKQPPDRWLSNARMTHYQAMLLDTDRVQFGPVVALNPATLLPLPEEGAPHDCLEILAETHGTRPDLTDQPIPDADHTWYTDGSSFLQEGQRKAGAAVTTETEVIWAGALPAGTSAQRAELIALTQALKMAEGKRLNVYTDSRYAFATAHIHGEIYRRRGWLTSEGREIKNKSEILALLKALFLPKRLSIIHCLGHQKGDSAEARGNRLADQAAREAAIKTPPDTSTLLIAGKRTADGSEFEKRTADGSEFESPKKKAKVE

SEQ ID NO: 2152 - protein, 2093 aa, synthetic construct
MPAAKRVKLDGGDKKYSIGLDIGTNSVGWAVITDEYKVPSKKFKVLGNTDRHSIKKNLIGALLFDSGETAEATRLKRTARRRYTRRKNRICYLQEIFSNEMAKVDDSFFHRLEESFLVEEDKKHERHPIFGNIVDEVAYHEKYPTIYHLRKKLVDSTDKADLRLIYLALAHMIKFRGHFLIEGDLNPDNSDVDKLFIQLVQTYNQLFEENPINASGVDAKAILSARLSKSRRLENLIAQLPGEKKNGLFGNLIALSLGLTPNFKSNFDLAEDAKLQLSKDTYDDDLDNLLAQIGDQYADLFLAAKNLSDAILLSDILRVNTEITKAPLSASMIKRYDEHHQDLTLLKALVRQQLPEKYKEIFFDQSKNGYAGYIDGGASQEEFYKFIKPILEKMDGTEELLVKLNREDLLRKQRTFDNGSIPHQIHLGELHAILRRQEDFYPFLKDNREKIEKILTFRIPYYVGPLARGNSRFAWMTRKSEETITPWNFEEVVDKGASAQSFIERMTNFDKNLPNEKVLPKHSLLYEYFTVYNELTKVKYVTEGMRKPAFLSGEQKKAIVDLLFKTNRKVTVKQLKEDYFKKIECFDSVEISGVEDRFNASLGTYHDLLKIIKDKDFLDNEENEDILEDIVLTLTLFEDREMIEERLKTYAHLFDDKVMKQLKRRRYTGWGRLSRKLINGIRDKQSGKTILDFLKSDGFANRNFMQLIHDDSLTFKEDIQKAQVSGQGDSLHEHIANLAGSPAIKKGILQTVKVVDELVKVMGRHKPENIVIEMARENQTTQKGQKNSRERMKRIEEGIKELGSQILKEHPVENTQLQNEKLYLYYLQNGRDMYVDQELDINRLSDYDVDHIVPQSFLKDDSIDNKVLTRSDKARGKSDNVPSEEVVKKMKNYWRQLLNAKLITQRKFDNLTKAERGGLSELDKAGFIKRQLVETRQITKHVAQILDSRMNTKYDENDKLIREVKVITLKSKLVSDFRKDFQFYKVREINNYHHAHDAYLNAVVGTALIKKYPKLESEFVYGDYKVYDVRKMIAKSEQEIGKATAKYFFYSNIMNFFKTEITLANGEIRKRPLIETNGETGEIVWDKGRDFATVRKVLSMPQVNIVKKTEVQTGGFSKESILPKRNSDKLIARKKDWDPKKYGGFDSPTVAYSVLVVAKVEKGKSKKLKSVKELLGITIMERSSFEKNPIDFLEAKGYKEVKKDLIIKLPKYSLFELENGRKRMLASAGELQKGNELALPSKYVNFLYLASHYEKLKGSPEDNEQKQLFVEQHKHYLDEIIEQISEFSKRVILADANLDKVLSAYNKHRDKPIREQAENIIHLFTLTNLGAPAAFKYFDTTIDRKRYTSTKEVLDATLIHQSITGLYETRIDLSQLGGDGGEAAAKGGGGGLGIEDEYRLHETSTEPDVSLGSTWLSDFPQAWAETGGMGLAVRQAPLIIPLKATSTPVSIQQYPMSHEARLGIKPHIQRLLDQGILVPCQSPWNTPLLPVKKPGTNDYRPVQDLREVNKRVEDIHPTVPNPYNLLSGLPPSHQWYTVLDLKDAFFCLRLHPTSQPLFAFEWRDPGMGISGQLTWTRLPQGFKNSPTLFNEALHRDLADFRIQHPDLILLQYVDDILLAATSELDCQQGTRALLQTLGDLGYRASAKKAQICQKQVKYLGYLLREGQRWLTEARKETVMGQPVPKTPRQLREFLGKAGFCRLFIPGFAEMAAPLYPLTKPGTLFSWGPDQQKAYQEIKQALLTAPALGLPDLTKPFELFVDEKQGYAKGVLTQKLGPWRRPVAYLSKKLDPVAAGWPPCLRMVAAIAVLTKDAGKLTMGQPLVILAPHAVEALVKQPPDRWLSNARMTHYQAMLLDTDRVQFGPVVALNPATLLPLPEEGAPHDCLEILAETHGTRPDLTDQPIPDADHTWYTDGSSFLQEGQRKAGAAVTTETEVIWAGALPAGTSAQRAELIALTQALKMAEGKRLNVYTDSRYAFATAHIHGEIYRRRGWLTSEGREIKNKSEILALLKALFLPKRLSIIHCLGHQKGDSAEARGNRLADQAAREAAIKTPPDTSTLLIAGKRTADGSEFEKRTADGSEFESPKKKAKVE

SEQ ID NO: 2153 - protein, 2094 aa, synthetic construct
MPAAKRVKLDGGDKKYSIGLDIGTNSVGWAVITDEYKVPSKKFKVLGNTDRHSIKKNLIGALLFDSGETAEATRLKRTARRRYTRRKNRICYLQEIFSNEMAKVDDSFFHRLEESFLVEEDKKHERHPIFGNIVDEVAYHEKYPTIYHLRKKLVDSTDKADLRLIYLALAHMIKFRGHFLIEGDLNPDNSDVDKLFIQLVQTYNQLFEENPINASGVDAKAILSARLSKSRRLENLIAQLPGEKKNGLFGNLIALSLGLTPNFKSNFDLAEDAKLQLSKDTYDDDLDNLLAQIGDQYADLFLAAKNLSDAILLSDILRVNTEITKAPLSASMIKRYDEHHQDLTLLKALVRQQLPEKYKEIFFDQSKNGYAGYIDGGASQEEFYKFIKPILEKMDGTEELLVKLNREDLLRKQRTFDNGSIPHQIHLGELHAILRRQEDFYPFLKDNREKIEKILTFRIPYYVGPLARGNSRFAWMTRKSEETITPWNFEEVVDKGASAQSFIERMTNFDKNLPNEKVLPKHSLLYEYFTVYNELTKVKYVTEGMRKPAFLSGEQKKAIVDLLFKTNRKVTVKQLKEDYFKKIECFDSVEISGVEDRFNASLGTYHDLLKIIKDKDFLDNEENEDILEDIVLTLTLFEDREMIEERLKTYAHLFDDKVMKQLKRRRYTGWGRLSRKLINGIRDKQSGKTILDFLKSDGFANRNFMQLIHDDSLTFKEDIQKAQVSGQGDSLHEHIANLAGSPAIKKGILQTVKVVDELVKVMGRHKPENIVIEMARENQTTQKGQKNSRERMKRIEEGIKELGSQILKEHPVENTQLQNEKLYLYYLQNGRDMYVDQELDINRLSDYDVDHIVPQSFLKDDSIDNKVLTRSDKARGKSDNVPSEEVVKKMKNYWRQLLNAKLITQRKFDNLTKAERGGLSELDKAGFIKRQLVETRQITKHVAQILDSRMNTKYDENDKLIREVKVITLKSKLVSDFRKDFQFYKVREINNYHHAHDAYLNAVVGTALIKKYPKLESEFVYGDYKVYDVRKMIAKSEQEIGKATAKYFFYSNIMNFFKTEITLANGEIRKRPLIETNGETGEIVWDKGRDFATVRKVLSMPQVNIVKKTEVQTGGFSKESILPKRNSDKLIARKKDWDPKKYGGFDSPTVAYSVLVVAKVEKGKSKKLKSVKELLGITIMERSSFEKNPIDFLEAKGYKEVKKDLIIKLPKYSLFELENGRKRMLASAGELQKGNELALPSKYVNFLYLASHYEKLKGSPEDNEQKQLFVEQHKHYLDEIIEQISEFSKRVILADANLDKVLSAYNKHRDKPIREQAENIIHLFTLTNLGAPAAFKYFDTTIDRKRYTSTKEVLDATLIHQSITGLYETRIDLSQLGGDGGPAPGGSGGGGGLGIEDEYRLHETSTEPDVSLGSTWLSDFPQAWAETGGMGLAVRQAPLIIPLKATSTPVSIQQYPMSHEARLGIKPHIQRLLDQGILVPCQSPWNTPLLPVKKPGTNDYRPVQDLREVNKRVEDIHPTVPNPYNLLSGLPPSHQWYTVLDLKDAFFCLRLHPTSQPLFAFEWRDPGMGISGQLTWTRLPQGFKNSPTLFNEALHRDLADFRIQHPDLILLQYVDDILLAATSELDCQQGTRALLQTLGDLGYRASAKKAQICQKQVKYLGYLLREGQRWLTEARKETVMGQPVPKTPRQLREFLGKAGFCRLFIPGFAEMAAPLYPLTKPGTLFSWGPDQQKAYQEIKQALLTAPALGLPDLTKPFELFVDEKQGYAKGVLTQKLGPWRRPVAYLSKKLDPVAAGWPPCLRMVAAIAVLTKDAGKLTMGQPLVILAPHAVEALVKQPPDRWLSNARMTHYQAMLLDTDRVQFGPVVALNPATLLPLPEEGAPHDCLEILAETHGTRPDLTDQPIPDADHTWYTDGSSFLQEGQRKAGAAVTTETEVIWAGALPAGTSAQRAELIALTQALKMAEGKRLNVYTDSRYAFATAHIHGEIYRRRGWLTSEGREIKNKSEILALLKALFLPKRLSIIHCLGHQKGDSAEARGNRLADQAAREAAIKTPPDTSTLLIAGKRTADGSEFEKRTADGSEFESPKKKAKVE

SEQ ID NO: 2154 - protein, 2094 aa, synthetic construct
MPAAKRVKLDGGDKKYSIGLDIGTNSVGWAVITDEYKVPSKKFKVLGNTDRHSIKKNLIGALLFDSGETAEATRLKRTARRRYTRRKNRICYLQEIFSNEMAKVDDSFFHRLEESFLVEEDKKHERHPIFGNIVDEVAYHEKYPTIYHLRKKLVDSTDKADLRLIYLALAHMIKFRGHFLIEGDLNPDNSDVDKLFIQLVQTYNQLFEENPINASGVDAKAILSARLSKSRRLENLIAQLPGEKKNGLFGNLIALSLGLTPNFKSNFDLAEDAKLQLSKDTYDDDLDNLLAQIGDQYADLFLAAKNLSDAILLSDILRVNTEITKAPLSASMIKRYDEHHQDLTLLKALVRQQLPEKYKEIFFDQSKNGYAGYIDGGASQEEFYKFIKPILEKMDGTEELLVKLNREDLLRKQRTFDNGSIPHQIHLGELHAILRRQEDFYPFLKDNREKIEKILTFRIPYYVGPLARGNSRFAWMTRKSEETITPWNFEEVVDKGASAQSFIERMTNFDKNLPNEKVLPKHSLLYEYFTVYNELTKVKYVTEGMRKPAFLSGEQKKAIVDLLFKTNRKVTVKQLKEDYFKKIECFDSVEISGVEDRFNASLGTYHDLLKIIKDKDFLDNEENEDILEDIVLTLTLFEDREMIEERLKTYAHLFDDKVMKQLKRRRYTGWGRLSRKLINGIRDKQSGKTILDFLKSDGFANRNFMQLIHDDSLTFKEDIQKAQVSGQGDSLHEHIANLAGSPAIKKGILQTVKVVDELVKVMGRHKPENIVIEMARENQTTQKGQKNSRERMKRIEEGIKELGSQILKEHPVENTQLQNEKLYLYYLQNGRDMYVDQELDINRLSDYDVDHIVPQSFLKDDSIDNKVLTRSDKARGKSDNVPSEEVVKKMKNYWRQLLNAKLITQRKFDNLTKAERGGLSELDKAGFIKRQLVETRQITKHVAQILDSRMNTKYDENDKLIREVKVITLKSKLVSDFRKDFQFYKVREINNYHHAHDAYLNAVVGTALIKKYPKLESEFVYGDYKVYDVRKMIAKSEQEIGKATAKYFFYSNIMNFFKTEITLANGEIRKRPLIETNGETGEIVWDKGRDFATVRKVLSMPQVNIVKKTEVQTGGFSKESILPKRNSDKLIARKKDWDPKKYGGFDSPTVAYSVLVVAKVEKGKSKKLKSVKELLGITIMERSSFEKNPIDFLEAKGYKEVKKDLIIKLPKYSLFELENGRKRMLASAGELQKGNELALPSKYVNFLYLASHYEKLKGSPEDNEQKQLFVEQHKHYLDEIIEQISEFSKRVILADANLDKVLSAYNKHRDKPIREQAENIIHLFTLTNLGAPAAFKYFDTTIDRKRYTSTKEVLDATLIHQSITGLYETRIDLSQLGGDGGGGGPAPGGSGGLGIEDEYRLHETSTEPDVSLGSTWLSDFPQAWAETGGMGLAVRQAPLIIPLKATSTPVSIQQYPMSHEARLGIKPHIQRLLDQGILVPCQSPWNTPLLPVKKPGTNDYRPVQDLREVNKRVEDIHPTVPNPYNLLSGLPPSHQWYTVLDLKDAFFCLRLHPTSQPLFAFEWRDPGMGISGQLTWTRLPQGFKNSPTLFNEALHRDLADFRIQHPDLILLQYVDDILLAATSELDCQQGTRALLQTLGDLGYRASAKKAQICQKQVKYLGYLLREGQRWLTEARKETVMGQPVPKTPRQLREFLGKAGFCRLFIPGFAEMAAPLYPLTKPGTLFSWGPDQQKAYQEIKQALLTAPALGLPDLTKPFELFVDEKQGYAKGVLTQKLGPWRRPVAYLSKKLDPVAAGWPPCLRMVAAIAVLTKDAGKLTMGQPLVILAPHAVEALVKQPPDRWLSNARMTHYQAMLLDTDRVQFGPVVALNPATLLPLPEEGAPHDCLEILAETHGTRPDLTDQPIPDADHTWYTDGSSFLQEGQRKAGAAVTTETEVIWAGALPAGTSAQRAELIALTQALKMAEGKRLNVYTDSRYAFATAHIHGEIYRRRGWLTSEGREIKNKSEILALLKALFLPKRLSIIHCLGHQKGDSAEARGNRLADQAAREAAIKTPPDTSTLLIAGKRTADGSEFEKRTADGSEFESPKKKAKVE

SEQ ID NO: 2155 - protein, 2097 aa, synthetic construct; identical to SEQ ID NO: 2056

SEQ ID NO: 2156 - protein, 2094 aa, synthetic construct
MPAAKRVKLDGGDKKYSIGLDIGTNSVGWAVITDEYKVPSKKFKVLGNTDRHSIKKNLIGALLFDSGETAEATRLKRTARRRYTRRKNRICYLQEIFSNEMAKVDDSFFHRLEESFLVEEDKKHERHPIFGNIVDEVAYHEKYPTIYHLRKKLVDSTDKADLRLIYLALAHMIKFRGHFLIEGDLNPDNSDVDKLFIQLVQTYNQLFEENPINASGVDAKAILSARLSKSRRLENLIAQLPGEKKNGLFGNLIALSLGLTPNFKSNFDLAEDAKLQLSKDTYDDDLDNLLAQIGDQYADLFLAAKNLSDAILLSDILRVNTEITKAPLSASMIKRYDEHHQDLTLLKALVRQQLPEKYKEIFFDQSKNGYAGYIDGGASQEEFYKFIKPILEKMDGTEELLVKLNREDLLRKQRTFDNGSIPHQIHLGELHAILRRQEDFYPFLKDNREKIEKILTFRIPYYVGPLARGNSRFAWMTRKSEETITPWNFEEVVDKGASAQSFIERMTNFDKNLPNEKVLPKHSLLYEYFTVYNELTKVKYVTEGMRKPAFLSGEQKKAIVDLLFKTNRKVTVKQLKEDYFKKIECFDSVEISGVEDRFNASLGTYHDLLKIIKDKDFLDNEENEDILEDIVLTLTLFEDREMIEERLKTYAHLFDDKVMKQLKRRRYTGWGRLSRKLINGIRDKQSGKTILDFLKSDGFANRNFMQLIHDDSLTFKEDIQKAQVSGQGDSLHEHIANLAGSPAIKKGILQTVKVVDELVKVMGRHKPENIVIEMARENQTTQKGQKNSRERMKRIEEGIKELGSQILKEHPVENTQLQNEKLYLYYLQNGRDMYVDQELDINRLSDYDVDHIVPQSFLKDDSIDNKVLTRSDKARGKSDNVPSEEVVKKMKNYWRQLLNAKLITQRKFDNLTKAERGGLSELDKAGFIKRQLVETRQITKHVAQILDSRMNTKYDENDKLIREVKVITLKSKLVSDFRKDFQFYKVREINNYHHAHDAYLNAVVGTALIKKYPKLESEFVYGDYKVYDVRKMIAKSEQEIGKATAKYFFYSNIMNFFKTEITLANGEIRKRPLIETNGETGEIVWDKGRDFATVRKVLSMPQVNIVKKTEVQTGGFSKESILPKRNSDKLIARKKDWDPKKYGGFDSPTVAYSVLVVAKVEKGKSKKLKSVKELLGITIMERSSFEKNPIDFLEAKGYKEVKKDLIIKLPKYSLFELENGRKRMLASAGELQKGNELALPSKYVNFLYLASHYEKLKGSPEDNEQKQLFVEQHKHYLDEIIEQISEFSKRVILADANLDKVLSAYNKHRDKPIREQAENIIHLFTLTNLGAPAAFKYFDTTIDRKRYTSTKEVLDATLIHQSITGLYETRIDLSQLGGDGGGSSPAPGGSGGLGIEDEYRLHETSTEPDVSLGSTWLSDFPQAWAETGGMGLAVRQAPLIIPLKATSTPVSIQQYPMSHEARLGIKPHIQRLLDQGILVPCQSPWNTPLLPVKKPGTNDYRPVQDLREVNKRVEDIHPTVPNPYNLLSGLPPSHQWYTVLDLKDAFFCLRLHPTSQPLFAFEWRDPGMGISGQLTWTRLPQGFKNSPTLFNEALHRDLADFRIQHPDLILLQYVDDILLAATSELDCQQGTRALLQTLGDLGYRASAKKAQICQKQVKYLGYLLREGQRWLTEARKETVMGQPVPKTPRQLREFLGKAGFCRLFIPGFAEMAAPLYPLTKPGTLFSWGPDQQKAYQEIKQALLTAPALGLPDLTKPFELFVDEKQGYAKGVLTQKLGPWRRPVAYLSKKLDPVAAGWPPCLRMVAAIAVLTKDAGKLTMGQPLVILAPHAVEALVKQPPDRWLSNARMTHYQAMLLDTDRVQFGPVVALNPATLLPLPEEGAPHDCLEILAETHGTRPDLTDQPIPDADHTWYTDGSSFLQEGQRKAGAAVTTETEVIWAGALPAGTSAQRAELIALTQALKMAEGKRLNVYTDSRYAFATAHIHGEIYRRRGWLTSEGREIKNKSEILALLKALFLPKRLSIIHCLGHQKGDSAEARGNRLADQAAREAAIKTPPDTSTLLIAGKRTADGSEFEKRTADGSEFESPKKKAKVE

SEQ ID NO: 2157 - protein, 2095 aa, synthetic construct
MPAAKRVKLDGGDKKYSIGLDIGTNSVGWAVITDEYKVPSKKFKVLGNTDRHSIKKNLIGALLFDSGETAEATRLKRTARRRYTRRKNRICYLQEIFSNEMAKVDDSFFHRLEESFLVEEDKKHERHPIFGNIVDEVAYHEKYPTIYHLRKKLVDSTDKADLRLIYLALAHMIKFRGHFLIEGDLNPDNSDVDKLFIQLVQTYNQLFEENPINASGVDAKAILSARLSKSRRLENLIAQLPGEKKNGLFGNLIALSLGLTPNFKSNFDLAEDAKLQLSKDTYDDDLDNLLAQIGDQYADLFLAAKNLSDAILLSDILRVNTEITKAPLSASMIKRYDEHHQDLTLLKALVRQQLPEKYKEIFFDQSKNGYAGYIDGGASQEEFYKFIKPILEKMDGTEELLVKLNREDLLRKQRTFDNGSIPHQIHLGELHAILRRQEDFYPFLKDNREKIEKILTFRIPYYVGPLARGNSRFAWMTRKSEETITPWNFEEVVDKGASAQSFIERMTNFDKNLPNEKVLPKHSLLYEYFTVYNELTKVKYVTEGMRKPAFLSGEQKKAIVDLLFKTNRKVTVKQLKEDYFKKIECFDSVEISGVEDRFNASLGTYHDLLKIIKDKDFLDNEENEDILEDIVLTLTLFEDREMIEERLKTYAHLFDDKVMKQLKRRRYTGWGRLSRKLINGIRDKQSGKTILDFLKSDGFANRNFMQLIHDDSLTFKEDIQKAQVSGQGDSLHEHIANLAGSPAIKKGILQTVKVVDELVKVMGRHKPENIVIEMARENQTTQKGQKNSRERMKRIEEGIKELGSQILKEHPVENTQLQNEKLYLYYLQNGRDMYVDQELDINRLSDYDVDHIVPQSFLKDDSIDNKVLTRSDKARGKSDNVPSEEVVKKMKNYWRQLLNAKLITQRKFDNLTKAERGGLSELDKAGFIKRQLVETRQITKHVAQILDSRMNTKYDENDKLIREVKVITLKSKLVSDFRKDFQFYKVREINNYHHAHDAYLNAVVGTALIKKYPKLESEFVYGDYKVYDVRKMIAKSEQEIGKATAKYFFYSNIMNFFKTEITLANGEIRKRPLIETNGETGEIVWDKGRDFATVRKVLSMPQVNIVKKTEVQTGGFSKESILPKRNSDKLIARKKDWDPKKYGGFDSPTVAYSVLVVAKVEKGKSKKLKSVKELLGITIMERSSFEKNPIDFLEAKGYKEVKKDLIIKLPKYSLFELENGRKRMLASAGELQKGNELALPSKYVNFLYLASHYEKLKGSPEDNEQKQLFVEQHKHYLDEIIEQISEFSKRVILADANLDKVLSAYNKHRDKPIREQAENIIHLFTLTNLGAPAAFKYFDTTIDRKRYTSTKEVLDATLIHQSITGLYETRIDLSQLGGDGGGGGGSGGGGSGGLGIEDEYRLHETSTEPDVSLGSTWLSDFPQAWAETGGMGLAVRQAPLIIPLKATSTPVSIQQYPMSHEARLGIKPHIQRLLDQGILVPCQSPWNTPLLPVKKPGTNDYRPVQDLREVNKRVEDIHPTVPNPYNLLSGLPPSHQWYTVLDLKDAFFCLRLHPTSQPLFAFEWRDPGMGISGQLTWTRLPQGFKNSPTLFNEALHRDLADFRIQHPDLILLQYVDDILLAATSELDCQQGTRALLQTLGDLGYRASAKKAQICQKQVKYLGYLLREGQRWLTEARKETVMGQPVPKTPRQLREFLGKAGFCRLFIPGFAEMAAPLYPLTKPGTLFSWGPDQQKAYQEIKQALLTAPALGLPDLTKPFELFVDEKQGYAKGVLTQKLGPWRRPVAYLSKKLDPVAAGWPPCLRMVAAIAVLTKDAGKLTMGQPLVILAPHAVEALVKQPPDRWLSNARMTHYQAMLLDTDRVQFGPVVALNPATLLPLPEEGAPHDCLEILAETHGTRPDLTDQPIPDADHTWYTDGSSFLQEGQRKAGAAVTTETEVIWAGALPAGTSAQRAELIALTQALKMAEGKRLNVYTDSRYAFATAHIHGEIYRRRGWLTSEGREIKNKSEILALLKALFLPKRLSIIHCLGHQKGDSAEARGNRLADQAAREAAIKTPPDTSTLLIAGKRTADGSEFEKRTADGSEFESPKKKAKVE

SEQ ID NO: 2158 - protein, 2091 aa, synthetic construct
MPAAKRVKLDGGDKKYSIGLDIGTNSVGWAVITDEYKVPSKKFKVLGNTDRHSIKKNLIGALLFDSGETAEATRLKRTARRRYTRRKNRICYLQEIFSNEMAKVDDSFFHRLEESFLVEEDKKHERHPIFGNIVDEVAYHEKYPTIYHLRKKLVDSTDKADLRLIYLALAHMIKFRGHFLIEGDLNPDNSDVDKLFIQLVQTYNQLFEENPINASGVDAKAILSARLSKSRRLENLIAQLPGEKKNGLFGNLIALSLGLTPNFKSNFDLAEDAKLQLSKDTYDDDLDNLLAQIGDQYADLFLAAKNLSDAILLSDILRVNTEITKAPLSASMIKRYDEHHQDLTLLKALVRQQLPEKYKEIFFDQSKNGYAGYIDGGASQEEFYKFIKPILEKMDGTEELLVKLNREDLLRKQRTFDNGSIPHQIHLGELHAILRRQEDFYPFLKDNREKIEKILTFRIPYYVGPLARGNSRFAWMTRKSEETITPWNFEEVVDKGASAQSFIERMTNFDKNLPNEKVLPKHSLLYEYFTVYNELTKVKYVTEGMRKPAFLSGEQKKAIVDLLFKTNRKVTVKQLKEDYFKKIECFDSVEISGVEDRFNASLGTYHDLLKIIKDKDFLDNEENEDILEDIVLTLTLFEDREMIEERLKTYAHLFDDKVMKQLKRRRYTGWGRLSRKLINGIRDKQSGKTILDFLKSDGFANRNFMQLIHDDSLTFKEDIQKAQVSGQGDSLHEHIANLAGSPAIKKGILQTVKVVDELVKVMGRHKPENIVIEMARENQTTQKGQKNSRERMKRIEEGIKELGSQILKEHPVENTQLQNEKLYLYYLQNGRDMYVDQELDINRLSDYDVDHIVPQSFLKDDSIDNKVLTRSDKARGKSDNVPSEEVVKKMKNYWRQLLNAKLITQRKFDNLTKAERGGLSELDKAGFIKRQLVETRQITKHVAQILDSRMNTKYDENDKLIREVKVITLKSKLVSDFRKDFQFYKVREINNYHHAHDAYLNAVVGTALIKKYPKLESEFVYGDYKVYDVRKMIAKSEQEIGKATAKYFFYSNIMNFFKTEITLANGEIRKRPLIETNGETGEIVWDKGRDFATVRKVLSMPQVNIVKKTEVQTGGFSKESILPKRNSDKLIARKKDWDPKKYGGFDSPTVAYSVLVVAKVEKGKSKKLKSVKELLGITIMERSSFEKNPIDFLEAKGYKEVKKDLIIKLPKYSLFELENGRKRMLASAGELQKGNELALPSKYVNFLYLASHYEKLKGSPEDNEQKQLFVEQHKHYLDEIIEQISEFSKRVILADANLDKVLSAYNKHRDKPIREQAENIIHLFTLTNLGAPAAFKYFDTTIDRKRYTSTKEVLDATLIHQSITGLYETRIDLSQLGGDGGGGSGSSGGLGIEDEYRLHETSTEPDVSLGSTWLSDFPQAWAETGGMGLAVRQAPLIIPLKATSTPVSIQQYPMSHEARLGIKPHIQRLLDQGILVPCQSPWNTPLLPVKKPGTNDYRPVQDLREVNKRVEDIHPTVPNPYNLLSGLPPSHQWYTVLDLKDAFFCLRLHPTSQPLFAFEWRDPGMGISGQLTWTRLPQGFKNSPTLFNEALHRDLADFRIQHPDLILLQYVDDILLAATSELDCQQGTRALLQTLGDLGYRASAKKAQICQKQVKYLGYLLREGQRWLTEARKETVMGQPVPKTPRQLREFLGKAGFCRLFIPGFAEMAAPLYPLTKPGTLFSWGPDQQKAYQEIKQALLTAPALGLPDLTKPFELFVDEKQGYAKGVLTQKLGPWRRPVAYLSKKLDPVAAGWPPCLRMVAAIAVLTKDAGKLTMGQPLVILAPHAVEALVKQPPDRWLSNARMTHYQAMLLDTDRVQFGPVVALNPATLLPLPEEGAPHDCLEILAETHGTRPDLTDQPIPDADHTWYTDGSSFLQEGQRKAGAAVTTETEVIWAGALPAGTSAQRAELIALTQALKMAEGKRLNVYTDSRYAFATAHIHGEIYRRRGWLTSEGREIKNKSEILALLKALFLPKRLSIIHCLGHQKGDSAEARGNRLADQAAREAAIKTPPDTSTLLIAGKRTADGSEFEKRTADGSEFESPKKKAKVE

SEQ ID NO: 2159 - protein, 2096 aa, synthetic construct; identical to SEQ ID NO: 2055

SEQ ID NO: 2160 - protein, 2094 aa, synthetic construct
MPAAKRVKLDGGDKKYSIGLDIGTNSVGWAVITDEYKVPSKKFKVLGNTDRHSIKKNLIGALLFDSGETAEATRLKRTARRRYTRRKNRICYLQEIFSNEMAKVDDSFFHRLEESFLVEEDKKHERHPIFGNIVDEVAYHEKYPTIYHLRKKLVDSTDKADLRLIYLALAHMIKFRGHFLIEGDLNPDNSDVDKLFIQLVQTYNQLFEENPINASGVDAKAILSARLSKSRRLENLIAQLPGEKKNGLFGNLIALSLGLTPNFKSNFDLAEDAKLQLSKDTYDDDLDNLLAQIGDQYADLFLAAKNLSDAILLSDILRVNTEITKAPLSASMIKRYDEHHQDLTLLKALVRQQLPEKYKEIFFDQSKNGYAGYIDGGASQEEFYKFIKPILEKMDGTEELLVKLNREDLLRKQRTFDNGSIPHQIHLGELHAILRRQEDFYPFLKDNREKIEKILTFRIPYYVGPLARGNSRFAWMTRKSEETITPWNFEEVVDKGASAQSFIERMTNFDKNLPNEKVLPKHSLLYEYFTVYNELTKVKYVTEGMRKPAFLSGEQKKAIVDLLFKTNRKVTVKQLKEDYFKKIECFDSVEISGVEDRFNASLGTYHDLLKIIKDKDFLDNEENEDILEDIVLTLTLFEDREMIEERLKTYAHLFDDKVMKQLKRRRYTGWGRLSRKLINGIRDKQSGKTILDFLKSDGFANRNFMQLIHDDSLTFKEDIQKAQVSGQGDSLHEHIANLAGSPAIKKGILQTVKVVDELVKVMGRHKPENIVIEMARENQTTQKGQKNSRERMKRIEEGIKELGSQILKEHPVENTQLQNEKLYLYYLQNGRDMYVDQELDINRLSDYDVDHIVPQSFLKDDSIDNKVLTRSDKARGKSDNVPSEEVVKKMKNYWRQLLNAKLITQRKFDNLTKAERGGLSELDKAGFIKRQLVETRQITKHVAQILDSRMNTKYDENDKLIREVKVITLKSKLVSDFRKDFQFYKVREINNYHHAHDAYLNAVVGTALIKKYPKLESEFVYGDYKVYDVRKMIAKSEQEIGKATAKYFFYSNIMNFFKTEITLANGEIRKRPLIETNGETGEIVWDKGRDFATVRKVLSMPQVNIVKKTEVQTGGFSKESILPKRNSDKLIARKKDWDPKKYGGFDSPTVAYSVLVVAKVEKGKSKKLKSVKELLGITIMERSSFEKNPIDFLEAKGYKEVKKDLIIKLPKYSLFELENGRKRMLASAGELQKGNELALPSKYVNFLYLASHYEKLKGSPEDNEQKQLFVEQHKHYLDEIIEQISEFSKRVILADANLDKVLSAYNKHRDKPIREQAENIIHLFTLTNLGAPAAFKYFDTTIDRKRYTSTKEVLDATLIHQSITGLYETRIDLSQLGGDGGGGGGGSGSSGGLGIEDEYRLHETSTEPDVSLGSTWLSDFPQAWAETGGMGLAVRQAPLIIPLKATSTPVSIQQYPMSHEARLGIKPHIQRLLDQGILVPCQSPWNTPLLPVKKPGTNDYRPVQDLREVNKRVEDIHPTVPNPYNLLSGLPPSHQWYTVLDLKDAFFCLRLHPTSQPLFAFEWRDPGMGISGQLTWTRLPQGFKNSPTLFNEALHRDLADFRIQHPDLILLQYVDDILLAATSELDCQQGTRALLQTLGDLGYRASAKKAQICQKQVKYLGYLLREGQRWLTEARKETVMGQPVPKTPRQLREFLGKAGFCRLFIPGFAEMAAPLYPLTKPGTLFSWGPDQQKAYQEIKQALLTAPALGLPDLTKPFELFVDEKQGYAKGVLTQKLGPWRRPVAYLSKKLDPVAAGWPPCLRMVAAIAVLTKDAGKLTMGQPLVILAPHAVEALVKQPPDRWLSNARMTHYQAMLLDTDRVQFGPVVALNPATLLPLPEEGAPHDCLEILAETHGTRPDLTDQPIPDADHTWYTDGSSFLQEGQRKAGAAVTTETEVIWAGALPAGTSAQRAELIALTQALKMAEGKRLNVYTDSRYAFATAHIHGEIYRRRGWLTSEGREIKNKSEILALLKALFLPKRLSIIHCLGHQKGDSAEARGNRLADQAAREAAIKTPPDTSTLLIAGKRTADGSEFEKRTADGSEFESPKKKAKVE

SEQ ID NO: 2161 - protein, 2096 aa, synthetic construct
MPAAKRVKLDGGDKKYSIGLDIGTNSVGWAVITDEYKVPSKKFKVLGNTDRHSIKKNLIGALLFDSGETAEATRLKRTARRRYTRRKNRICYLQEIFSNEMAKVDDSFFHRLEESFLVEEDKKHERHPIFGNIVDEVAYHEKYPTIYHLRKKLVDSTDKADLRLIYLALAHMIKFRGHFLIEGDLNPDNSDVDKLFIQLVQTYNQLFEENPINASGVDAKAILSARLSKSRRLENLIAQLPGEKKNGLFGNLIALSLGLTPNFKSNFDLAEDAKLQLSKDTYDDDLDNLLAQIGDQYADLFLAAKNLSDAILLSDILRVNTEITKAPLSASMIKRYDEHHQDLTLLKALVRQQLPEKYKEIFFDQSKNGYAGYIDGGASQEEFYKFIKPILEKMDGTEELLVKLNREDLLRKQRTFDNGSIPHQIHLGELHAILRRQEDFYPFLKDNREKIEKILTFRIPYYVGPLARGNSRFAWMTRKSEETITPWNFEEVVDKGASAQSFIERMTNFDKNLPNEKVLPKHSLLYEYFTVYNELTKVKYVTEGMRKPAFLSGEQKKAIVDLLFKTNRKVTVKQLKEDYFKKIECFDSVEISGVEDRFNASLGTYHDLLKIIKDKDFLDNEENEDILEDIVLTLTLFEDREMIEERLKTYAHLFDDKVMKQLKRRRYTGWGRLSRKLINGIRDKQSGKTILDFLKSDGFANRNFMQLIHDDSLTFKEDIQKAQVSGQGDSLHEHIANLAGSPAIKKGILQTVKVVDELVKVMGRHKPENIVIEMARENQTTQKGQKNSRERMKRIEEGIKELGSQILKEHPVENTQLQNEKLYLYYLQNGRDMYVDQELDINRLSDYDVDHIVPQSFLKDDSIDNKVLTRSDKARGKSDNVPSEEVVKKMKNYWRQLLNAKLITQRKFDNLTKAERGGLSELDKAGFIKRQLVETRQITKHVAQILDSRMNTKYDENDKLIREVKVITLKSKLVSDFRKDFQFYKVREINNYHHAHDAYLNAVVGTALIKKYPKLESEFVYGDYKVYDVRKMIAKSEQEIGKATAKYFFYSNIMNFFKTEITLANGEIRKRPLIETNGETGEIVWDKGRDFATVRKVLSMPQVNIVKKTEVQTGGFSKESILPKRNSDKLIARKKDWDPKKYGGFDSPTVAYSVLVVAKVEKGKSKKLKSVKELLGITIMERSSFEKNPIDFLEAKGYKEVKKDLIIKLPKYSLFELENGRKRMLASAGELQKGNELALPSKYVNFLYLASHYEKLKGSPEDNEQKQLFVEQHKHYLDEIIEQISEFSKRVILADANLDKVLSAYNKHRDKPIREQAENIIHLFTLTNLGAPAAFKYFDTTIDRKRYTSTKEVLDATLIHQSITGLYETRIDLSQLGGDGGEAAAKGGGGGSGGLGIEDEYRLHETSTEPDVSLGSTWLSDFPQAWAETGGMGLAVRQAPLIIPLKATSTPVSIQQYPMSHEARLGIKPHIQRLLDQGILVPCQSPWNTPLLPVKKPGTNDYRPVQDLREVNKRVEDIHPTVPNPYNLLSGLPPSHQWYTVLDLKDAFFCLRLHPTSQPLFAFEWRDPGMGISGQLTWTRLPQGFKNSPTLFNEALHRDLADFRIQHPDLILLQYVDDILLAATSELDCQQGTRALLQTLGDLGYRASAKKAQICQKQVKYLGYLLREGQRWLTEARKETVMGQPVPKTPRQLREFLGKAGFCRLFIPGFAEMAAPLYPLTKPGTLFSWGPDQQKAYQEIKQALLTAPALGLPDLTKPFELFVDEKQGYAKGVLTQKLGPWRRPVAYLSKKLDPVAAGWPPCLRMVAAIAVLTKDAGKLTMGQPLVILAPHAVEALVKQPPDRWLSNARMTHYQAMLLDTDRVQFGPVVALNPATLLPLPEEGAPHDCLEILAETHGTRPDLTDQPIPDADHTWYTDGSSFLQEGQRKAGAAVTTETEVIWAGALPAGTSAQRAELIALTQALKMAEGKRLNVYTDSRYAFATAHIHGEIYRRRGWLTSEGREIKNKSEILALLKALFLPKRLSIIHCLGHQKGDSAEARGNRLADQAAREAAIKTPPDTSTLLIAGKRTADGSEFEKRTADGSEFESPKKKAKVE

SEQ ID NO: 2162 - protein, 2091 aa, synthetic construct
MPAAKRVKLDGGDKKYSIGLDIGTNSVGWAVITDEYKVPSKKFKVLGNTDRHSIKKNLIGALLFDSGETAEATRLKRTARRRYTRRKNRICYLQEIFSNEMAKVDDSFFHRLEESFLVEEDKKHERHPIFGNIVDEVAYHEKYPTIYHLRKKLVDSTDKADLRLIYLALAHMIKFRGHFLIEGDLNPDNSDVDKLFIQLVQTYNQLFEENPINASGVDAKAILSARLSKSRRLENLIAQLPGEKKNGLFGNLIALSLGLTPNFKSNFDLAEDAKLQLSKDTYDDDLDNLLAQIGDQYADLFLAAKNLSDAILLSDILRVNTEITKAPLSASMIKRYDEHHQDLTLLKALVRQQLPEKYKEIFFDQSKNGYAGYIDGGASQEEFYKFIKPILEKMDGTEELLVKLNREDLLRKQRTFDNGSIPHQIHLGELHAILRRQEDFYPFLKDNREKIEKILTFRIPYYVGPLARGNSRFAWMTRKSEETITPWNFEEVVDKGASAQSFIERMTNFDKNLPNEKVLPKHSLLYEYFTVYNELTKVKYVTEGMRKPAFLSGEQKKAIVDLLFKTNRKVTVKQLKEDYFKKIECFDSVEISGVEDRFNASLGTYHDLLKIIKDKDFLDNEENEDILEDIVLTLTLFEDREMIEERLKTYAHLFDDKVMKQLKRRRYTGWGRLSRKLINGIRDKQSGKTILDFLKSDGFANRNFMQLIHDDSLTFKEDIQKAQVSGQGDSLHEHIANLAGSPAIKKGILQTVKVVDELVKVMGRHKPENIVIEMARENQTTQKGQKNSRERMKRIEEGIKELGSQILKEHPVENTQLQNEKLYLYYLQNGRDMYVDQELDINRLSDYDVDHIVPQSFLKDDSIDNKVLTRSDKARGKSDNVPSEEVVKKMKNYWRQLLNAKLITQRKFDNLTKAERGGLSELDKAGFIKRQLVETRQITKHVAQILDSRMNTKYDENDKLIREVKVITLKSKLVSDFRKDFQFYKVREINNYHHAHDAYLNAVVGTALIKKYPKLESEFVYGDYKVYDVRKMIAKSEQEIGKATAKYFFYSNIMNFFKTEITLANGEIRKRPLIETNGETGEIVWDKGRDFATVRKVLSMPQVNIVKKTEVQTGGFSKESILPKRNSDKLIARKKDWDPKKYGGFDSPTVAYSVLVVAKVEKGKSKKLKSVKELLGITIMERSSFEKNPIDFLEAKGYKEVKKDLIIKLPKYSLFELENGRKRMLASAGELQKGNELALPSKYVNFLYLASHYEKLKGSPEDNEQKQLFVEQHKHYLDEIIEQISEFSKRVILADANLDKVLSAYNKHRDKPIREQAENIIHLFTLTNLGAPAAFKYFDTTIDRKRYTSTKEVLDATLIHQSITGLYETRIDLSQLGGDGGPAPGGSGGLGIEDEYRLHETSTEPDVSLGSTWLSDFPQAWAETGGMGLAVRQAPLIIPLKATSTPVSIQQYPMSHEARLGIKPHIQRLLDQGILVPCQSPWNTPLLPVKKPGTNDYRPVQDLREVNKRVEDIHPTVPNPYNLLSGLPPSHQWYTVLDLKDAFFCLRLHPTSQPLFAFEWRDPGMGISGQLTWTRLPQGFKNSPTLFNEALHRDLADFRIQHPDLILLQYVDDILLAATSELDCQQGTRALLQTLGDLGYRASAKKAQICQKQVKYLGYLLREGQRWLTEARKETVMGQPVPKTPRQLREFLGKAGFCRLFIPGFAEMAAPLYPLTKPGTLFSWGPDQQKAYQEIKQALLTAPALGLPDLTKPFELFVDEKQGYAKGVLTQKLGPWRRPVAYLSKKLDPVAAGWPPCLRMVAAIAVLTKDAGKLTMGQPLVILAPHAVEALVKQPPDRWLSNARMTHYQAMLLDTDRVQFGPVVALNPATLLPLPEEGAPHDCLEILAETHGTRPDLTDQPIPDADHTWYTDGSSFLQEGQRKAGAAVTTETEVIWAGALPAGTSAQRAELIALTQALKMAEGKRLNVYTDSRYAFATAHIHGEIYRRRGWLTSEGREIKNKSEILALLKALFLPKRLSIIHCLGHQKGDSAEARGNRLADQAAREAAIKTPPDTSTLLIAGKRTADGSEFEKRTADGSEFESPKKKAKVE

SEQ ID NO: 2163 - protein, 2096 aa, synthetic construct
MPAAKRVKLDGGDKKYSIGLDIGTNSVGWAVITDEYKVPSKKFKVLGNTDRHSIKKNLIGALLFDSGETAEATRLKRTARRRYTRRKNRICYLQEIFSNEMAKVDDSFFHRLEESFLVEEDKKHERHPIFGNIVDEVAYHEKYPTIYHLRKKLVDSTDKADLRLIYLALAHMIKFRGHFLIEGDLNPDNSDVDKLFIQLVQTYNQLFEENPINASGVDAKAILSARLSKSRRLENLIAQLPGEKKNGLFGNLIALSLGLTPNFKSNFDLAEDAKLQLSKDTYDDDLDNLLAQIGDQYADLFLAAKNLSDAILLSDILRVNTEITKAPLSASMIKRYDEHHQDLTLLKALVRQQLPEKYKEIFFDQSKNGYAGYIDGGASQEEFYKFIKPILEKMDGTEELLVKLNREDLLRKQRTFDNGSIPHQIHLGELHAILRRQEDFYPFLKDNREKIEKILTFRIPYYVGPLARGNSRFAWMTRKSEETITPWNFEEVVDKGASAQSFIERMTNFDKNLPNEKVLPKHSLLYEYFTVYNELTKVKYVTEGMRKPAFLSGEQKKAIVDLLFKTNRKVTVKQLKEDYFKKIECFDSVEISGVEDRFNASLGTYHDLLKIIKDKDFLDNEENEDILEDIVLTLTLFEDREMIEERLKTYAHLFDDKVMKQLKRRRYTGWGRLSRKLINGIRDKQSGKTILDFLKSDGFANRNFMQLIHDDSLTFKEDIQKAQVSGQGDSLHEHIANLAGSPAIKKGILQTVKVVDELVKVMGRHKPENIVIEMARENQTTQKGQKNSRERMKRIEEGIKELGSQILKEHPVENTQLQNEKLYLYYLQNGRDMYVDQELDINRLSDYDVDHIVPQSFLKDDSIDNKVLTRSDKARGKSDNVPSEEVVKKMKNYWRQLLNAKLITQRKFDNLTKAERGGLSELDKAGFIKRQLVETRQITKHVAQILDSRMNTKYDENDKLIREVKVITLKSKLVSDFRKDFQFYKVREINNYHHAHDAYLNAVVGTALIKKYPKLESEFVYGDYKVYDVRKMIAKSEQEIGKATAKYFFYSNIMNFFKTEITLANGEIRKRPLIETNGETGEIVWDKGRDFATVRKVLSMPQVNIVKKTEVQTGGFSKESILPKRNSDKLIARKKDWDPKKYGGFDSPTVAYSVLVVAKVEKGKSKKLKSVKELLGITIMERSSFEKNPIDFLEAKGYKEVKKDLIIKLPKYSLFELENGRKRMLASAGELQKGNELALPSKYVNFLYLASHYEKLKGSPEDNEQKQLFVEQHKHYLDEIIEQISEFSKRVILADANLDKVLSAYNKHRDKPIREQAENIIHLFTLTNLGAPAAFKYFDTTIDRKRYTSTKEVLDATLIHQSITGLYETRIDLSQLGGDGGEAAAKPAPGSSGGLGIEDEYRLHETSTEPDVSLGSTWLSDFPQAWAETGGMGLAVRQAPLIIPLKATSTPVSIQQYPMSHEARLGIKPHIQRLLDQGILVPCQSPWNTPLLPVKKPGTNDYRPVQDLREVNKRVEDIHPTVPNPYNLLSGLPPSHQWYTVLDLKDAFFCLRLHPTSQPLFAFEWRDPGMGISGQLTWTRLPQGFKNSPTLFNEALHRDLADFRIQHPDLILLQYVDDILLAATSELDCQQGTRALLQTLGDLGYRASAKKAQICQKQVKYLGYLLREGQRWLTEARKETVMGQPVPKTPRQLREFLGKAGFCRLFIPGFAEMAAPLYPLTKPGTLFSWGPDQQKAYQEIKQALLTAPALGLPDLTKPFELFVDEKQGYAKGVLTQKLGPWRRPVAYLSKKLDPVAAGWPPCLRMVAAIAVLTKDAGKLTMGQPLVILAPHAVEALVKQPPDRWLSNARMTHYQAMLLDTDRVQFGPVVALNPATLLPLPEEGAPHDCLEILAETHGTRPDLTDQPIPDADHTWYTDGSSFLQEGQRKAGAAVTTETEVIWAGALPAGTSAQRAELIALTQALKMAEGKRLNVYTDSRYAFATAHIHGEIYRRRGWLTSEGREIKNKSEILALLKALFLPKRLSIIHCLGHQKGDSAEARGNRLADQAAREAAIKTPPDTSTLLIAGKRTADGSEFEKRTADGSEFESPKKKAKVE

SEQ ID NO: 2164 - protein, 2100 aa, synthetic construct
MPAAKRVKLDGGDKKYSIGLDIGTNSVGWAVITDEYKVPSKKFKVLGNTDRHSIKKNLIGALLFDSGETAEATRLKRTARRRYTRRKNRICYLQEIFSNEMAKVDDSFFHRLEESFLVEEDKKHERHPIFGNIVDEVAYHEKYPTIYHLRKKLVDSTDKADLRLIYLALAHMIKFRGHFLIEGDLNPDNSDVDKLFIQLVQTYNQLFEENPINASGVDAKAILSARLSKSRRLENLIAQLPGEKKNGLFGNLIALSLGLTPNFKSNFDLAEDAKLQLSKDTYDDDLDNLLAQIGDQYADLFLAAKNLSDAILLSDILRVNTEITKAPLSASMIKRYDEHHQDLTLLKALVRQQLPEKYKEIFFDQSKNGYAGYIDGGASQEEFYKFIKPILEKMDGTEELLVKLNREDLLRKQRTFDNGSIPHQIHLGELHAILRRQEDFYPFLKDNREKIEKILTFRIPYYVGPLARGNSRFAWMTRKSEETITPWNFEEVVDKGASAQSFIERMTNFDKNLPNEKVLPKHSLLYEYFTVYNELTKVKYVTEGMRKPAFLSGEQKKAIVDLLFKTNRKVTVKQLKEDYFKKIECFDSVEISGVEDRFNASLGTYHDLLKIIKDKDFLDNEENEDILEDIVLTLTLFEDREMIEERLKTYAHLFDDKVMKQLKRRRYTGWGRLSRKLINGIRDKQSGKTILDFLKSDGFANRNFMQLIHDDSLTFKEDIQKAQVSGQGDSLHEHIANLAGSPAIKKGILQTVKVVDELVKVMGRHKPENIVIEMARENQTTQKGQKNSRERMKRIEEGIKELGSQILKEHPVENTQLQNEKLYLYYLQNGRDMYVDQELDINRLSDYDVDHIVPQSFLKDDSIDNKVLTRSDKARGKSDNVPSEEVVKKMKNYWRQLLNAKLITQRKFDNLTKAERGGLSELDKAGFIKRQLVETRQITKHVAQILDSRMNTKYDENDKLIREVKVITLKSKLVSDFRKDFQFYKVREINNYHHAHDAYLNAVVGTALIKKYPKLESEFVYGDYKVYDVRKMIAKSEQEIGKATAKYFFYSNIMNFFKTEITLANGEIRKRPLIETNGETGEIVWDKGRDFATVRKVLSMPQVNIVKKTEVQTGGFSKESILPKRNSDKLIARKKDWDPKKYGGFDSPTVAYSVLVVAKVEKGKSKKLKSVKELLGITIMERSSFEKNPIDFLEAKGYKEVKKDLIIKLPKYSLFELENGRKRMLASAGELQKGNELALPSKYVNFLYLASHYEKLKGSPEDNEQKQLFVEQHKHYLDEIIEQISEFSKRVILADANLDKVLSAYNKHRDKPIREQAENIIHLFTLTNLGAPAAFKYFDTTIDRKRYTSTKEVLDATLIHQSITGLYETRIDLSQLGGDGGGSSGSSGSSGSSGSSGGLGIEDEYRLHETSTEPDVSLGSTWLSDFPQAWAETGGMGLAVRQAPLIIPLKATSTPVSIQQYPMSHEARLGIKPHIQRLLDQGILVPCQSPWNTPLLPVKKPGTNDYRPVQDLREVNKRVEDIHPTVPNPYNLLSGLPPSHQWYTVLDLKDAFFCLRLHPTSQPLFAFEWRDPGMGISGQLTWTRLPQGFKNSPTLFNEALHRDLADFRIQHPDLILLQYVDDILLAATSELDCQQGTRALLQTLGDLGYRASAKKAQICQKQVKYLGYLLREGQRWLTEARKETVMGQPVPKTPRQLREFLGKAGFCRLFIPGFAEMAAPLYPLTKPGTLFSWGPDQQKAYQEIKQALLTAPALGLPDLTKPFELFVDEKQGYAKGVLTQKLGPWRRPVAYLSKKLDPVAAGWPPCLRMVAAIAVLTKDAGKLTMGQPLVILAPHAVEALVKQPPDRWLSNARMTHYQAMLLDTDRVQFGPVVALNPATLLPLPEEGAPHDCLEILAETHGTRPDLTDQPIPDADHTWYTDGSSFLQEGQRKAGAAVTTETEVIWAGALPAGTSAQRAELIALTQALKMAEGKRLNVYTDSRYAFATAHIHGEIYRRRGWLTSEGREIKNKSEILALLKALFLPKRLSIIHCLGHQKGDSAEARGNRLADQAAREAAIKTPPDTSTLLIAGKRTADGSEFEKRTADGSEFESPKKKAKVE

SEQ ID NO: 2165 - protein, 2094 aa, synthetic construct
MPAAKRVKLDGGDKKYSIGLDIGTNSVGWAVITDEYKVPSKKFKVLGNTDRHSIKKNLIGALLFDSGETAEATRLKRTARRRYTRRKNRICYLQEIFSNEMAKVDDSFFHRLEESFLVEEDKKHERHPIFGNIVDEVAYHEKYPTIYHLRKKLVDSTDKADLRLIYLALAHMIKFRGHFLIEGDLNPDNSDVDKLFIQLVQTYNQLFEENPINASGVDAKAILSARLSKSRRLENLIAQLPGEKKNGLFGNLIALSLGLTPNFKSNFDLAEDAKLQLSKDTYDDDLDNLLAQIGDQYADLFLAAKNLSDAILLSDILRVNTEITKAPLSASMIKRYDEHHQDLTLLKALVRQQLPEKYKEIFFDQSKNGYAGYIDGGASQEEFYKFIKPILEKMDGTEELLVKLNREDLLRKQRTFDNGSIPHQIHLGELHAILRRQEDFYPFLKDNREKIEKILTFRIPYYVGPLARGNSRFAWMTRKSEETITPWNFEEVVDKGASAQSFIERMTNFDKNLPNEKVLPKHSLLYEYFTVYNELTKVKYVTEGMRKPAFLSGEQKKAIVDLLFKTNRKVTVKQLKEDYFKKIECFDSVEISGVEDRFNASLGTYHDLLKIIKDKDFLDNEENEDILEDIVLTLTLFEDREMIEERLKTYAHLFDDKVMKQLKRRRYTGWGRLSRKLINGIRDKQSGKTILDFLKSDGFANRNFMQLIHDDSLTFKEDIQKAQVSGQGDSLHEHIANLAGSPAIKKGILQTVKVVDELVKVMGRHKPENIVIEMARENQTTQKGQKNSRERMKRIEEGIKELGSQILKEHPVENTQLQNEKLYLYYLQNGRDMYVDQELDINRLSDYDVDHIVPQSFLKDDSIDNKVLTRSDKARGKSDNVPSEEVVKKMKNYWRQLLNAKLITQRKFDNLTKAERGGLSELDKAGFIKRQLVETRQITKHVAQILDSRMNTKYDENDKLIREVKVITLKSKLVSDFRKDFQFYKVREINNYHHAHDAYLNAVVGTALIKKYPKLESEFVYGDYKVYDVRKMIAKSEQEIGKATAKYFFYSNIMNFFKTEITLANGEIRKRPLIETNGETGEIVWDKGRDFATVRKVLSMPQVNIVKKTEVQTGGFSKESILPKRNSDKLIARKKDWDPKKYGGFDSPTVAYSVLVVAKVEKGKSKKLKSVKELLGITIMERSSFEKNPIDFLEAKGYKEVKKDLIIKLPKYSLFELENGRKRMLASAGELQKGNELALPSKYVNFLYLASHYEKLKGSPEDNEQKQLFVEQHKHYLDEIIEQISEFSKRVILADANLDKVLSAYNKHRDKPIREQAENIIHLFTLTNLGAPAAFKYFDTTIDRKRYTSTKEVLDATLIHQSITGLYETRIDLSQLGGDGGGSSGGSGGGGGLGIEDEYRLHETSTEPDVSLGSTWLSDFPQAWAETGGMGLAVRQAPLIIPLKATSTPVSIQQYPMSHEARLGIKPHIQRLLDQGILVPCQSPWNTPLLPVKKPGTNDYRPVQDLREVNKRVEDIHPTVPNPYNLLSGLPPSHQWYTVLDLKDAFFCLRLHPTSQPLFAFEWRDPGMGISGQLTWTRLPQGFKNSPTLFNEALHRDLADFRIQHPDLILLQYVDDILLAATSELDCQQGTRALLQTLGDLGYRASAKKAQICQKQVKYLGYLLREGQRWLTEARKETVMGQPVPKTPRQLREFLGKAGFCRLFIPGFAEMAAPLYPLTKPGTLFSWGPDQQKAYQEIKQALLTAPALGLPDLTKPFELFVDEKQGYAKGVLTQKLGPWRRPVAYLSKKLDPVAAGWPPCLRMVAAIAVLTKDAGKLTMGQPLVILAPHAVEALVKQPPDRWLSNARMTHYQAMLLDTDRVQFGPVVALNPATLLPLPEEGAPHDCLEILAETHGTRPDLTDQPIPDADHTWYTDGSSFLQEGQRKAGAAVTTETEVIWAGALPAGTSAQRAELIALTQALKMAEGKRLNVYTDSRYAFATAHIHGEIYRRRGWLTSEGREIKNKSEILALLKALFLPKRLSIIHCLGHQKGDSAEARGNRLADQAAREAAIKTPPDTSTLLIAGKRTADGSEFEKRTADGSEFESPKKKAKVE

SEQ ID NO: 2166 - protein, 2094 aa, synthetic construct; identical to SEQ ID NO: 2051

SEQ ID NO: 2167 - protein, 2092 aa, synthetic construct
MPAAKRVKLDGGDKKYSIGLDIGTNSVGWAVITDEYKVPSKKFKVLGNTDRHSIKKNLIGALLFDSGETAEATRLKRTARRRYTRRKNRICYLQEIFSNEMAKVDDSFFHRLEESFLVEEDKKHERHPIFGNIVDEVAYHEKYPTIYHLRKKLVDSTDKADLRLIYLALAHMIKFRGHFLIEGDLNPDNSDVDKLFIQLVQTYNQLFEENPINASGVDAKAILSARLSKSRRLENLIAQLPGEKKNGLFGNLIALSLGLTPNFKSNFDLAEDAKLQLSKDTYDDDLDNLLAQIGDQYADLFLAAKNLSDAILLSDILRVNTEITKAPLSASMIKRYDEHHQDLTLLKALVRQQLPEKYKEIFFDQSKNGYAGYIDGGASQEEFYKFIKPILEKMDGTEELLVKLNREDLLRKQRTFDNGSIPHQIHLGELHAILRRQEDFYPFLKDNREKIEKILTFRIPYYVGPLARGNSRFAWMTRKSEETITPWNFEEVVDKGASAQSFIERMTNFDKNLPNEKVLPKHSLLYEYFTVYNELTKVKYVTEGMRKPAFLSGEQKKAIVDLLFKTNRKVTVKQLKEDYFKKIECFDSVEISGVEDRFNASLGTYHDLLKIIKDKDFLDNEENEDILEDIVLTLTLFEDREMIEERLKTYAHLFDDKVMKQLKRRRYTGWGRLSRKLINGIRDKQSGKTILDFLKSDGFANRNFMQLIHDDSLTFKEDIQKAQVSGQGDSLHEHIANLAGSPAIKKGILQTVKVVDELVKVMGRHKPENIVIEMARENQTTQKGQKNSRERMKRIEEGIKELGSQILKEHPVENTQLQNEKLYLYYLQNGRDMYVDQELDINRLSDYDVDHIVPQSFLKDDSIDNKVLTRSDKARGKSDNVPSEEVVKKMKNYWRQLLNAKLITQRKFDNLTKAERGGLSELDKAGFIKRQLVETRQITKHVAQILDSRMNTKYDENDKLIREVKVITLKSKLVSDFRKDFQFYKVREINNYHHAHDAYLNAVVGTALIKKYPKLESEFVYGDYKVYDVRKMIAKSEQEIGKATAKYFFYSNIMNFFKTEITLANGEIRKRPLIETNGETGEIVWDKGRDFATVRKVLSMPQVNIVKKTEVQTGGFSKESILPKRNSDKLIARKKDWDPKKYGGFDSPTVAYSVLVVAKVEKGKSKKLKSVKELLGITIMERSSFEKNPIDFLEAKGYKEVKKDLIIKLPKYSLFELENGRKRMLASAGELQKGNELALPSKYVNFLYLASHYEKLKGSPEDNEQKQLFVEQHKHYLDEIIEQISEFSKRVILADANLDKVLSAYNKHRDKPIREQAENIIHLFTLTNLGAPAAFKYFDTTIDRKRYTSTKEVLDATLIHQSITGLYETRIDLSQLGGDGGPAPAPAPGGLGIEDEYRLHETSTEPDVSLGSTWLSDFPQAWAETGGMGLAVRQAPLIIPLKATSTPVSIQQYPMSHEARLGIKPHIQRLLDQGILVPCQSPWNTPLLPVKKPGTNDYRPVQDLREVNKRVEDIHPTVPNPYNLLSGLPPSHQWYTVLDLKDAFFCLRLHPTSQPLFAFEWRDPGMGISGQLTWTRLPQGFKNSPTLFNEALHRDLADFRIQHPDLILLQYVDDILLAATSELDCQQGTRALLQTLGDLGYRASAKKAQICQKQVKYLGYLLREGQRWLTEARKETVMGQPVPKTPRQLREFLGKAGFCRLFIPGFAEMAAPLYPLTKPGTLFSWGPDQQKAYQEIKQALLTAPALGLPDLTKPFELFVDEKQGYAKGVLTQKLGPWRRPVAYLSKKLDPVAAGWPPCLRMVAAIAVLTKDAGKLTMGQPLVILAPHAVEALVKQPPDRWLSNARMTHYQAMLLDTDRVQFGPVVALNPATLLPLPEEGAPHDCLEILAETHGTRPDLTDQPIPDADHTWYTDGSSFLQEGQRKAGAAVTTETEVIWAGALPAGTSAQRAELIALTQALKMAEGKRLNVYTDSRYAFATAHIHGEIYRRRGWLTSEGREIKNKSEILALLKALFLPKRLSIIHCLGHQKGDSAEARGNRLADQAAREAAIKTPPDTSTLLIAGKRTADGSEFEKRTADGSEFESPKKKAKVE

SEQ ID NO: 2168 - protein, 2096 aa, synthetic construct
MPAAKRVKLDGGDKKYSIGLDIGTNSVGWAVITDEYKVPSKKFKVLGNTDRHSIKKNLIGALLFDSGETAEATRLKRTARRRYTRRKNRICYLQEIFSNEMAKVDDSFFHRLEESFLVEEDKKHERHPIFGNIVDEVAYHEKYPTIYHLRKKLVDSTDKADLRLIYLALAHMIKFRGHFLIEGDLNPDNSDVDKLFIQLVQTYNQLFEENPINASGVDAKAILSARLSKSRRLENLIAQLPGEKKNGLFGNLIALSLGLTPNFKSNFDLAEDAKLQLSKDTYDDDLDNLLAQIGDQYADLFLAAKNLSDAILLSDILRVNTEITKAPLSASMIKRYDEHHQDLTLLKALVRQQLPEKYKEIFFDQSKNGYAGYIDGGASQEEFYKFIKPILEKMDGTEELLVKLNREDLLRKQRTFDNGSIPHQIHLGELHAILRRQEDFYPFLKDNREKIEKILTFRIPYYVGPLARGNSRFAWMTRKSEETITPWNFEEVVDKGASAQSFIERMTNFDKNLPNEKVLPKHSLLYEYFTVYNELTKVKYVTEGMRKPAFLSGEQKKAIVDLLFKTNRKVTVKQLKEDYFKKIECFDSVEISGVEDRFNASLGTYHDLLKIIKDKDFLDNEENEDILEDIVLTLTLFEDREMIEERLKTYAHLFDDKVMKQLKRRRYTGWGRLSRKLINGIRDKQSGKTILDFLKSDGFANRNFMQLIHDDSLTFKEDIQKAQVSGQGDSLHEHIANLAGSPAIKKGILQTVKVVDELVKVMGRHKPENIVIEMARENQTTQKGQKNSRERMKRIEEGIKELGSQILKEHPVENTQLQNEKLYLYYLQNGRDMYVDQELDINRLSDYDVDHIVPQSFLKDDSIDNKVLTRSDKARGKSDNVPSEEVVKKMKNYWRQLLNAKLITQRKFDNLTKAERGGLSELDKAGFIKRQLVETRQITKHVAQILDSRMNTKYDENDKLIREVKVITLKSKLVSDFRKDFQFYKVREINNYHHAHDAYLNAVVGTALIKKYPKLESEFVYGDYKVYDVRKMIAKSEQEIGKATAKYFFYSNIMNFFKTEITLANGEIRKRPLIETNGETGEIVWDKGRDFATVRKVLSMPQVNIVKKTEVQTGGFSKESILPKRNSDKLIARKKDWDPKKYGGFDSPTVAYSVLVVAKVEKGKSKKLKSVKELLGITIMERSSFEKNPIDFLEAKGYKEVKKDLIIKLPKYSLFELENGRKRMLASAGELQKGNELALPSKYVNFLYLASHYEKLKGSPEDNEQKQLFVEQHKHYLDEIIEQISEFSKRVILADANLDKVLSAYNKHRDKPIREQAENIIHLFTLTNLGAPAAFKYFDTTIDRKRYTSTKEVLDATLIHQSITGLYETRIDLSQLGGDGGGGSEAAAKGSSGGLGIEDEYRLHETSTEPDVSLGSTWLSDFPQAWAETGGMGLAVRQAPLIIPLKATSTPVSIQQYPMSHEARLGIKPHIQRLLDQGILVPCQSPWNTPLLPVKKPGTNDYRPVQDLREVNKRVEDIHPTVPNPYNLLSGLPPSHQWYTVLDLKDAFFCLRLHPTSQPLFAFEWRDPGMGISGQLTWTRLPQGFKNSPTLFNEALHRDLADFRIQHPDLILLQYVDDILLAATSELDCQQGTRALLQTLGDLGYRASAKKAQICQKQVKYLGYLLREGQRWLTEARKETVMGQPVPKTPRQLREFLGKAGFCRLFIPGFAEMAAPLYPLTKPGTLFSWGPDQQKAYQEIKQALLTAPALGLPDLTKPFELFVDEKQGYAKGVLTQKLGPWRRPVAYLSKKLDPVAAGWPPCLRMVAAIAVLTKDAGKLTMGQPLVILAPHAVEALVKQPPDRWLSNARMTHYQAMLLDTDRVQFGPVVALNPATLLPLPEEGAPHDCLEILAETHGTRPDLTDQPIPDADHTWYTDGSSFLQEGQRKAGAAVTTETEVIWAGALPAGTSAQRAELIALTQALKMAEGKRLNVYTDSRYAFATAHIHGEIYRRRGWLTSEGREIKNKSEILALLKALFLPKRLSIIHCLGHQKGDSAEARGNRLADQAAREAAIKTPPDTSTLLIAGKRTADGSEFEKRTADGSEFESPKKKAKVE

SEQ ID NO: 2169 - protein, 2090 aa, synthetic construct
MPAAKRVKLDGGDKKYSIGLDIGTNSVGWAVITDEYKVPSKKFKVLGNTDRHSIKKNLIGALLFDSGETAEATRLKRTARRRYTRRKNRICYLQEIFSNEMAKVDDSFFHRLEESFLVEEDKKHERHPIFGNIVDEVAYHEKYPTIYHLRKKLVDSTDKADLRLIYLALAHMIKFRGHFLIEGDLNPDNSDVDKLFIQLVQTYNQLFEENPINASGVDAKAILSARLSKSRRLENLIAQLPGEKKNGLFGNLIALSLGLTPNFKSNFDLAEDAKLQLSKDTYDDDLDNLLAQIGDQYADLFLAAKNLSDAILLSDILRVNTEITKAPLSASMIKRYDEHHQDLTLLKALVRQQLPEKYKEIFFDQSKNGYAGYIDGGASQEEFYKFIKPILEKMDGTEELLVKLNREDLLRKQRTFDNGSIPHQIHLGELHAILRRQEDFYPFLKDNREKIEKILTFRIPYYVGPLARGNSRFAWMTRKSEETITPWNFEEVVDKGASAQSFIERMTNFDKNLPNEKVLPKHSLLYEYFTVYNELTKVKYVTEGMRKPAFLSGEQKKAIVDLLFKTNRKVTVKQLKEDYFKKIECFDSVEISGVEDRFNASLGTYHDLLKIIKDKDFLDNEENEDILEDIVLTLTLFEDREMIEERLKTYAHLFDDKVMKQLKRRRYTGWGRLSRKLINGIRDKQSGKTILDFLKSDGFANRNFMQLIHDDSLTFKEDIQKAQVSGQGDSLHEHIANLAGSPAIKKGILQTVKVVDELVKVMGRHKPENIVIEMARENQTTQKGQKNSRERMKRIEEGIKELGSQILKEHPVENTQLQNEKLYLYYLQNGRDMYVDQELDINRLSDYDVDHIVPQSFLKDDSIDNKVLTRSDKARGKSDNVPSEEVVKKMKNYWRQLLNAKLITQRKFDNLTKAERGGLSELDKAGFIKRQLVETRQITKHVAQILDSRMNTKYDENDKLIREVKVITLKSKLVSDFRKDFQFYKVREINNYHHAHDAYLNAVVGTALIKKYPKLESEFVYGDYKVYDVRKMIAKSEQEIGKATAKYFFYSNIMNFFKTEITLANGEIRKRPLIETNGETGEIVWDKGRDFATVRKVLSMPQVNIVKKTEVQTGGFSKESILPKRNSDKLIARKKDWDPKKYGGFDSPTVAYSVLVVAKVEKGKSKKLKSVKELLGITIMERSSFEKNPIDFLEAKGYKEVKKDLIIKLPKYSLFELENGRKRMLASAGELQKGNELALPSKYVNFLYLASHYEKLKGSPEDNEQKQLFVEQHKHYLDEIIEQISEFSKRVILADANLDKVLSAYNKHRDKPIREQAENIIHLFTLTNLGAPAAFKYFDTTIDRKRYTSTKEVLDATLIHQSITGLYETRIDLSQLGGDGGGGGGGGGLGIEDEYRLHETSTEPDVSLGSTWLSDFPQAWAETGGMGLAVRQAPLIIPLKATSTPVSIQQYPMSHEARLGIKPHIQRLLDQGILVPCQSPWNTPLLPVKKPGTNDYRPVQDLREVNKRVEDIHPTVPNPYNLLSGLPPSHQWYTVLDLKDAFFCLRLHPTSQPLFAFEWRDPGMGISGQLTWTRLPQGFKNSPTLFNEALHRDLADFRIQHPDLILLQYVDDILLAATSELDCQQGTRALLQTLGDLGYRASAKKAQICQKQVKYLGYLLREGQRWLTEARKETVMGQPVPKTPRQLREFLGKAGFCRLFIPGFAEMAAPLYPLTKPGTLFSWGPDQQKAYQEIKQALLTAPALGLPDLTKPFELFVDEKQGYAKGVLTQKLGPWRRPVAYLSKKLDPVAAGWPPCLRMVAAIAVLTKDAGKLTMGQPLVILAPHAVEALVKQPPDRWLSNARMTHYQAMLLDTDRVQFGPVVALNPATLLPLPEEGAPHDCLEILAETHGTRPDLTDQPIPDADHTWYTDGSSFLQEGQRKAGAAVTTETEVIWAGALPAGTSAQRAELIALTQALKMAEGKRLNVYTDSRYAFATAHIHGEIYRRRGWLTSEGREIKNKSEILALLKALFLPKRLSIIHCLGHQKGDSAEARGNRLADQAAREAAIKTPPDTSTLLIAGKRTADGSEFEKRTADGSEFESPKKKAKVE

SEQ ID NO: 2170 - protein, 2091 aa, synthetic construct
MPAAKRVKLDGGDKKYSIGLDIGTNSVGWAVITDEYKVPSKKFKVLGNTDRHSIKKNLIGALLFDSGETAEATRLKRTARRRYTRRKNRICYLQEIFSNEMAKVDDSFFHRLEESFLVEEDKKHERHPIFGNIVDEVAYHEKYPTIYHLRKKLVDSTDKADLRLIYLALAHMIKFRGHFLIEGDLNPDNSDVDKLFIQLVQTYNQLFEENPINASGVDAKAILSARLSKSRRLENLIAQLPGEKKNGLFGNLIALSLGLTPNFKSNFDLAEDAKLQLSKDTYDDDLDNLLAQIGDQYADLFLAAKNLSDAILLSDILRVNTEITKAPLSASMIKRYDEHHQDLTLLKALVRQQLPEKYKEIFFDQSKNGYAGYIDGGASQEEFYKFIKPILEKMDGTEELLVKLNREDLLRKQRTFDNGSIPHQIHLGELHAILRRQEDFYPFLKDNREKIEKILTFRIPYYVGPLARGNSRFAWMTRKSEETITPWNFEEVVDKGASAQSFIERMTNFDKNLPNEKVLPKHSLLYEYFTVYNELTKVKYVTEGMRKPAFLSGEQKKAIVDLLFKTNRKVTVKQLKEDYFKKIECFDSVEISGVEDRFNASLGTYHDLLKIIKDKDFLDNEENEDILEDIVLTLTLFEDREMIEERLKTYAHLFDDKVMKQLKRRRYTGWGRLSRKLINGIRDKQSGKTILDFLKSDGFANRNFMQLIHDDSLTFKEDIQKAQVSGQGDSLHEHIANLAGSPAIKKGILQTVKVVDELVKVMGRHKPENIVIEMARENQTTQKGQKNSRERMKRIEEGIKELGSQILKEHPVENTQLQNEKLYLYYLQNGRDMYVDQELDINRLSDYDVDHIVPQSFLKDDSIDNKVLTRSDKARGKSDNVPSEEVVKKMKNYWRQLLNAKLITQRKFDNLTKAERGGLSELDKAGFIKRQLVETRQITKHVAQILDSRMNTKYDENDKLIREVKVITLKSKLVSDFRKDFQFYKVREINNYHHAHDAYLNAVVGTALIKKYPKLESEFVYGDYKVYDVRKMIAKSEQEIGKATAKYFFYSNIMNFFKTEITLANGEIRKRPLIETNGETGEIVWDKGRDFATVRKVLSMPQVNIVKKTEVQTGGFSKESILPKRNSDKLIARKKDWDPKKYGGFDSPTVAYSVLVVAKVEKGKSKKLKSVKELLGITIMERSSFEKNPIDFLEAKGYKEVKKDLIIKLPKYSLFELENGRKRMLASAGELQKGNELALPSKYVNFLYLASHYEKLKGSPEDNEQKQLFVEQHKHYLDEIIEQISEFSKRVILADANLDKVLSAYNKHRDKPIREQAENIIHLFTLTNLGAPAAFKYFDTTIDRKRYTSTKEVLDATLIHQSITGLYETRIDLSQLGGDGGGSSGGGGGLGIEDEYRLHETSTEPDVSLGSTWLSDFPQAWAETGGMGLAVRQAPLIIPLKATSTPVSIQQYPMSHEARLGIKPHIQRLLDQGILVPCQSPWNTPLLPVKKPGTNDYRPVQDLREVNKRVEDIHPTVPNPYNLLSGLPPSHQWYTVLDLKDAFFCLRLHPTSQPLFAFEWRDPGMGISGQLTWTRLPQGFKNSPTLFNEALHRDLADFRIQHPDLILLQYVDDILLAATSELDCQQGTRALLQTLGDLGYRASAKKAQICQKQVKYLGYLLREGQRWLTEARKETVMGQPVPKTPRQLREFLGKAGFCRLFIPGFAEMAAPLYPLTKPGTLFSWGPDQQKAYQEIKQALLTAPALGLPDLTKPFELFVDEKQGYAKGVLTQKLGPWRRPVAYLSKKLDPVAAGWPPCLRMVAAIAVLTKDAGKLTMGQPLVILAPHAVEALVKQPPDRWLSNARMTHYQAMLLDTDRVQFGPVVALNPATLLPLPEEGAPHDCLEILAETHGTRPDLTDQPIPDADHTWYTDGSSFLQEGQRKAGAAVTTETEVIWAGALPAGTSAQRAELIALTQALKMAEGKRLNVYTDSRYAFATAHIHGEIYRRRGWLTSEGREIKNKSEILALLKALFLPKRLSIIHCLGHQKGDSAEARGNRLADQAAREAAIKTPPDTSTLLIAGKRTADGSEFEKRTADGSEFESPKKKAKVE

SEQ ID NO: 2171 - protein, 2091 aa, synthetic construct
MPAAKRVKLDGGDKKYSIGLDIGTNSVGWAVITDEYKVPSKKFKVLGNTDRHSIKKNLIGALLFDSGETAEATRLKRTARRRYTRRKNRICYLQEIFSNEMAKVDDSFFHRLEESFLVEEDKKHERHPIFGNIVDEVAYHEKYPTIYHLRKKLVDSTDKADLRLIYLALAHMIKFRGHFLIEGDLNPDNSDVDKLFIQLVQTYNQLFEENPINASGVDAKAILSARLSKSRRLENLIAQLPGEKKNGLFGNLIALSLGLTPNFKSNFDLAEDAKLQLSKDTYDDDLDNLLAQIGDQYADLFLAAKNLSDAILLSDILRVNTEITKAPLSASMIKRYDEHHQDLTLLKALVRQQLPEKYKEIFFDQSKNGYAGYIDGGASQEEFYKFIKPILEKMDGTEELLVKLNREDLLRKQRTFDNGSIPHQIHLGELHAILRRQEDFYPFLKDNREKIEKILTFRIPYYVGPLARGNSRFAWMTRKSEETITPWNFEEVVDKGASAQSFIERMTNFDKNLPNEKVLPKHSLLYEYFTVYNELTKVKYVTEGMRKPAFLSGEQKKAIVDLLFKTNRKVTVKQLKEDYFKKIECFDSVEISGVEDRFNASLGTYHDLLKIIKDKDFLDNEENEDILEDIVLTLTLFEDREMIEERLKTYAHLFDDKVMKQLKRRRYTGWGRLSRKLINGIRDKQSGKTILDFLKSDGFANRNFMQLIHDDSLTFKEDIQKAQVSGQGDSLHEHIANLAGSPAIKKGILQTVKVVDELVKVMGRHKPENIVIEMARENQTTQKGQKNSRERMKRIEEGIKELGSQILKEHPVENTQLQNEKLYLYYLQNGRDMYVDQELDINRLSDYDVDHIVPQSFLKDDSIDNKVLTRSDKARGKSDNVPSEEVVKKMKNYWRQLLNAKLITQRKFDNLTKAERGGLSELDKAGFIKRQLVETRQITKHVAQILDSRMNTKYDENDKLIREVKVITLKSKLVSDFRKDFQFYKVREINNYHHAHDAYLNAVVGTALIKKYPKLESEFVYGDYKVYDVRKMIAKSEQEIGKATAKYFFYSNIMNFFKTEITLANGEIRKRPLIETNGETGEIVWDKGRDFATVRKVLSMPQVNIVKKTEVQTGGFSKESILPKRNSDKLIARKKDWDPKKYGGFDSPTVAYSVLVVAKVEKGKSKKLKSVKELLGITIMERSSFEKNPIDFLEAKGYKEVKKDLIIKLPKYSLFELENGRKRMLASAGELQKGNELALPSKYVNFLYLASHYEKLKGSPEDNEQKQLFVEQHKHYLDEIIEQISEFSKRVILADANLDKVLSAYNKHRDKPIREQAENIIHLFTLTNLGAPAAFKYFDTTIDRKRYTSTKEVLDATLIHQSITGLYETRIDLSQLGGDGGGSSGGSGGLGIEDEYRLHETSTEPDVSLGSTWLSDFPQAWAETGGMGLAVRQAPLIIPLKATSTPVSIQQYPMSHEARLGIKPHIQRLLDQGILVPCQSPWNTPLLPVKKPGTNDYRPVQDLREVNKRVEDIHPTVPNPYNLLSGLPPSHQWYTVLDLKDAFFCLRLHPTSQPLFAFEWRDPGMGISGQLTWTRLPQGFKNSPTLFNEALHRDLADFRIQHPDLILLQYVDDILLAATSELDCQQGTRALLQTLGDLGYRASAKKAQICQKQVKYLGYLLREGQRWLTEARKETVMGQPVPKTPRQLREFLGKAGFCRLFIPGFAEMAAPLYPLTKPGTLFSWGPDQQKAYQEIKQALLTAPALGLPDLTKPFELFVDEKQGYAKGVLTQKLGPWRRPVAYLSKKLDPVAAGWPPCLRMVAAIAVLTKDAGKLTMGQPLVILAPHAVEALVKQPPDRWLSNARMTHYQAMLLDTDRVQFGPVVALNPATLLPLPEEGAPHDCLEILAETHGTRPDLTDQPIPDADHTWYTDGSSFLQEGQRKAGAAVTTETEVIWAGALPAGTSAQRAELIALTQALKMAEGKRLNVYTDSRYAFATAHIHGEIYRRRGWLTSEGREIKNKSEILALLKALFLPKRLSIIHCLGHQKGDSAEARGNRLADQAAREAAIKTPPDTSTLLIAGKRTADGSEFEKRTADGSEFESPKKKAKVE

SEQ ID NO: 2172 - protein, 2094 aa, synthetic construct
MPAAKRVKLDGGDKKYSIGLDIGTNSVGWAVITDEYKVPSKKFKVLGNTDRHSIKKNLIGALLFDSGETAEATRLKRTARRRYTRRKNRICYLQEIFSNEMAKVDDSFFHRLEESFLVEEDKKHERHPIFGNIVDEVAYHEKYPTIYHLRKKLVDSTDKADLRLIYLALAHMIKFRGHFLIEGDLNPDNSDVDKLFIQLVQTYNQLFEENPINASGVDAKAILSARLSKSRRLENLIAQLPGEKKNGLFGNLIALSLGLTPNFKSNFDLAEDAKLQLSKDTYDDDLDNLLAQIGDQYADLFLAAKNLSDAILLSDILRVNTEITKAPLSASMIKRYDEHHQDLTLLKALVRQQLPEKYKEIFFDQSKNGYAGYIDGGASQEEFYKFIKPILEKMDGTEELLVKLNREDLLRKQRTFDNGSIPHQIHLGELHAILRRQEDFYPFLKDNREKIEKILTFRIPYYVGPLARGNSRFAWMTRKSEETITPWNFEEVVDKGASAQSFIERMTNFDKNLPNEKVLPKHSLLYEYFTVYNELTKVKYVTEGMRKPAFLSGEQKKAIVDLLFKTNRKVTVKQLKEDYFKKIECFDSVEISGVEDRFNASLGTYHDLLKIIKDKDFLDNEENEDILEDIVLTLTLFEDREMIEERLKTYAHLFDDKVMKQLKRRRYTGWGRLSRKLINGIRDKQSGKTILDFLKSDGFANRNFMQLIHDDSLTFKEDIQKAQVSGQGDSLHEHIANLAGSPAIKKGILQTVKVVDELVKVMGRHKPENIVIEMARENQTTQKGQKNSRERMKRIEEGIKELGSQILKEHPVENTQLQNEKLYLYYLQNGRDMYVDQELDINRLSDYDVDHIVPQSFLKDDSIDNKVLTRSDKARGKSDNVPSEEVVKKMKNYWRQLLNAKLITQRKFDNLTKAERGGLSELDKAGFIKRQLVETRQITKHVAQILDSRMNTKYDENDKLIREVKVITLKSKLVSDFRKDFQFYKVREINNYHHAHDAYLNAVVGTALIKKYPKLESEFVYGDYKVYDVRKMIAKSEQEIGKATAKYFFYSNIMNFFKTEITLANGEIRKRPLIETNGETGEIVWDKGRDFATVRKVLSMPQVNIVKKTEVQTGGFSKESILPKRNSDKLIARKKDWDPKKYGGFDSPTVAYSVLVVAKVEKGKSKKLKSVKELLGITIMERSSFEKNPIDFLEAKGYKEVKKDLIIKLPKYSLFELENGRKRMLASAGELQKGNELALPSKYVNFLYLASHYEKLKGSPEDNEQKQLFVEQHKHYLDEIIEQISEFSKRVILADANLDKVLSAYNKHRDKPIREQAENIIHLFTLTNLGAPAAFKYFDTTIDRKRYTSTKEVLDATLIHQSITGLYETRIDLSQLGGDGGGGSGGGGSSGGLGIEDEYRLHETSTEPDVSLGSTWLSDFPQAWAETGGMGLAVRQAPLIIPLKATSTPVSIQQYPMSHEARLGIKPHIQRLLDQGILVPCQSPWNTPLLPVKKPGTNDYRPVQDLREVNKRVEDIHPTVPNPYNLLSGLPPSHQWYTVLDLKDAFFCLRLHPTSQPLFAFEWRDPGMGISGQLTWTRLPQGFKNSPTLFNEALHRDLADFRIQHPDLILLQYVDDILLAATSELDCQQGTRALLQTLGDLGYRASAKKAQICQKQVKYLGYLLREGQRWLTEARKETVMGQPVPKTPRQLREFLGKAGFCRLFIPGFAEMAAPLYPLTKPGTLFSWGPDQQKAYQEIKQALLTAPALGLPDLTKPFELFVDEKQGYAKGVLTQKLGPWRRPVAYLSKKLDPVAAGWPPCLRMVAAIAVLTKDAGKLTMGQPLVILAPHAVEALVKQPPDRWLSNARMTHYQAMLLDTDRVQFGPVVALNPATLLPLPEEGAPHDCLEILAETHGTRPDLTDQPIPDADHTWYTDGSSFLQEGQRKAGAAVTTETEVIWAGALPAGTSAQRAELIALTQALKMAEGKRLNVYTDSRYAFATAHIHGEIYRRRGWLTSEGREIKNKSEILALLKALFLPKRLSIIHCLGHQKGDSAEARGNRLADQAAREAAIKTPPDTSTLLIAGKRTADGSEFEKRTADGSEFESPKKKAKVE

SEQ ID NO: 2173 - protein, 2096 aa, synthetic construct
MPAAKRVKLDGGDKKYSIGLDIGTNSVGWAVITDEYKVPSKKFKVLGNTDRHSIKKNLIGALLFDSGETAEATRLKRTARRRYTRRKNRICYLQEIFSNEMAKVDDSFFHRLEESFLVEEDKKHERHPIFGNIVDEVAYHEKYPTIYHLRKKLVDSTDKADLRLIYLALAHMIKFRGHFLIEGDLNPDNSDVDKLFIQLVQTYNQLFEENPINASGVDAKAILSARLSKSRRLENLIAQLPGEKKNGLFGNLIALSLGLTPNFKSNFDLAEDAKLQLSKDTYDDDLDNLLAQIGDQYADLFLAAKNLSDAILLSDILRVNTEITKAPLSASMIKRYDEHHQDLTLLKALVRQQLPEKYKEIFFDQSKNGYAGYIDGGASQEEFYKFIKPILEKMDGTEELLVKLNREDLLRKQRTFDNGSIPHQIHLGELHAILRRQEDFYPFLKDNREKIEKILTFRIPYYVGPLARGNSRFAWMTRKSEETITPWNFEEVVDKGASAQSFIERMTNFDKNLPNEKVLPKHSLLYEYFTVYNELTKVKYVTEGMRKPAFLSGEQKKAIVDLLFKTNRKVTVKQLKEDYFKKIECFDSVEISGVEDRFNASLGTYHDLLKIIKDKDFLDNEENEDILEDIVLTLTLFEDREMIEERLKTYAHLFDDKVMKQLKRRRYTGWGRLSRKLINGIRDKQSGKTILDFLKSDGFANRNFMQLIHDDSLTFKEDIQKAQVSGQGDSLHEHIANLAGSPAIKKGILQTVKVVDELVKVMGRHKPENIVIEMARENQTTQKGQKNSRERMKRIEEGIKELGSQILKEHPVENTQLQNEKLYLYYLQNGRDMYVDQELDINRLSDYDVDHIVPQSFLKDDSIDNKVLTRSDKARGKSDNVPSEEVVKKMKNYWRQLLNAKLITQRKFDNLTKAERGGLSELDKAGFIKRQLVETRQITKHVAQILDSRMNTKYDENDKLIREVKVITLKSKLVSDFRKDFQFYKVREINNYHHAHDAYLNAVVGTALIKKYPKLESEFVYGDYKVYDVRKMIAKSEQEIGKATAKYFFYSNIMNFFKTEITLANGEIRKRPLIETNGETGEIVWDKGRDFATVRKVLSMPQVNIVKKTEVQTGGFSKESILPKRNSDKLIARKKDWDPKKYGGFDSPTVAYSVLVVAKVEKGKSKKLKSVKELLGITIMERSSFEKNPIDFLEAKGYKEVKKDLIIKLPKYSLFELENGRKRMLASAGELQKGNELALPSKYVNFLYLASHYEKLKGSPEDNEQKQLFVEQHKHYLDEIIEQISEFSKRVILADANLDKVLSAYNKHRDKPIREQAENIIHLFTLTNLGAPAAFKYFDTTIDRKRYTSTKEVLDATLIHQSITGLYETRIDLSQLGGDGGEAAAKGGGGSSGGLGIEDEYRLHETSTEPDVSLGSTWLSDFPQAWAETGGMGLAVRQAPLIIPLKATSTPVSIQQYPMSHEARLGIKPHIQRLLDQGILVPCQSPWNTPLLPVKKPGTNDYRPVQDLREVNKRVEDIHPTVPNPYNLLSGLPPSHQWYTVLDLKDAFFCLRLHPTSQPLFAFEWRDPGMGISGQLTWTRLPQGFKNSPTLFNEALHRDLADFRIQHPDLILLQYVDDILLAATSELDCQQGTRALLQTLGDLGYRASAKKAQICQKQVKYLGYLLREGQRWLTEARKETVMGQPVPKTPRQLREFLGKAGFCRLFIPGFAEMAAPLYPLTKPGTLFSWGPDQQKAYQEIKQALLTAPALGLPDLTKPFELFVDEKQGYAKGVLTQKLGPWRRPVAYLSKKLDPVAAGWPPCLRMVAAIAVLTKDAGKLTMGQPLVILAPHAVEALVKQPPDRWLSNARMTHYQAMLLDTDRVQFGPVVALNPATLLPLPEEGAPHDCLEILAETHGTRPDLTDQPIPDADHTWYTDGSSFLQEGQRKAGAAVTTETEVIWAGALPAGTSAQRAELIALTQALKMAEGKRLNVYTDSRYAFATAHIHGEIYRRRGWLTSEGREIKNKSEILALLKALFLPKRLSIIHCLGHQKGDSAEARGNRLADQAAREAAIKTPPDTSTLLIAGKRTADGSEFEKRTADGSEFESPKKKAKVE

SEQ ID NO: 2174 - protein, 2096 aa, synthetic construct
MPAAKRVKLDGGDKKYSIGLDIGTNSVGWAVITDEYKVPSKKFKVLGNTDRHSIKKNLIGALLFDSGETAEATRLKRTARRRYTRRKNRICYLQEIFSNEMAKVDDSFFHRLEESFLVEEDKKHERHPIFGNIVDEVAYHEKYPTIYHLRKKLVDSTDKADLRLIYLALAHMIKFRGHFLIEGDLNPDNSDVDKLFIQLVQTYNQLFEENPINASGVDAKAILSARLSKSRRLENLIAQLPGEKKNGLFGNLIALSLGLTPNFKSNFDLAEDAKLQLSKDTYDDDLDNLLAQIGDQYADLFLAAKNLSDAILLSDILRVNTEITKAPLSASMIKRYDEHHQDLTLLKALVRQQLPEKYKEIFFDQSKNGYAGYIDGGASQEEFYKFIKPILEKMDGTEELLVKLNREDLLRKQRTFDNGSIPHQIHLGELHAILRRQEDFYPFLKDNREKIEKILTFRIPYYVGPLARGNSRFAWMTRKSEETITPWNFEEVVDKGASAQSFIERMTNFDKNLPNEKVLPKHSLLYEYFTVYNELTKVKYVTEGMRKPAFLSGEQKKAIVDLLFKTNRKVTVKQLKEDYFKKIECFDSVEISGVEDRFNASLGTYHDLLKIIKDKDFLDNEENEDILEDIVLTLTLFEDREMIEERLKTYAHLFDDKVMKQLKRRRYTGWGRLSRKLINGIRDKQSGKTILDFLKSDGFANRNFMQLIHDDSLTFKEDIQKAQVSGQGDSLHEHIANLAGSPAIKKGILQTVKVVDELVKVMGRHKPENIVIEMARENQTTQKGQKNSRERMKRIEEGIKELGSQILKEHPVENTQLQNEKLYLYYLQNGRDMYVDQELDINRLSDYDVDHIVPQSFLKDDSIDNKVLTRSDKARGKSDNVPSEEVVKKMKNYWRQLLNAKLITQRKFDNLTKAERGGLSELDKAGFIKRQLVETRQITKHVAQILDSRMNTKYDENDKLIREVKVITLKSKLVSDFRKDFQFYKVREINNYHHAHDAYLNAVVGTALIKKYPKLESEFVYGDYKVYDVRKMIAKSEQEIGKATAKYFFYSNIMNFFKTEITLANGEIRKRPLIETNGETGEIVWDKGRDFATVRKVLSMPQVNIVKKTEVQTGGFSKESILPKRNSDKLIARKKDWDPKKYGGFDSPTVAYSVLVVAKVEKGKSKKLKSVKELLGITIMERSSFEKNPIDFLEAKGYKEVKKDLIIKLPKYSLFELENGRKRMLASAGELQKGNELALPSKYVNFLYLASHYEKLKGSPEDNEQKQLFVEQHKHYLDEIIEQISEFSKRVILADANLDKVLSAYNKHRDKPIREQAENIIHLFTLTNLGAPAAFKYFDTTIDRKRYTSTKEVLDATLIHQSITGLYETRIDLSQLGGDGGGGGEAAAKGSSGGLGIEDEYRLHETSTEPDVSLGSTWLSDFPQAWAETGGMGLAVRQAPLIIPLKATSTPVSIQQYPMSHEARLGIKPHIQRLLDQGILVPCQSPWNTPLLPVKKPGTNDYRPVQDLREVNKRVEDIHPTVPNPYNLLSGLPPSHQWYTVLDLKDAFFCLRLHPTSQPLFAFEWRDPGMGISGQLTWTRLPQGFKNSPTLFNEALHRDLADFRIQHPDLILLQYVDDILLAATSELDCQQGTRALLQTLGDLGYRASAKKAQICQKQVKYLGYLLREGQRWLTEARKETVMGQPVPKTPRQLREFLGKAGFCRLFIPGFAEMAAPLYPLTKPGTLFSWGPDQQKAYQEIKQALLTAPALGLPDLTKPFELFVDEKQGYAKGVLTQKLGPWRRPVAYLSKKLDPVAAGWPPCLRMVAAIAVLTKDAGKLTMGQPLVILAPHAVEALVKQPPDRWLSNARMTHYQAMLLDTDRVQFGPVVALNPATLLPLPEEGAPHDCLEILAETHGTRPDLTDQPIPDADHTWYTDGSSFLQEGQRKAGAAVTTETEVIWAGALPAGTSAQRAELIALTQALKMAEGKRLNVYTDSRYAFATAHIHGEIYRRRGWLTSEGREIKNKSEILALLKALFLPKRLSIIHCLGHQKGDSAEARGNRLADQAAREAAIKTPPDTSTLLIAGKRTADGSEFEKRTADGSEFESPKKKAKVE

SEQ ID NO: 2175 - protein, 2096 aa, synthetic construct
MPAAKRVKLDGGDKKYSIGLDIGTNSVGWAVITDEYKVPSKKFKVLGNTDRHSIKKNLIGALLFDSGETAEATRLKRTARRRYTRRKNRICYLQEIFSNEMAKVDDSFFHRLEESFLVEEDKKHERHPIFGNIVDEVAYHEKYPTIYHLRKKLVDSTDKADLRLIYLALAHMIKFRGHFLIEGDLNPDNSDVDKLFIQLVQTYNQLFEENPINASGVDAKAILSARLSKSRRLENLIAQLPGEKKNGLFGNLIALSLGLTPNFKSNFDLAEDAKLQLSKDTYDDDLDNLLAQIGDQYADLFLAAKNLSDAILLSDILRVNTEITKAPLSASMIKRYDEHHQDLTLLKALVRQQLPEKYKEIFFDQSKNGYAGYIDGGASQEEFYKFIKPILEKMDGTEELLVKLNREDLLRKQRTFDNGSIPHQIHLGELHAILRRQEDFYPFLKDNREKIEKILTFRIPYYVGPLARGNSRFAWMTRKSEETITPWNFEEVVDKGASAQSFIERMTNFDKNLPNEKVLPKHSLLYEYFTVYNELTKVKYVTEGMRKPAFLSGEQKKAIVDLLFKTNRKVTVKQLKEDYFKKIECFDSVEISGVEDRFNASLGTYHDLLKIIKDKDFLDNEENEDILEDIVLTLTLFEDREMIEERLKTYAHLFDDKVMKQLKRRRYTGWGRLSRKLINGIRDKQSGKTILDFLKSDGFANRNFMQLIHDDSLTFKEDIQKAQVSGQGDSLHEHIANLAGSPAIKKGILQTVKVVDELVKVMGRHKPENIVIEMARENQTTQKGQKNSRERMKRIEEGIKELGSQILKEHPVENTQLQNEKLYLYYLQNGRDMYVDQELDINRLSDYDVDHIVPQSFLKDDSIDNKVLTRSDKARGKSDNVPSEEVVKKMKNYWRQLLNAKLITQRKFDNLTKAERGGLSELDKAGFIKRQLVETRQITKHVAQILDSRMNTKYDENDKLIREVKVITLKSKLVSDFRKDFQFYKVREINNYHHAHDAYLNAVVGTALIKKYPKLESEFVYGDYKVYDVRKMIAKSEQEIGKATAKYFFYSNIMNFFKTEITLANGEIRKRPLIETNGETGEIVWDKGRDFATVRKVLSMPQVNIVKKTEVQTGGFSKESILPKRNSDKLIARKKDWDPKKYGGFDSPTVAYSVLVVAKVEKGKSKKLKSVKELLGITIMERSSFEKNPIDFLEAKGYKEVKKDLIIKLPKYSLFELENGRKRMLASAGELQKGNELALPSKYVNFLYLASHYEKLKGSPEDNEQKQLFVEQHKHYLDEIIEQISEFSKRVILADANLDKVLSAYNKHRDKPIREQAENIIHLFTLTNLGAPAAFKYFDTTIDRKRYTSTKEVLDATLIHQSITGLYETRIDLSQLGGDGGGGSGGGEAAAKGGLGIEDEYRLHETSTEPDVSLGSTWLSDFPQAWAETGGMGLAVRQAPLIIPLKATSTPVSIQQYPMSHEARLGIKPHIQRLLDQGILVPCQSPWNTPLLPVKKPGTNDYRPVQDLREVNKRVEDIHPTVPNPYNLLSGLPPSHQWYTVLDLKDAFFCLRLHPTSQPLFAFEWRDPGMGISGQLTWTRLPQGFKNSPTLFNEALHRDLADFRIQHPDLILLQYVDDILLAATSELDCQQGTRALLQTLGDLGYRASAKKAQICQKQVKYLGYLLREGQRWLTEARKETVMGQPVPKTPRQLREFLGKAGFCRLFIPGFAEMAAPLYPLTKPGTLFSWGPDQQKAYQEIKQALLTAPALGLPDLTKPFELFVDEKQGYAKGVLTQKLGPWRRPVAYLSKKLDPVAAGWPPCLRMVAAIAVLTKDAGKLTMGQPLVILAPHAVEALVKQPPDRWLSNARMTHYQAMLLDTDRVQFGPVVALNPATLLPLPEEGAPHDCLEILAETHGTRPDLTDQPIPDADHTWYTDGSSFLQEGQRKAGAAVTTETEVIWAGALPAGTSAQRAELIALTQALKMAEGKRLNVYTDSRYAFATAHIHGEIYRRRGWLTSEGREIKNKSEILALLKALFLPKRLSIIHCLGHQKGDSAEARGNRLADQAAREAAIKTPPDTSTLLIAGKRTADGSEFEKRTADGSEFESPKKKAKVE

SEQ ID NO: 2176 - protein, 2091 aa, synthetic construct
MPAAKRVKLDGGDKKYSIGLDIGTNSVGWAVITDEYKVPSKKFKVLGNTDRHSIKKNLIGALLFDSGETAEATRLKRTARRRYTRRKNRICYLQEIFSNEMAKVDDSFFHRLEESFLVEEDKKHERHPIFGNIVDEVAYHEKYPTIYHLRKKLVDSTDKADLRLIYLALAHMIKFRGHFLIEGDLNPDNSDVDKLFIQLVQTYNQLFEENPINASGVDAKAILSARLSKSRRLENLIAQLPGEKKNGLFGNLIALSLGLTPNFKSNFDLAEDAKLQLSKDTYDDDLDNLLAQIGDQYADLFLAAKNLSDAILLSDILRVNTEITKAPLSASMIKRYDEHHQDLTLLKALVRQQLPEKYKEIFFDQSKNGYAGYIDGGASQEEFYKFIKPILEKMDGTEELLVKLNREDLLRKQRTFDNGSIPHQIHLGELHAILRRQEDFYPFLKDNREKIEKILTFRIPYYVGPLARGNSRFAWMTRKSEETITPWNFEEVVDKGASAQSFIERMTNFDKNLPNEKVLPKHSLLYEYFTVYNELTKVKYVTEGMRKPAFLSGEQKKAIVDLLFKTNRKVTVKQLKEDYFKKIECFDSVEISGVEDRFNASLGTYHDLLKIIKDKDFLDNEENEDILEDIVLTLTLFEDREMIEERLKTYAHLFDDKVMKQLKRRRYTGWGRLSRKLINGIRDKQSGKTILDFLKSDGFANRNFMQLIHDDSLTFKEDIQKAQVSGQGDSLHEHIANLAGSPAIKKGILQTVKVVDELVKVMGRHKPENIVIEMARENQTTQKGQKNSRERMKRIEEGIKELGSQILKEHPVENTQLQNEKLYLYYLQNGRDMYVDQELDINRLSDYDVDHIVPQSFLKDDSIDNKVLTRSDKARGKSDNVPSEEVVKKMKNYWRQLLNAKLITQRKFDNLTKAERGGLSELDKAGFIKRQLVETRQITKHVAQILDSRMNTKYDENDKLIREVKVITLKSKLVSDFRKDFQFYKVREINNYHHAHDAYLNAVVGTALIKKYPKLESEFVYGDYKVYDVRKMIAKSEQEIGKATAKYFFYSNIMNFFKTEITLANGEIRKRPLIETNGETGEIVWDKGRDFATVRKVLSMPQVNIVKKTEVQTGGFSKESILPKRNSDKLIARKKDWDPKKYGGFDSPTVAYSVLVVAKVEKGKSKKLKSVKELLGITIMERSSFEKNPIDFLEAKGYKEVKKDLIIKLPKYSLFELENGRKRMLASAGELQKGNELALPSKYVNFLYLASHYEKLKGSPEDNEQKQLFVEQHKHYLDEIIEQISEFSKRVILADANLDKVLSAYNKHRDKPIREQAENIIHLFTLTNLGAPAAFKYFDTTIDRKRYTSTKEVLDATLIHQSITGLYETRIDLSQLGGDGGGSSGSSGGLGIEDEYRLHETSTEPDVSLGSTWLSDFPQAWAETGGMGLAVRQAPLIIPLKATSTPVSIQQYPMSHEARLGIKPHIQRLLDQGILVPCQSPWNTPLLPVKKPGTNDYRPVQDLREVNKRVEDIHPTVPNPYNLLSGLPPSHQWYTVLDLKDAFFCLRLHPTSQPLFAFEWRDPGMGISGQLTWTRLPQGFKNSPTLFNEALHRDLADFRIQHPDLILLQYVDDILLAATSELDCQQGTRALLQTLGDLGYRASAKKAQICQKQVKYLGYLLREGQRWLTEARKETVMGQPVPKTPRQLREFLGKAGFCRLFIPGFAEMAAPLYPLTKPGTLFSWGPDQQKAYQEIKQALLTAPALGLPDLTKPFELFVDEKQGYAKGVLTQKLGPWRRPVAYLSKKLDPVAAGWPPCLRMVAAIAVLTKDAGKLTMGQPLVILAPHAVEALVKQPPDRWLSNARMTHYQAMLLDTDRVQFGPVVALNPATLLPLPEEGAPHDCLEILAETHGTRPDLTDQPIPDADHTWYTDGSSFLQEGQRKAGAAVTTETEVIWAGALPAGTSAQRAELIALTQALKMAEGKRLNVYTDSRYAFATAHIHGEIYRRRGWLTSEGREIKNKSEILALLKALFLPKRLSIIHCLGHQKGDSAEARGNRLADQAAREAAIKTPPDTSTLLIAGKRTADGSEFEKRTADGSEFESPKKKAKVE

SEQ ID NO: 2177 - protein, 2096 aa, synthetic construct
MPAAKRVKLDGGDKKYSIGLDIGTNSVGWAVITDEYKVPSKKFKVLGNTDRHSIKKNLIGALLFDSGETAEATRLKRTARRRYTRRKNRICYLQEIFSNEMAKVDDSFFHRLEESFLVEEDKKHERHPIFGNIVDEVAYHEKYPTIYHLRKKLVDSTDKADLRLIYLALAHMIKFRGHFLIEGDLNPDNSDVDKLFIQLVQTYNQLFEENPINASGVDAKAILSARLSKSRRLENLIAQLPGEKKNGLFGNLIALSLGLTPNFKSNFDLAEDAKLQLSKDTYDDDLDNLLAQIGDQYADLFLAAKNLSDAILLSDILRVNTEITKAPLSASMIKRYDEHHQDLTLLKALVRQQLPEKYKEIFFDQSKNGYAGYIDGGASQEEFYKFIKPILEKMDGTEELLVKLNREDLLRKQRTFDNGSIPHQIHLGELHAILRRQEDFYPFLKDNREKIEKILTFRIPYYVGPLARGNSRFAWMTRKSEETITPWNFEEVVDKGASAQSFIERMTNFDKNLPNEKVLPKHSLLYEYFTVYNELTKVKYVTEGMRKPAFLSGEQKKAIVDLLFKTNRKVTVKQLKEDYFKKIECFDSVEISGVEDRFNASLGTYHDLLKIIKDKDFLDNEENEDILEDIVLTLTLFEDREMIEERLKTYAHLFDDKVMKQLKRRRYTGWGRLSRKLINGIRDKQSGKTILDFLKSDGFANRNFMQLIHDDSLTFKEDIQKAQVSGQGDSLHEHIANLAGSPAIKKGILQTVKVVDELVKVMGRHKPENIVIEMARENQTTQKGQKNSRERMKRIEEGIKELGSQILKEHPVENTQLQNEKLYLYYLQNGRDMYVDQELDINRLSDYDVDHIVPQSFLKDDSIDNKVLTRSDKARGKSDNVPSEEVVKKMKNYWRQLLNAKLITQRKFDNLTKAERGGLSELDKAGFIKRQLVETRQITKHVAQILDSRMNTKYDENDKLIREVKVITLKSKLVSDFRKDFQFYKVREINNYHHAHDAYLNAVVGTALIKKYPKLESEFVYGDYKVYDVRKMIAKSEQEIGKATAKYFFYSNIMNFFKTEITLANGEIRKRPLIETNGETGEIVWDKGRDFATVRKVLSMPQVNIVKKTEVQTGGFSKESILPKRNSDKLIARKKDWDPKKYGGFDSPTVAYSVLVVAKVEKGKSKKLKSVKELLGITIMERSSFEKNPIDFLEAKGYKEVKKDLIIKLPKYSLFELENGRKRMLASAGELQKGNELALPSKYVNFLYLASHYEKLKGSPEDNEQKQLFVEQHKHYLDEIIEQISEFSKRVILADANLDKVLSAYNKHRDKPIREQAENIIHLFTLTNLGAPAAFKYFDTTIDRKRYTSTKEVLDATLIHQSITGLYETRIDLSQLGGDGGGSSEAAAKGGSGGLGIEDEYRLHETSTEPDVSLGSTWLSDFPQAWAETGGMGLAVRQAPLIIPLKATSTPVSIQQYPMSHEARLGIKPHIQRLLDQGILVPCQSPWNTPLLPVKKPGTNDYRPVQDLREVNKRVEDIHPTVPNPYNLLSGLPPSHQWYTVLDLKDAFFCLRLHPTSQPLFAFEWRDPGMGISGQLTWTRLPQGFKNSPTLFNEALHRDLADFRIQHPDLILLQYVDDILLAATSELDCQQGTRALLQTLGDLGYRASAKKAQICQKQVKYLGYLLREGQRWLTEARKETVMGQPVPKTPRQLREFLGKAGFCRLFIPGFAEMAAPLYPLTKPGTLFSWGPDQQKAYQEIKQALLTAPALGLPDLTKPFELFVDEKQGYAKGVLTQKLGPWRRPVAYLSKKLDPVAAGWPPCLRMVAAIAVLTKDAGKLTMGQPLVILAPHAVEALVKQPPDRWLSNARMTHYQAMLLDTDRVQFGPVVALNPATLLPLPEEGAPHDCLEILAETHGTRPDLTDQPIPDADHTWYTDGSSFLQEGQRKAGAAVTTETEVIWAGALPAGTSAQRAELIALTQALKMAEGKRLNVYTDSRYAFATAHIHGEIYRRRGWLTSEGREIKNKSEILALLKALFLPKRLSIIHCLGHQKGDSAEARGNRLADQAAREAAIKTPPDTSTLLIAGKRTADGSEFEKRTADGSEFESPKKKAKVE

SEQ ID NO: 2178 - protein, 2096 aa, synthetic construct
MPAAKRVKLDGGDKKYSIGLDIGTNSVGWAVITDEYKVPSKKFKVLGNTDRHSIKKNLIGALLFDSGETAEATRLKRTARRRYTRRKNRICYLQEIFSNEMAKVDDSFFHRLEESFLVEEDKKHERHPIFGNIVDEVAYHEKYPTIYHLRKKLVDSTDKADLRLIYLALAHMIKFRGHFLIEGDLNPDNSDVDKLFIQLVQTYNQLFEENPINASGVDAKAILSARLSKSRRLENLIAQLPGEKKNGLFGNLIALSLGLTPNFKSNFDLAEDAKLQLSKDTYDDDLDNLLAQIGDQYADLFLAAKNLSDAILLSDILRVNTEITKAPLSASMIKRYDEHHQDLTLLKALVRQQLPEKYKEIFFDQSKNGYAGYIDGGASQEEFYKFIKPILEKMDGTEELLVKLNREDLLRKQRTFDNGSIPHQIHLGELHAILRRQEDFYPFLKDNREKIEKILTFRIPYYVGPLARGNSRFAWMTRKSEETITPWNFEEVVDKGASAQSFIERMTNFDKNLPNEKVLPKHSLLYEYFTVYNELTKVKYVTEGMRKPAFLSGEQKKAIVDLLFKTNRKVTVKQLKEDYFKKIECFDSVEISGVEDRFNASLGTYHDLLKIIKDKDFLDNEENEDILEDIVLTLTLFEDREMIEERLKTYAHLFDDKVMKQLKRRRYTGWGRLSRKLINGIRDKQSGKTILDFLKSDGFANRNFMQLIHDDSLTFKEDIQKAQVSGQGDSLHEHIANLAGSPAIKKGILQTVKVVDELVKVMGRHKPENIVIEMARENQTTQKGQKNSRERMKRIEEGIKELGSQILKEHPVENTQLQNEKLYLYYLQNGRDMYVDQELDINRLSDYDVDHIVPQSFLKDDSIDNKVLTRSDKARGKSDNVPSEEVVKKMKNYWRQLLNAKLITQRKFDNLTKAERGGLSELDKAGFIKRQLVETRQITKHVAQILDSRMNTKYDENDKLIREVKVITLKSKLVSDFRKDFQFYKVREINNYHHAHDAYLNAVVGTALIKKYPKLESEFVYGDYKVYDVRKMIAKSEQEIGKATAKYFFYSNIMNFFKTEITLANGEIRKRPLIETNGETGEIVWDKGRDFATVRKVLSMPQVNIVKKTEVQTGGFSKESILPKRNSDKLIARKKDWDPKKYGGFDSPTVAYSVLVVAKVEKGKSKKLKSVKELLGITIMERSSFEKNPIDFLEAKGYKEVKKDLIIKLPKYSLFELENGRKRMLASAGELQKGNELALPSKYVNFLYLASHYEKLKGSPEDNEQKQLFVEQHKHYLDEIIEQISEFSKRVILADANLDKVLSAYNKHRDKPIREQAENIIHLFTLTNLGAPAAFKYFDTTIDRKRYTSTKEVLDATLIHQSITGLYETRIDLSQLGGDGGPAPGGGEAAAKGGLGIEDEYRLHETSTEPDVSLGSTWLSDFPQAWAETGGMGLAVRQAPLIIPLKATSTPVSIQQYPMSHEARLGIKPHIQRLLDQGILVPCQSPWNTPLLPVKKPGTNDYRPVQDLREVNKRVEDIHPTVPNPYNLLSGLPPSHQWYTVLDLKDAFFCLRLHPTSQPLFAFEWRDPGMGISGQLTWTRLPQGFKNSPTLFNEALHRDLADFRIQHPDLILLQYVDDILLAATSELDCQQGTRALLQTLGDLGYRASAKKAQICQKQVKYLGYLLREGQRWLTEARKETVMGQPVPKTPRQLREFLGKAGFCRLFIPGFAEMAAPLYPLTKPGTLFSWGPDQQKAYQEIKQALLTAPALGLPDLTKPFELFVDEKQGYAKGVLTQKLGPWRRPVAYLSKKLDPVAAGWPPCLRMVAAIAVLTKDAGKLTMGQPLVILAPHAVEALVKQPPDRWLSNARMTHYQAMLLDTDRVQFGPVVALNPATLLPLPEEGAPHDCLEILAETHGTRPDLTDQPIPDADHTWYTDGSSFLQEGQRKAGAAVTTETEVIWAGALPAGTSAQRAELIALTQALKMAEGKRLNVYTDSRYAFATAHIHGEIYRRRGWLTSEGREIKNKSEILALLKALFLPKRLSIIHCLGHQKGDSAEARGNRLADQAAREAAIKTPPDTSTLLIAGKRTADGSEFEKRTADGSEFESPKKKAKVE

SEQ ID NO: 2179 - protein, 2091 aa, synthetic construct
MPAAKRVKLDGGDKKYSIGLDIGTNSVGWAVITDEYKVPSKKFKVLGNTDRHSIKKNLIGALLFDSGETAEATRLKRTARRRYTRRKNRICYLQEIFSNEMAKVDDSFFHRLEESFLVEEDKKHERHPIFGNIVDEVAYHEKYPTIYHLRKKLVDSTDKADLRLIYLALAHMIKFRGHFLIEGDLNPDNSDVDKLFIQLVQTYNQLFEENPINASGVDAKAILSARLSKSRRLENLIAQLPGEKKNGLFGNLIALSLGLTPNFKSNFDLAEDAKLQLSKDTYDDDLDNLLAQIGDQYADLFLAAKNLSDAILLSDILRVNTEITKAPLSASMIKRYDEHHQDLTLLKALVRQQLPEKYKEIFFDQSKNGYAGYIDGGASQEEFYKFIKPILEKMDGTEELLVKLNREDLLRKQRTFDNGSIPHQIHLGELHAILRRQEDFYPFLKDNREKIEKILTFRIPYYVGPLARGNSRFAWMTRKSEETITPWNFEEVVDKGASAQSFIERMTNFDKNLPNEKVLPKHSLLYEYFTVYNELTKVKYVTEGMRKPAFLSGEQKKAIVDLLFKTNRKVTVKQLKEDYFKKIECFDSVEISGVEDRFNASLGTYHDLLKIIKDKDFLDNEENEDILEDIVLTLTLFEDREMIEERLKTYAHLFDDKVMKQLKRRRYTGWGRLSRKLINGIRDKQSGKTILDFLKSDGFANRNFMQLIHDDSLTFKEDIQKAQVSGQGDSLHEHIANLAGSPAIKKGILQTVKVVDELVKVMGRHKPENIVIEMARENQTTQKGQKNSRERMKRIEEGIKELGSQILKEHPVENTQLQNEKLYLYYLQNGRDMYVDQELDINRLSDYDVDHIVPQSFLKDDSIDNKVLTRSDKARGKSDNVPSEEVVKKMKNYWRQLLNAKLITQRKFDNLTKAERGGLSELDKAGFIKRQLVETRQITKHVAQILDSRMNTKYDENDKLIREVKVITLKSKLVSDFRKDFQFYKVREINNYHHAHDAYLNAVVGTALIKKYPKLESEFVYGDYKVYDVRKMIAKSEQEIGKATAKYFFYSNIMNFFKTEITLANGEIRKRPLIETNGETGEIVWDKGRDFATVRKVLSMPQVNIVKKTEVQTGGFSKESILPKRNSDKLIARKKDWDPKKYGGFDSPTVAYSVLVVAKVEKGKSKKLKSVKELLGITIMERSSFEKNPIDFLEAKGYKEVKKDLIIKLPKYSLFELENGRKRMLASAGELQKGNELALPSKYVNFLYLASHYEKLKGSPEDNEQKQLFVEQHKHYLDEIIEQISEFSKRVILADANLDKVLSAYNKHRDKPIREQAENIIHLFTLTNLGAPAAFKYFDTTIDRKRYTSTKEVLDATLIHQSITGLYETRIDLSQLGGDGGGGGGSSGGLGIEDEYRLHETSTEPDVSLGSTWLSDFPQAWAETGGMGLAVRQAPLIIPLKATSTPVSIQQYPMSHEARLGIKPHIQRLLDQGILVPCQSPWNTPLLPVKKPGTNDYRPVQDLREVNKRVEDIHPTVPNPYNLLSGLPPSHQWYTVLDLKDAFFCLRLHPTSQPLFAFEWRDPGMGISGQLTWTRLPQGFKNSPTLFNEALHRDLADFRIQHPDLILLQYVDDILLAATSELDCQQGTRALLQTLGDLGYRASAKKAQICQKQVKYLGYLLREGQRWLTEARKETVMGQPVPKTPRQLREFLGKAGFCRLFIPGFAEMAAPLYPLTKPGTLFSWGPDQQKAYQEIKQALLTAPALGLPDLTKPFELFVDEKQGYAKGVLTQKLGPWRRPVAYLSKKLDPVAAGWPPCLRMVAAIAVLTKDAGKLTMGQPLVILAPHAVEALVKQPPDRWLSNARMTHYQAMLLDTDRVQFGPVVALNPATLLPLPEEGAPHDCLEILAETHGTRPDLTDQPIPDADHTWYTDGSSFLQEGQRKAGAAVTTETEVIWAGALPAGTSAQRAELIALTQALKMAEGKRLNVYTDSRYAFATAHIHGEIYRRRGWLTSEGREIKNKSEILALLKALFLPKRLSIIHCLGHQKGDSAEARGNRLADQAAREAAIKTPPDTSTLLIAGKRTADGSEFEKRTADGSEFESPKKKAKVE

SEQ ID NO: 2180 - protein, 2094 aa, synthetic construct
MPAAKRVKLDGGDKKYSIGLDIGTNSVGWAVITDEYKVPSKKFKVLGNTDRHSIKKNLIGALLFDSGETAEATRLKRTARRRYTRRKNRICYLQEIFSNEMAKVDDSFFHRLEESFLVEEDKKHERHPIFGNIVDEVAYHEKYPTIYHLRKKLVDSTDKADLRLIYLALAHMIKFRGHFLIEGDLNPDNSDVDKLFIQLVQTYNQLFEENPINASGVDAKAILSARLSKSRRLENLIAQLPGEKKNGLFGNLIALSLGLTPNFKSNFDLAEDAKLQLSKDTYDDDLDNLLAQIGDQYADLFLAAKNLSDAILLSDILRVNTEITKAPLSASMIKRYDEHHQDLTLLKALVRQQLPEKYKEIFFDQSKNGYAGYIDGGASQEEFYKFIKPILEKMDGTEELLVKLNREDLLRKQRTFDNGSIPHQIHLGELHAILRRQEDFYPFLKDNREKIEKILTFRIPYYVGPLARGNSRFAWMTRKSEETITPWNFEEVVDKGASAQSFIERMTNFDKNLPNEKVLPKHSLLYEYFTVYNELTKVKYVTEGMRKPAFLSGEQKKAIVDLLFKTNRKVTVKQLKEDYFKKIECFDSVEISGVEDRFNASLGTYHDLLKIIKDKDFLDNEENEDILEDIVLTLTLFEDREMIEERLKTYAHLFDDKVMKQLKRRRYTGWGRLSRKLINGIRDKQSGKTILDFLKSDGFANRNFMQLIHDDSLTFKEDIQKAQVSGQGDSLHEHIANLAGSPAIKKGILQTVKVVDELVKVMGRHKPENIVIEMARENQTTQKGQKNSRERMKRIEEGIKELGSQILKEHPVENTQLQNEKLYLYYLQNGRDMYVDQELDINRLSDYDVDHIVPQSFLKDDSIDNKVLTRSDKARGKSDNVPSEEVVKKMKNYWRQLLNAKLITQRKFDNLTKAERGGLSELDKAGFIKRQLVETRQITKHVAQILDSRMNTKYDENDKLIREVKVITLKSKLVSDFRKDFQFYKVREINNYHHAHDAYLNAVVGTALIKKYPKLESEFVYGDYKVYDVRKMIAKSEQEIGKATAKYFFYSNIMNFFKTEITLANGEIRKRPLIETNGETGEIVWDKGRDFATVRKVLSMPQVNIVKKTEVQTGGFSKESILPKRNSDKLIARKKDWDPKKYGGFDSPTVAYSVLVVAKVEKGKSKKLKSVKELLGITIMERSSFEKNPIDFLEAKGYKEVKKDLIIKLPKYSLFELENGRKRMLASAGELQKGNELALPSKYVNFLYLASHYEKLKGSPEDNEQKQLFVEQHKHYLDEIIEQISEFSKRVILADANLDKVLSAYNKHRDKPIREQAENIIHLFTLTNLGAPAAFKYFDTTIDRKRYTSTKEVLDATLIHQSITGLYETRIDLSQLGGDGGGGGPAPGSSGGLGIEDEYRLHETSTEPDVSLGSTWLSDFPQAWAETGGMGLAVRQAPLIIPLKATSTPVSIQQYPMSHEARLGIKPHIQRLLDQGILVPCQSPWNTPLLPVKKPGTNDYRPVQDLREVNKRVEDIHPTVPNPYNLLSGLPPSHQWYTVLDLKDAFFCLRLHPTSQPLFAFEWRDPGMGISGQLTWTRLPQGFKNSPTLFNEALHRDLADFRIQHPDLILLQYVDDILLAATSELDCQQGTRALLQTLGDLGYRASAKKAQICQKQVKYLGYLLREGQRWLTEARKETVMGQPVPKTPRQLREFLGKAGFCRLFIPGFAEMAAPLYPLTKPGTLFSWGPDQQKAYQEIKQALLTAPALGLPDLTKPFELFVDEKQGYAKGVLTQKLGPWRRPVAYLSKKLDPVAAGWPPCLRMVAAIAVLTKDAGKLTMGQPLVILAPHAVEALVKQPPDRWLSNARMTHYQAMLLDTDRVQFGPVVALNPATLLPLPEEGAPHDCLEILAETHGTRPDLTDQPIPDADHTWYTDGSSFLQEGQRKAGAAVTTETEVIWAGALPAGTSAQRAELIALTQALKMAEGKRLNVYTDSRYAFATAHIHGEIYRRRGWLTSEGREIKNKSEILALLKALFLPKRLSIIHCLGHQKGDSAEARGNRLADQAAREAAIKTPPDTSTLLIAGKRTADGSEFEKRTADGSEFESPKKKAKVE

SEQ ID NO: 2181 - protein, 2118 aa, synthetic construct
MPAAKRVKLDGGDKKYSIGLDIGTNSVGWAVITDEYKVPSKKFKVLGNTDRHSIKKNLIGALLFDSGETAEATRLKRTARRRYTRRKNRICYLQEIFSNEMAKVDDSFFHRLEESFLVEEDKKHERHPIFGNIVDEVAYHEKYPTIYHLRKKLVDSTDKADLRLIYLALAHMIKFRGHFLIEGDLNPDNSDVDKLFIQLVQTYNQLFEENPINASGVDAKAILSARLSKSRRLENLIAQLPGEKKNGLFGNLIALSLGLTPNFKSNFDLAEDAKLQLSKDTYDDDLDNLLAQIGDQYADLFLAAKNLSDAILLSDILRVNTEITKAPLSASMIKRYDEHHQDLTLLKALVRQQLPEKYKEIFFDQSKNGYAGYIDGGASQEEFYKFIKPILEKMDGTEELLVKLNREDLLRKQRTFDNGSIPHQIHLGELHAILRRQEDFYPFLKDNREKIEKILTFRIPYYVGPLARGNSRFAWMTRKSEETITPWNFEEVVDKGASAQSFIERMTNFDKNLPNEKVLPKHSLLYEYFTVYNELTKVKYVTEGMRKPAFLSGEQKKAIVDLLFKTNRKVTVKQLKEDYFKKIECFDSVEISGVEDRFNASLGTYHDLLKIIKDKDFLDNEENEDILEDIVLTLTLFEDREMIEERLKTYAHLFDDKVMKQLKRRRYTGWGRLSRKLINGIRDKQSGKTILDFLKSDGFANRNFMQLIHDDSLTFKEDIQKAQVSGQGDSLHEHIANLAGSPAIKKGILQTVKVVDELVKVMGRHKPENIVIEMARENQTTQKGQKNSRERMKRIEEGIKELGSQILKEHPVENTQLQNEKLYLYYLQNGRDMYVDQELDINRLSDYDVDHIVPQSFLKDDSIDNKVLTRSDKARGKSDNVPSEEVVKKMKNYWRQLLNAKLITQRKFDNLTKAERGGLSELDKAGFIKRQLVETRQITKHVAQILDSRMNTKYDENDKLIREVKVITLKSKLVSDFRKDFQFYKVREINNYHHAHDAYLNAVVGTALIKKYPKLESEFVYGDYKVYDVRKMIAKSEQEIGKATAKYFFYSNIMNFFKTEITLANGEIRKRPLIETNGETGEIVWDKGRDFATVRKVLSMPQVNIVKKTEVQTGGFSKESILPKRNSDKLIARKKDWDPKKYGGFDSPTVAYSVLVVAKVEKGKSKKLKSVKELLGITIMERSSFEKNPIDFLEAKGYKEVKKDLIIKLPKYSLFELENGRKRMLASAGELQKGNELALPSKYVNFLYLASHYEKLKGSPEDNEQKQLFVEQHKHYLDEIIEQISEFSKRVILADANLDKVLSAYNKHRDKPIREQAENIIHLFTLTNLGAPAAFKYFDTTIDRKRYTSTKEVLDATLIHQSITGLYETRIDLSQLGGDGGSGGSSGGSSGSETPGTSESATPESSGGSSGGSSGGLGIEDEYRLHETSTEPDVSLGSTWLSDFPQAWAETGGMGLAVRQAPLIIPLKATSTPVSIQQYPMSHEARLGIKPHIQRLLDQGILVPCQSPWNTPLLPVKKPGTNDYRPVQDLREVNKRVEDIHPTVPNPYNLLSGLPPSHQWYTVLDLKDAFFCLRLHPTSQPLFAFEWRDPGMGISGQLTWTRLPQGFKNSPTLFNEALHRDLADFRIQHPDLILLQYVDDILLAATSELDCQQGTRALLQTLGDLGYRASAKKAQICQKQVKYLGYLLREGQRWLTEARKETVMGQPVPKTPRQLREFLGKAGFCRLFIPGFAEMAAPLYPLTKPGTLFSWGPDQQKAYQEIKQALLTAPALGLPDLTKPFELFVDEKQGYAKGVLTQKLGPWRRPVAYLSKKLDPVAAGWPPCLRMVAAIAVLTKDAGKLTMGQPLVILAPHAVEALVKQPPDRWLSNARMTHYQAMLLDTDRVQFGPVVALNPATLLPLPEEGAPHDCLEILAETHGTRPDLTDQPIPDADHTWYTDGSSFLQEGQRKAGAAVTTETEVIWAGALPAGTSAQRAELIALTQALKMAEGKRLNVYTDSRYAFATAHIHGEIYRRRGWLTSEGREIKNKSEILALLKALFLPKRLSIIHCLGHQKGDSAEARGNRLADQAAREAAIKTPPDTSTLLIAGKRTADGSEFEKRTADGSEFESPKKKAKVE

SEQ ID NO: 2182 - protein, 2096 aa, synthetic construct
MPAAKRVKLDGGDKKYSIGLDIGTNSVGWAVITDEYKVPSKKFKVLGNTDRHSIKKNLIGALLFDSGETAEATRLKRTARRRYTRRKNRICYLQEIFSNEMAKVDDSFFHRLEESFLVEEDKKHERHPIFGNIVDEVAYHEKYPTIYHLRKKLVDSTDKADLRLIYLALAHMIKFRGHFLIEGDLNPDNSDVDKLFIQLVQTYNQLFEENPINASGVDAKAILSARLSKSRRLENLIAQLPGEKKNGLFGNLIALSLGLTPNFKSNFDLAEDAKLQLSKDTYDDDLDNLLAQIGDQYADLFLAAKNLSDAILLSDILRVNTEITKAPLSASMIKRYDEHHQDLTLLKALVRQQLPEKYKEIFFDQSKNGYAGYIDGGASQEEFYKFIKPILEKMDGTEELLVKLNREDLLRKQRTFDNGSIPHQIHLGELHAILRRQEDFYPFLKDNREKIEKILTFRIPYYVGPLARGNSRFAWMTRKSEETITPWNFEEVVDKGASAQSFIERMTNFDKNLPNEKVLPKHSLLYEYFTVYNELTKVKYVTEGMRKPAFLSGEQKKAIVDLLFKTNRKVTVKQLKEDYFKKIECFDSVEISGVEDRFNASLGTYHDLLKIIKDKDFLDNEENEDILEDIVLTLTLFEDREMIEERLKTYAHLFDDKVMKQLKRRRYTGWGRLSRKLINGIRDKQSGKTILDFLKSDGFANRNFMQLIHDDSLTFKEDIQKAQVSGQGDSLHEHIANLAGSPAIKKGILQTVKVVDELVKVMGRHKPENIVIEMARENQTTQKGQKNSRERMKRIEEGIKELGSQILKEHPVENTQLQNEKLYLYYLQNGRDMYVDQELDINRLSDYDVDHIVPQSFLKDDSIDNKVLTRSDKARGKSDNVPSEEVVKKMKNYWRQLLNAKLITQRKFDNLTKAERGGLSELDKAGFIKRQLVETRQITKHVAQILDSRMNTKYDENDKLIREVKVITLKSKLVSDFRKDFQFYKVREINNYHHAHDAYLNAVVGTALIKKYPKLESEFVYGDYKVYDVRKMIAKSEQEIGKATAKYFFYSNIMNFFKTEITLANGEIRKRPLIETNGETGEIVWDKGRDFATVRKVLSMPQVNIVKKTEVQTGGFSKESILPKRNSDKLIARKKDWDPKKYGGFDSPTVAYSVLVVAKVEKGKSKKLKSVKELLGITIMERSSFEKNPIDFLEAKGYKEVKKDLIIKLPKYSLFELENGRKRMLASAGELQKGNELALPSKYVNFLYLASHYEKLKGSPEDNEQKQLFVEQHKHYLDEIIEQISEFSKRVILADANLDKVLSAYNKHRDKPIREQAENIIHLFTLTNLGAPAAFKYFDTTIDRKRYTSTKEVLDATLIHQSITGLYETRIDLSQLGGDGGGSSGGGEAAAKGGTLGIEDEYRLHETSTEPDVSLGSTWLSDFPQAWAETGGMGLAVRQAPLIIPLKATSTPVSIQQYPMSHEARLGIKPHIQRLLDQGILVPCQSPWNTPLLPVKKPGTNDYRPVQDLREVNKRVEDIHPTVPNPYNLLSGLPPSHQWYTVLDLKDAFFCLRLHPTSQPLFAFEWRDPGMGISGQLTWTRLPQGFKNSPTLFDEALHRDLADFRIQHPDLILLQYVDDILLAATSELDCQQGTRALLQTLGDLGYRASAKKAQICQKQVKYLGYLLREGQRWLTEARKETVMGQPVPKTPRQLREFLGTAGFCRLWIPGFAEMAAPLYPLTKTGTLFSWGPDQQKAYQEIKQALLTAPALGLPDLTKPFELFVDEKQGYAKGVLTQKLGPWRRPVAYLSKKLDPVAAGWPPCLRMVAAIAVLTKDAGKLTMGQPLVILAPHAVEALVKQPPDRWLSNARMTHYQAMLLDTDRVQFGPVVALNPATLLPLPEEGAPHDCLEILAETHGTRPDLTDQPIPDADHTWYTDGSSFLQEGQRKAGAAVTTETEVIWAGALPAGTSAQRAELIALTQALKMAEGKRLNVYTDSRYAFATAHIHGEIYRRRGLLTSEGREIKNKSEILALLKALFLPKRLSIIHCLGHQKGDSAEARGNRLADQAAREAAIKTPPDTSTLLAGKRTADGSEFEKRTADGSEFESPKKKAKVE

SEQ ID NO: 2183 - protein, 2091 aa, synthetic construct
MPAAKRVKLDGGDKKYSIGLDIGTNSVGWAVITDEYKVPSKKFKVLGNTDRHSIKKNLIGALLFDSGETAEATRLKRTARRRYTRRKNRICYLQEIFSNEMAKVDDSFFHRLEESFLVEEDKKHERHPIFGNIVDEVAYHEKYPTIYHLRKKLVDSTDKADLRLIYLALAHMIKFRGHFLIEGDLNPDNSDVDKLFIQLVQTYNQLFEENPINASGVDAKAILSARLSKSRRLENLIAQLPGEKKNGLFGNLIALSLGLTPNFKSNFDLAEDAKLQLSKDTYDDDLDNLLAQIGDQYADLFLAAKNLSDAILLSDILRVNTEITKAPLSASMIKRYDEHHQDLTLLKALVRQQLPEKYKEIFFDQSKNGYAGYIDGGASQEEFYKFIKPILEKMDGTEELLVKLNREDLLRKQRTFDNGSIPHQIHLGELHAILRRQEDFYPFLKDNREKIEKILTFRIPYYVGPLARGNSRFAWMTRKSEETITPWNFEEVVDKGASAQSFIERMTNFDKNLPNEKVLPKHSLLYEYFTVYNELTKVKYVTEGMRKPAFLSGEQKKAIVDLLFKTNRKVTVKQLKEDYFKKIECFDSVEISGVEDRFNASLGTYHDLLKIIKDKDFLDNEENEDILEDIVLTLTLFEDREMIEERLKTYAHLFDDKVMKQLKRRRYTGWGRLSRKLINGIRDKQSGKTILDFLKSDGFANRNFMQLIHDDSLTFKEDIQKAQVSGQGDSLHEHIANLAGSPAIKKGILQTVKVVDELVKVMGRHKPENIVIEMARENQTTQKGQKNSRERMKRIEEGIKELGSQILKEHPVENTQLQNEKLYLYYLQNGRDMYVDQELDINRLSDYDVDHIVPQSFLKDDSIDNKVLTRSDKARGKSDNVPSEEVVKKMKNYWRQLLNAKLITQRKFDNLTKAERGGLSELDKAGFIKRQLVETRQITKHVAQILDSRMNTKYDENDKLIREVKVITLKSKLVSDFRKDFQFYKVREINNYHHAHDAYLNAVVGTALIKKYPKLESEFVYGDYKVYDVRKMIAKSEQEIGKATAKYFFYSNIMNFFKTEITLANGEIRKRPLIETNGETGEIVWDKGRDFATVRKVLSMPQVNIVKKTEVQTGGFSKESILPKRNSDKLIARKKDWDPKKYGGFDSPTVAYSVLVVAKVEKGKSKKLKSVKELLGITIMERSSFEKNPIDFLEAKGYKEVKKDLIIKLPKYSLFELENGRKRMLASAGELQKGNELALPSKYVNFLYLASHYEKLKGSPEDNEQKQLFVEQHKHYLDEIIEQISEFSKRVILADANLDKVLSAYNKHRDKPIREQAENIIHLFTLTNLGAPAAFKYFDTTIDRKRYTSTKEVLDATLIHQSITGLYETRIDLSQLGGDGGGSSPAPGGTLGIEDEYRLHETSTEPDVSLGSTWLSDFPQAWAETGGMGLAVRQAPLIIPLKATSTPVSIQQYPMSHEARLGIKPHIQRLLDQGILVPCQSPWNTPLLPVKKPGTNDYRPVQDLREVNKRVEDIHPTVPNPYNLLSGLPPSHQWYTVLDLKDAFFCLRLHPTSQPLFAFEWRDPGMGISGQLTWTRLPQGFKNSPTLFDEALHRDLADFRIQHPDLILLQYVDDILLAATSELDCQQGTRALLQTLGDLGYRASAKKAQICQKQVKYLGYLLREGQRWLTEARKETVMGQPVPKTPRQLREFLGTAGFCRLWIPGFAEMAAPLYPLTKTGTLFSWGPDQQKAYQEIKQALLTAPALGLPDLTKPFELFVDEKQGYAKGVLTQKLGPWRRPVAYLSKKLDPVAAGWPPCLRMVAAIAVLTKDAGKLTMGQPLVILAPHAVEALVKQPPDRWLSNARMTHYQAMLLDTDRVQFGPVVALNPATLLPLPEEGAPHDCLEILAETHGTRPDLTDQPIPDADHTWYTDGSSFLQEGQRKAGAAVTTETEVIWAGALPAGTSAQRAELIALTQALKMAEGKRLNVYTDSRYAFATAHIHGEIYRRRGLLTSEGREIKNKSEILALLKALFLPKRLSIIHCLGHQKGDSAEARGNRLADQAAREAAIKTPPDTSTLLAGKRTADGSEFEKRTADGSEFESPKKKAKVE

SEQ ID NO: 2184 - protein, 2096 aa, synthetic construct
MPAAKRVKLDGGDKKYSIGLDIGTNSVGWAVITDEYKVPSKKFKVLGNTDRHSIKKNLIGALLFDSGETAEATRLKRTARRRYTRRKNRICYLQEIFSNEMAKVDDSFFHRLEESFLVEEDKKHERHPIFGNIVDEVAYHEKYPTIYHLRKKLVDSTDKADLRLIYLALAHMIKFRGHFLIEGDLNPDNSDVDKLFIQLVQTYNQLFEENPINASGVDAKAILSARLSKSRRLENLIAQLPGEKKNGLFGNLIALSLGLTPNFKSNFDLAEDAKLQLSKDTYDDDLDNLLAQIGDQYADLFLAAKNLSDAILLSDILRVNTEITKAPLSASMIKRYDEHHQDLTLLKALVRQQLPEKYKEIFFDQSKNGYAGYIDGGASQEEFYKFIKPILEKMDGTEELLVKLNREDLLRKQRTFDNGSIPHQIHLGELHAILRRQEDFYPFLKDNREKIEKILTFRIPYYVGPLARGNSRFAWMTRKSEETITPWNFEEVVDKGASAQSFIERMTNFDKNLPNEKVLPKHSLLYEYFTVYNELTKVKYVTEGMRKPAFLSGEQKKAIVDLLFKTNRKVTVKQLKEDYFKKIECFDSVEISGVEDRFNASLGTYHDLLKIIKDKDFLDNEENEDILEDIVLTLTLFEDREMIEERLKTYAHLFDDKVMKQLKRRRYTGWGRLSRKLINGIRDKQSGKTILDFLKSDGFANRNFMQLIHDDSLTFKEDIQKAQVSGQGDSLHEHIANLAGSPAIKKGILQTVKVVDELVKVMGRHKPENIVIEMARENQTTQKGQKNSRERMKRIEEGIKELGSQILKEHPVENTQLQNEKLYLYYLQNGRDMYVDQELDINRLSDYDVDHIVPQSFLKDDSIDNKVLTRSDKARGKSDNVPSEEVVKKMKNYWRQLLNAKLITQRKFDNLTKAERGGLSELDKAGFIKRQLVETRQITKHVAQILDSRMNTKYDENDKLIREVKVITLKSKLVSDFRKDFQFYKVREINNYHHAHDAYLNAVVGTALIKKYPKLESEFVYGDYKVYDVRKMIAKSEQEIGKATAKYFFYSNIMNFFKTEITLANGEIRKRPLIETNGETGEIVWDKGRDFATVRKVLSMPQVNIVKKTEVQTGGFSKESILPKRNSDKLIARKKDWDPKKYGGFDSPTVAYSVLVVAKVEKGKSKKLKSVKELLGITIMERSSFEKNPIDFLEAKGYKEVKKDLIIKLPKYSLFELENGRKRMLASAGELQKGNELALPSKYVNFLYLASHYEKLKGSPEDNEQKQLFVEQHKHYLDEIIEQISEFSKRVILADANLDKVLSAYNKHRDKPIREQAENIIHLFTLTNLGAPAAFKYFDTTIDRKRYTSTKEVLDATLIHQSITGLYETRIDLSQLGGDGGGGGEAAAKGGSGGTLGIEDEYRLHETSTEPDVSLGSTWLSDFPQAWAETGGMGLAVRQAPLIIPLKATSTPVSIQQYPMSHEARLGIKPHIQRLLDQGILVPCQSPWNTPLLPVKKPGTNDYRPVQDLREVNKRVEDIHPTVPNPYNLLSGLPPSHQWYTVLDLKDAFFCLRLHPTSQPLFAFEWRDPGMGISGQLTWTRLPQGFKNSPTLFDEALHRDLADFRIQHPDLILLQYVDDILLAATSELDCQQGTRALLQTLGDLGYRASAKKAQICQKQVKYLGYLLREGQRWLTEARKETVMGQPVPKTPRQLREFLGTAGFCRLWIPGFAEMAAPLYPLTKTGTLFSWGPDQQKAYQEIKQALLTAPALGLPDLTKPFELFVDEKQGYAKGVLTQKLGPWRRPVAYLSKKLDPVAAGWPPCLRMVAAIAVLTKDAGKLTMGQPLVILAPHAVEALVKQPPDRWLSNARMTHYQAMLLDTDRVQFGPVVALNPATLLPLPEEGAPHDCLEILAETHGTRPDLTDQPIPDADHTWYTDGSSFLQEGQRKAGAAVTTETEVIWAGALPAGTSAQRAELIALTQALKMAEGKRLNVYTDSRYAFATAHIHGEIYRRRGLLTSEGREIKNKSEILALLKALFLPKRLSIIHCLGHQKGDSAEARGNRLADQAAREAAIKTPPDTSTLLAGKRTADGSEFEKRTADGSEFESPKKKAKVE

SEQ ID NO: 2185 - protein, 2096 aa, synthetic construct
MPAAKRVKLDGGDKKYSIGLDIGTNSVGWAVITDEYKVPSKKFKVLGNTDRHSIKKNLIGALLFDSGETAEATRLKRTARRRYTRRKNRICYLQEIFSNEMAKVDDSFFHRLEESFLVEEDKKHERHPIFGNIVDEVAYHEKYPTIYHLRKKLVDSTDKADLRLIYLALAHMIKFRGHFLIEGDLNPDNSDVDKLFIQLVQTYNQLFEENPINASGVDAKAILSARLSKSRRLENLIAQLPGEKKNGLFGNLIALSLGLTPNFKSNFDLAEDAKLQLSKDTYDDDLDNLLAQIGDQYADLFLAAKNLSDAILLSDILRVNTEITKAPLSASMIKRYDEHHQDLTLLKALVRQQLPEKYKEIFFDQSKNGYAGYIDGGASQEEFYKFIKPILEKMDGTEELLVKLNREDLLRKQRTFDNGSIPHQIHLGELHAILRRQEDFYPFLKDNREKIEKILTFRIPYYVGPLARGNSRFAWMTRKSEETITPWNFEEVVDKGASAQSFIERMTNFDKNLPNEKVLPKHSLLYEYFTVYNELTKVKYVTEGMRKPAFLSGEQKKAIVDLLFKTNRKVTVKQLKEDYFKKIECFDSVEISGVEDRFNASLGTYHDLLKIIKDKDFLDNEENEDILEDIVLTLTLFEDREMIEERLKTYAHLFDDKVMKQLKRRRYTGWGRLSRKLINGIRDKQSGKTILDFLKSDGFANRNFMQLIHDDSLTFKEDIQKAQVSGQGDSLHEHIANLAGSPAIKKGILQTVKVVDELVKVMGRHKPENIVIEMARENQTTQKGQKNSRERMKRIEEGIKELGSQILKEHPVENTQLQNEKLYLYYLQNGRDMYVDQELDINRLSDYDVDHIVPQSFLKDDSIDNKVLTRSDKARGKSDNVPSEEVVKKMKNYWRQLLNAKLITQRKFDNLTKAERGGLSELDKAGFIKRQLVETRQITKHVAQILDSRMNTKYDENDKLIREVKVITLKSKLVSDFRKDFQFYKVREINNYHHAHDAYLNAVVGTALIKKYPKLESEFVYGDYKVYDVRKMIAKSEQEIGKATAKYFFYSNIMNFFKTEITLANGEIRKRPLIETNGETGEIVWDKGRDFATVRKVLSMPQVNIVKKTEVQTGGFSKESILPKRNSDKLIARKKDWDPKKYGGFDSPTVAYSVLVVAKVEKGKSKKLKSVKELLGITIMERSSFEKNPIDFLEAKGYKEVKKDLIIKLPKYSLFELENGRKRMLASAGELQKGNELALPSKYVNFLYLASHYEKLKGSPEDNEQKQLFVEQHKHYLDEIIEQISEFSKRVILADANLDKVLSAYNKHRDKPIREQAENIIHLFTLTNLGAPAAFKYFDTTIDRKRYTSTKEVLDATLIHQSITGLYETRIDLSQLGGDGGEAAAKPAPGSSGGTLGIEDEYRLHETSTEPDVSLGSTWLSDFPQAWAETGGMGLAVRQAPLIIPLKATSTPVSIQQYPMSHEARLGIKPHIQRLLDQGILVPCQSPWNTPLLPVKKPGTNDYRPVQDLREVNKRVEDIHPTVPNPYNLLSGLPPSHQWYTVLDLKDAFFCLRLHPTSQPLFAFEWRDPGMGISGQLTWTRLPQGFKNSPTLFDEALHRDLADFRIQHPDLILLQYVDDILLAATSELDCQQGTRALLQTLGDLGYRASAKKAQICQKQVKYLGYLLREGQRWLTEARKETVMGQPVPKTPRQLREFLGTAGFCRLWIPGFAEMAAPLYPLTKTGTLFSWGPDQQKAYQEIKQALLTAPALGLPDLTKPFELFVDEKQGYAKGVLTQKLGPWRRPVAYLSKKLDPVAAGWPPCLRMVAAIAVLTKDAGKLTMGQPLVILAPHAVEALVKQPPDRWLSNARMTHYQAMLLDTDRVQFGPVVALNPATLLPLPEEGAPHDCLEILAETHGTRPDLTDQPIPDADHTWYTDGSSFLQEGQRKAGAAVTTETEVIWAGALPAGTSAQRAELIALTQALKMAEGKRLNVYTDSRYAFATAHIHGEIYRRRGLLTSEGREIKNKSEILALLKALFLPKRLSIIHCLGHQKGDSAEARGNRLADQAAREAAIKTPPDTSTLLAGKRTADGSEFEKRTADGSEFESPKKKAKVE

SEQ ID NO: 2186 - protein, 2096 aa, synthetic construct; identical to SEQ ID NO: 2069

SEQ ID NO: 2187 - protein, 2096 aa, synthetic construct
MPAAKRVKLDGGDKKYSIGLDIGTNSVGWAVITDEYKVPSKKFKVLGNTDRHSIKKNLIGALLFDSGETAEATRLKRTARRRYTRRKNRICYLQEIFSNEMAKVDDSFFHRLEESFLVEEDKKHERHPIFGNIVDEVAYHEKYPTIYHLRKKLVDSTDKADLRLIYLALAHMIKFRGHFLIEGDLNPDNSDVDKLFIQLVQTYNQLFEENPINASGVDAKAILSARLSKSRRLENLIAQLPGEKKNGLFGNLIALSLGLTPNFKSNFDLAEDAKLQLSKDTYDDDLDNLLAQIGDQYADLFLAAKNLSDAILLSDILRVNTEITKAPLSASMIKRYDEHHQDLTLLKALVRQQLPEKYKEIFFDQSKNGYAGYIDGGASQEEFYKFIKPILEKMDGTEELLVKLNREDLLRKQRTFDNGSIPHQIHLGELHAILRRQEDFYPFLKDNREKIEKILTFRIPYYVGPLARGNSRFAWMTRKSEETITPWNFEEVVDKGASAQSFIERMTNFDKNLPNEKVLPKHSLLYEYFTVYNELTKVKYVTEGMRKPAFLSGEQKKAIVDLLFKTNRKVTVKQLKEDYFKKIECFDSVEISGVEDRFNASLGTYHDLLKIIKDKDFLDNEENEDILEDIVLTLTLFEDREMIEERLKTYAHLFDDKVMKQLKRRRYTGWGRLSRKLINGIRDKQSGKTILDFLKSDGFANRNFMQLIHDDSLTFKEDIQKAQVSGQGDSLHEHIANLAGSPAIKKGILQTVKVVDELVKVMGRHKPENIVIEMARENQTTQKGQKNSRERMKRIEEGIKELGSQILKEHPVENTQLQNEKLYLYYLQNGRDMYVDQELDINRLSDYDVDHIVPQSFLKDDSIDNKVLTRSDKARGKSDNVPSEEVVKKMKNYWRQLLNAKLITQRKFDNLTKAERGGLSELDKAGFIKRQLVETRQITKHVAQILDSRMNTKYDENDKLIREVKVITLKSKLVSDFRKDFQFYKVREINNYHHAHDAYLNAVVGTALIKKYPKLESEFVYGDYKVYDVRKMIAKSEQEIGKATAKYFFYSNIMNFFKTEITLANGEIRKRPLIETNGETGEIVWDKGRDFATVRKVLSMPQVNIVKKTEVQTGGFSKESILPKRNSDKLIARKKDWDPKKYGGFDSPTVAYSVLVVAKVEKGKSKKLKSVKELLGITIMERSSFEKNPIDFLEAKGYKEVKKDLIIKLPKYSLFELENGRKRMLASAGELQKGNELALPSKYVNFLYLASHYEKLKGSPEDNEQKQLFVEQHKHYLDEIIEQISEFSKRVILADANLDKVLSAYNKHRDKPIREQAENIIHLFTLTNLGAPAAFKYFDTTIDRKRYTSTKEVLDATLIHQSITGLYETRIDLSQLGGDGGPAPAPAPAPAPGGTLGIEDEYRLHETSTEPDVSLGSTWLSDFPQAWAETGGMGLAVRQAPLIIPLKATSTPVSIQQYPMSHEARLGIKPHIQRLLDQGILVPCQSPWNTPLLPVKKPGTNDYRPVQDLREVNKRVEDIHPTVPNPYNLLSGLPPSHQWYTVLDLKDAFFCLRLHPTSQPLFAFEWRDPGMGISGQLTWTRLPQGFKNSPTLFNEALHRDLADFRIQHPDLILLQYVDDILLAATSELDCQQGTRALLQTLGDLGYRASAKKAQICQKQVKYLGYLLREGQRWLTEARKETVMGQPVPKTPRQLREFLGTAGFCRLWIPGFAEMAAPLYPLTKPGTLFSWGPDQQKAYQEIKQALLTAPALGLPDLTKPFELFVDEKQGYAKGVLTQKLGPWRRPVAYLSKKLDPVAAGWPPCLRMVAAIAVLTKDAGKLTMGQPLVILAPHAVEALVKQPPDRWLSNARMTHYQAMLLDTDRVQFGPVVALNPATLLPLPEEGAPHDCLEILAETHGTRPDLTDQPIPDADHTWYTDGSSFLQEGQRKAGAAVTTETEVIWAGALPAGTSAQRAELIALTQALKMAEGKRLNVYTDSRYAFATAHIHGEIYRRRGWLTSEGREIKNKSEILALLKALFLPKRLSIIHCLGHQKGDSAEARGNRLADQAAREAAIKTPPDTSTLLAGKRTADGSEFEKRTADGSEFESPKKKAKVE

SEQ ID NO: 2188 - protein, 2110 aa, synthetic construct
MPAAKRVKLDGGDKKYSIGLDIGTNSVGWAVITDEYKVPSKKFKVLGNTDRHSIKKNLIGALLFDSGETAEATRLKRTARRRYTRRKNRICYLQEIFSNEMAKVDDSFFHRLEESFLVEEDKKHERHPIFGNIVDEVAYHEKYPTIYHLRKKLVDSTDKADLRLIYLALAHMIKFRGHFLIEGDLNPDNSDVDKLFIQLVQTYNQLFEENPINASGVDAKAILSARLSKSRRLENLIAQLPGEKKNGLFGNLIALSLGLTPNFKSNFDLAEDAKLQLSKDTYDDDLDNLLAQIGDQYADLFLAAKNLSDAILLSDILRVNTEITKAPLSASMIKRYDEHHQDLTLLKALVRQQLPEKYKEIFFDQSKNGYAGYIDGGASQEEFYKFIKPILEKMDGTEELLVKLNREDLLRKQRTFDNGSIPHQIHLGELHAILRRQEDFYPFLKDNREKIEKILTFRIPYYVGPLARGNSRFAWMTRKSEETITPWNFEEVVDKGASAQSFIERMTNFDKNLPNEKVLPKHSLLYEYFTVYNELTKVKYVTEGMRKPAFLSGEQKKAIVDLLFKTNRKVTVKQLKEDYFKKIECFDSVEISGVEDRFNASLGTYHDLLKIIKDKDFLDNEENEDILEDIVLTLTLFEDREMIEERLKTYAHLFDDKVMKQLKRRRYTGWGRLSRKLINGIRDKQSGKTILDFLKSDGFANRNFMQLIHDDSLTFKEDIQKAQVSGQGDSLHEHIANLAGSPAIKKGILQTVKVVDELVKVMGRHKPENIVIEMARENQTTQKGQKNSRERMKRIEEGIKELGSQILKEHPVENTQLQNEKLYLYYLQNGRDMYVDQELDINRLSDYDVDHIVPQSFLKDDSIDNKVLTRSDKARGKSDNVPSEEVVKKMKNYWRQLLNAKLITQRKFDNLTKAERGGLSELDKAGFIKRQLVETRQITKHVAQILDSRMNTKYDENDKLIREVKVITLKSKLVSDFRKDFQFYKVREINNYHHAHDAYLNAVVGTALIKKYPKLESEFVYGDYKVYDVRKMIAKSEQEIGKATAKYFFYSNIMNFFKTEITLANGEIRKRPLIETNGETGEIVWDKGRDFATVRKVLSMPQVNIVKKTEVQTGGFSKESILPKRNSDKLIARKKDWDPKKYGGFDSPTVAYSVLVVAKVEKGKSKKLKSVKELLGITIMERSSFEKNPIDFLEAKGYKEVKKDLIIKLPKYSLFELENGRKRMLASAGELQKGNELALPSKYVNFLYLASHYEKLKGSPEDNEQKQLFVEQHKHYLDEIIEQISEFSKRVILADANLDKVLSAYNKHRDKPIREQAENIIHLFTLTNLGAPAAFKYFDTTIDRKRYTSTKEVLDATLIHQSITGLYETRIDLSQLGGDGGEAAAKEAAAKEAAAKEAAAKEAAAKGGTLGIEDEYRLHETSTEPDVSLGSTWLSDFPQAWAETGGMGLAVRQAPLIIPLKATSTPVSIQQYPMSHEARLGIKPHIQRLLDQGILVPCQSPWNTPLLPVKKPGTNDYRPVQDLREVNKRVEDIHPTVPNPYNLLSGLPPSHQWYTVLDLKDAFFCLRLHPTSQPLFAFEWRDPGMGISGQLTWTRLPQGFKNSPTLFNEALHRDLADFRIQHPDLILLQYVDDILLAATSELDCQQGTRALLQTLGDLGYRASAKKAQICQKQVKYLGYLLREGQRWLTEARKETVMGQPVPKTPRQLREFLGTAGFCRLWIPGFAEMAAPLYPLTKPGTLFSWGPDQQKAYQEIKQALLTAPALGLPDLTKPFELFVDEKQGYAKGVLTQKLGPWRRPVAYLSKKLDPVAAGWPPCLRMVAAIAVLTKDAGKLTMGQPLVILAPHAVEALVKQPPDRWLSNARMTHYQAMLLDTDRVQFGPVVALNPATLLPLPEEGAPHDCLEILAETHGTRPDLTDQPIPDADHTWYTDGSSFLQEGQRKAGAAVTTETEVIWAGALPAGTSAQRAELIALTQALKMAEGKRLNVYTDSRYAFATAHIHGEIYRRRGWLTSEGREIKNKSEILALLKALFLPKRLSIIHCLGHQKGDSAEARGNRLADQAAREAAIKTPPDTSTLLAGKRTADGSEFEKRTADGSEFESPKKKAKVE

SEQ ID NO: 2189 - protein, 2115 aa, synthetic construct
MPAAKRVKLDGGDKKYSIGLDIGTNSVGWAVITDEYKVPSKKFKVLGNTDRHSIKKNLIGALLFDSGETAEATRLKRTARRRYTRRKNRICYLQEIFSNEMAKVDDSFFHRLEESFLVEEDKKHERHPIFGNIVDEVAYHEKYPTIYHLRKKLVDSTDKADLRLIYLALAHMIKFRGHFLIEGDLNPDNSDVDKLFIQLVQTYNQLFEENPINASGVDAKAILSARLSKSRRLENLIAQLPGEKKNGLFGNLIALSLGLTPNFKSNFDLAEDAKLQLSKDTYDDDLDNLLAQIGDQYADLFLAAKNLSDAILLSDILRVNTEITKAPLSASMIKRYDEHHQDLTLLKALVRQQLPEKYKEIFFDQSKNGYAGYIDGGASQEEFYKFIKPILEKMDGTEELLVKLNREDLLRKQRTFDNGSIPHQIHLGELHAILRRQEDFYPFLKDNREKIEKILTFRIPYYVGPLARGNSRFAWMTRKSEETITPWNFEEVVDKGASAQSFIERMTNFDKNLPNEKVLPKHSLLYEYFTVYNELTKVKYVTEGMRKPAFLSGEQKKAIVDLLFKTNRKVTVKQLKEDYFKKIECFDSVEISGVEDRFNASLGTYHDLLKIIKDKDFLDNEENEDILEDIVLTLTLFEDREMIEERLKTYAHLFDDKVMKQLKRRRYTGWGRLSRKLINGIRDKQSGKTILDFLKSDGFANRNFMQLIHDDSLTFKEDIQKAQVSGQGDSLHEHIANLAGSPAIKKGILQTVKVVDELVKVMGRHKPENIVIEMARENQTTQKGQKNSRERMKRIEEGIKELGSQILKEHPVENTQLQNEKLYLYYLQNGRDMYVDQELDINRLSDYDVDHIVPQSFLKDDSIDNKVLTRSDKARGKSDNVPSEEVVKKMKNYWRQLLNAKLITQRKFDNLTKAERGGLSELDKAGFIKRQLVETRQITKHVAQILDSRMNTKYDENDKLIREVKVITLKSKLVSDFRKDFQFYKVREINNYHHAHDAYLNAVVGTALIKKYPKLESEFVYGDYKVYDVRKMIAKSEQEIGKATAKYFFYSNIMNFFKTEITLANGEIRKRPLIETNGETGEIVWDKGRDFATVRKVLSMPQVNIVKKTEVQTGGFSKESILPKRNSDKLIARKKDWDPKKYGGFDSPTVAYSVLVVAKVEKGKSKKLKSVKELLGITIMERSSFEKNPIDFLEAKGYKEVKKDLIIKLPKYSLFELENGRKRMLASAGELQKGNELALPSKYVNFLYLASHYEKLKGSPEDNEQKQLFVEQHKHYLDEIIEQISEFSKRVILADANLDKVLSAYNKHRDKPIREQAENIIHLFTLTNLGAPAAFKYFDTTIDRKRYTSTKEVLDATLIHQSITGLYETRIDLSQLGGDGGEAAAKEAAAKEAAAKEAAAKEAAAKEAAAKGGTLGIEDEYRLHETSTEPDVSLGSTWLSDFPQAWAETGGMGLAVRQAPLIIPLKATSTPVSIQQYPMSHEARLGIKPHIQRLLDQGILVPCQSPWNTPLLPVKKPGTNDYRPVQDLREVNKRVEDIHPTVPNPYNLLSGLPPSHQWYTVLDLKDAFFCLRLHPTSQPLFAFEWRDPGMGISGQLTWTRLPQGFKNSPTLFNEALHRDLADFRIQHPDLILLQYVDDILLAATSELDCQQGTRALLQTLGDLGYRASAKKAQICQKQVKYLGYLLREGQRWLTEARKETVMGQPVPKTPRQLREFLGTAGFCRLWIPGFAEMAAPLYPLTKPGTLFSWGPDQQKAYQEIKQALLTAPALGLPDLTKPFELFVDEKQGYAKGVLTQKLGPWRRPVAYLSKKLDPVAAGWPPCLRMVAAIAVLTKDAGKLTMGQPLVILAPHAVEALVKQPPDRWLSNARMTHYQAMLLDTDRVQFGPVVALNPATLLPLPEEGAPHDCLEILAETHGTRPDLTDQPIPDADHTWYTDGSSFLQEGQRKAGAAVTTETEVIWAGALPAGTSAQRAELIALTQALKMAEGKRLNVYTDSRYAFATAHIHGEIYRRRGWLTSEGREIKNKSEILALLKALFLPKRLSIIHCLGHQKGDSAEARGNRLADQAAREAAIKTPPDTSTLLAGKRTADGSEFEKRTADGSEFESPKKKAKVE

SEQ ID NO: 2190 - protein, 2096 aa, synthetic construct
MPAAKRVKLDGGDKKYSIGLDIGTNSVGWAVITDEYKVPSKKFKVLGNTDRHSIKKNLIGALLFDSGETAEATRLKRTARRRYTRRKNRICYLQEIFSNEMAKVDDSFFHRLEESFLVEEDKKHERHPIFGNIVDEVAYHEKYPTIYHLRKKLVDSTDKADLRLIYLALAHMIKFRGHFLIEGDLNPDNSDVDKLFIQLVQTYNQLFEENPINASGVDAKAILSARLSKSRRLENLIAQLPGEKKNGLFGNLIALSLGLTPNFKSNFDLAEDAKLQLSKDTYDDDLDNLLAQIGDQYADLFLAAKNLSDAILLSDILRVNTEITKAPLSASMIKRYDEHHQDLTLLKALVRQQLPEKYKEIFFDQSKNGYAGYIDGGASQEEFYKFIKPILEKMDGTEELLVKLNREDLLRKQRTFDNGSIPHQIHLGELHAILRRQEDFYPFLKDNREKIEKILTFRIPYYVGPLARGNSRFAWMTRKSEETITPWNFEEVVDKGASAQSFIERMTNFDKNLPNEKVLPKHSLLYEYFTVYNELTKVKYVTEGMRKPAFLSGEQKKAIVDLLFKTNRKVTVKQLKEDYFKKIECFDSVEISGVEDRFNASLGTYHDLLKIIKDKDFLDNEENEDILEDIVLTLTLFEDREMIEERLKTYAHLFDDKVMKQLKRRRYTGWGRLSRKLINGIRDKQSGKTILDFLKSDGFANRNFMQLIHDDSLTFKEDIQKAQVSGQGDSLHEHIANLAGSPAIKKGILQTVKVVDELVKVMGRHKPENIVIEMARENQTTQKGQKNSRERMKRIEEGIKELGSQILKEHPVENTQLQNEKLYLYYLQNGRDMYVDQELDINRLSDYDVDHIVPQSFLKDDSIDNKVLTRSDKARGKSDNVPSEEVVKKMKNYWRQLLNAKLITQRKFDNLTKAERGGLSELDKAGFIKRQLVETRQITKHVAQILDSRMNTKYDENDKLIREVKVITLKSKLVSDFRKDFQFYKVREINNYHHAHDAYLNAVVGTALIKKYPKLESEFVYGDYKVYDVRKMIAKSEQEIGKATAKYFFYSNIMNFFKTEITLANGEIRKRPLIETNGETGEIVWDKGRDFATVRKVLSMPQVNIVKKTEVQTGGFSKESILPKRNSDKLIARKKDWDPKKYGGFDSPTVAYSVLVVAKVEKGKSKKLKSVKELLGITIMERSSFEKNPIDFLEAKGYKEVKKDLIIKLPKYSLFELENGRKRMLASAGELQKGNELALPSKYVNFLYLASHYEKLKGSPEDNEQKQLFVEQHKHYLDEIIEQISEFSKRVILADANLDKVLSAYNKHRDKPIREQAENIIHLFTLTNLGAPAAFKYFDTTIDRKRYTSTKEVLDATLIHQSITGLYETRIDLSQLGGDGGEAAAKGSSGGSGGTLGIEDEYRLHETSTEPDVSLGSTWLSDFPQAWAETGGMGLAVRQAPLIIPLKATSTPVSIQQYPMSHEARLGIKPHIQRLLDQGILVPCQSPWNTPLLPVKKPGTNDYRPVQDLREVNKRVEDIHPTVPNPYNLLSGLPPSHQWYTVLDLKDAFFCLRLHPTSQPLFAFEWRDPGMGISGQLTWTRLPQGFKNSPTLFNEALHRDLADFRIQHPDLILLQYVDDILLAATSELDCQQGTRALLQTLGDLGYRASAKKAQICQKQVKYLGYLLREGQRWLTEARKETVMGQPVPKTPRQLREFLGTAGFCRLWIPGFAEMAAPLYPLTKPGTLFSWGPDQQKAYQEIKQALLTAPALGLPDLTKPFELFVDEKQGYAKGVLTQKLGPWRRPVAYLSKKLDPVAAGWPPCLRMVAAIAVLTKDAGKLTMGQPLVILAPHAVEALVKQPPDRWLSNARMTHYQAMLLDTDRVQFGPVVALNPATLLPLPEEGAPHDCLEILAETHGTRPDLTDQPIPDADHTWYTDGSSFLQEGQRKAGAAVTTETEVIWAGALPAGTSAQRAELIALTQALKMAEGKRLNVYTDSRYAFATAHIHGEIYRRRGWLTSEGREIKNKSEILALLKALFLPKRLSIIHCLGHQKGDSAEARGNRLADQAAREAAIKTPPDTSTLLAGKRTADGSEFEKRTADGSEFESPKKKAKVE

SEQ ID NO: 2191 - protein, 2105 aa, synthetic construct; identical to SEQ ID NO: 2070

SEQ ID NO: 2192 - protein, 2096 aa, synthetic construct
MPAAKRVKLDGGDKKYSIGLDIGTNSVGWAVITDEYKVPSKKFKVLGNTDRHSIKKNLIGALLFDSGETAEATRLKRTARRRYTRRKNRICYLQEIFSNEMAKVDDSFFHRLEESFLVEEDKKHERHPIFGNIVDEVAYHEKYPTIYHLRKKLVDSTDKADLRLIYLALAHMIKFRGHFLIEGDLNPDNSDVDKLFIQLVQTYNQLFEENPINASGVDAKAILSARLSKSRRLENLIAQLPGEKKNGLFGNLIALSLGLTPNFKSNFDLAEDAKLQLSKDTYDDDLDNLLAQIGDQYADLFLAAKNLSDAILLSDILRVNTEITKAPLSASMIKRYDEHHQDLTLLKALVRQQLPEKYKEIFFDQSKNGYAGYIDGGASQEEFYKFIKPILEKMDGTEELLVKLNREDLLRKQRTFDNGSIPHQIHLGELHAILRRQEDFYPFLKDNREKIEKILTFRIPYYVGPLARGNSRFAWMTRKSEETITPWNFEEVVDKGASAQSFIERMTNFDKNLPNEKVLPKHSLLYEYFTVYNELTKVKYVTEGMRKPAFLSGEQKKAIVDLLFKTNRKVTVKQLKEDYFKKIECFDSVEISGVEDRFNASLGTYHDLLKIIKDKDFLDNEENEDILEDIVLTLTLFEDREMIEERLKTYAHLFDDKVMKQLKRRRYTGWGRLSRKLINGIRDKQSGKTILDFLKSDGFANRNFMQLIHDDSLTFKEDIQKAQVSGQGDSLHEHIANLAGSPAIKKGILQTVKVVDELVKVMGRHKPENIVIEMARENQTTQKGQKNSRERMKRIEEGIKELGSQILKEHPVENTQLQNEKLYLYYLQNGRDMYVDQELDINRLSDYDVDHIVPQSFLKDDSIDNKVLTRSDKARGKSDNVPSEEVVKKMKNYWRQLLNAKLITQRKFDNLTKAERGGLSELDKAGFIKRQLVETRQITKHVAQILDSRMNTKYDENDKLIREVKVITLKSKLVSDFRKDFQFYKVREINNYHHAHDAYLNAVVGTALIKKYPKLESEFVYGDYKVYDVRKMIAKSEQEIGKATAKYFFYSNIMNFFKTEITLANGEIRKRPLIETNGETGEIVWDKGRDFATVRKVLSMPQVNIVKKTEVQTGGFSKESILPKRNSDKLIARKKDWDPKKYGGFDSPTVAYSVLVVAKVEKGKSKKLKSVKELLGITIMERSSFEKNPIDFLEAKGYKEVKKDLIIKLPKYSLFELENGRKRMLASAGELQKGNELALPSKYVNFLYLASHYEKLKGSPEDNEQKQLFVEQHKHYLDEIIEQISEFSKRVILADANLDKVLSAYNKHRDKPIREQAENIIHLFTLTNLGAPAAFKYFDTTIDRKRYTSTKEVLDATLIHQSITGLYETRIDLSQLGGDGGGGSPAPEAAAKGGTLGIEDEYRLHETSTEPDVSLGSTWLSDFPQAWAETGGMGLAVRQAPLIIPLKATSTPVSIQQYPMSHEARLGIKPHIQRLLDQGILVPCQSPWNTPLLPVKKPGTNDYRPVQDLREVNKRVEDIHPTVPNPYNLLSGLPPSHQWYTVLDLKDAFFCLRLHPTSQPLFAFEWRDPGMGISGQLTWTRLPQGFKNSPTLFNEALHRDLADFRIQHPDLILLQYVDDILLAATSELDCQQGTRALLQTLGDLGYRASAKKAQICQKQVKYLGYLLREGQRWLTEARKETVMGQPVPKTPRQLREFLGTAGFCRLWIPGFAEMAAPLYPLTKPGTLFSWGPDQQKAYQEIKQALLTAPALGLPDLTKPFELFVDEKQGYAKGVLTQKLGPWRRPVAYLSKKLDPVAAGWPPCLRMVAAIAVLTKDAGKLTMGQPLVILAPHAVEALVKQPPDRWLSNARMTHYQAMLLDTDRVQFGPVVALNPATLLPLPEEGAPHDCLEILAETHGTRPDLTDQPIPDADHTWYTDGSSFLQEGQRKAGAAVTTETEVIWAGALPAGTSAQRAELIALTQALKMAEGKRLNVYTDSRYAFATAHIHGEIYRRRGWLTSEGREIKNKSEILALLKALFLPKRLSIIHCLGHQKGDSAEARGNRLADQAAREAAIKTPPDTSTLLAGKRTADGSEFEKRTADGSEFESPKKKAKVE

SEQ ID NO: 2193 - protein, 2115 aa, synthetic construct
MPAAKRVKLDGGDKKYSIGLDIGTNSVGWAVITDEYKVPSKKFKVLGNTDRHSIKKNLIGALLFDSGETAEATRLKRTARRRYTRRKNRICYLQEIFSNEMAKVDDSFFHRLEESFLVEEDKKHERHPIFGNIVDEVAYHEKYPTIYHLRKKLVDSTDKADLRLIYLALAHMIKFRGHFLIEGDLNPDNSDVDKLFIQLVQTYNQLFEENPINASGVDAKAILSARLSKSRRLENLIAQLPGEKKNGLFGNLIALSLGLTPNFKSNFDLAEDAKLQLSKDTYDDDLDNLLAQIGDQYADLFLAAKNLSDAILLSDILRVNTEITKAPLSASMIKRYDEHHQDLTLLKALVRQQLPEKYKEIFFDQSKNGYAGYIDGGASQEEFYKFIKPILEKMDGTEELLVKLNREDLLRKQRTFDNGSIPHQIHLGELHAILRRQEDFYPFLKDNREKIEKILTFRIPYYVGPLARGNSRFAWMTRKSEETITPWNFEEVVDKGASAQSFIERMTNFDKNLPNEKVLPKHSLLYEYFTVYNELTKVKYVTEGMRKPAFLSGEQKKAIVDLLFKTNRKVTVKQLKEDYFKKIECFDSVEISGVEDRFNASLGTYHDLLKIIKDKDFLDNEENEDILEDIVLTLTLFEDREMIEERLKTYAHLFDDKVMKQLKRRRYTGWGRLSRKLINGIRDKQSGKTILDFLKSDGFANRNFMQLIHDDSLTFKEDIQKAQVSGQGDSLHEHIANLAGSPAIKKGILQTVKVVDELVKVMGRHKPENIVIEMARENQTTQKGQKNSRERMKRIEEGIKELGSQILKEHPVENTQLQNEKLYLYYLQNGRDMYVDQELDINRLSDYDVDHIVPQSFLKDDSIDNKVLTRSDKARGKSDNVPSEEVVKKMKNYWRQLLNAKLITQRKFDNLTKAERGGLSELDKAGFIKRQLVETRQITKHVAQILDSRMNTKYDENDKLIREVKVITLKSKLVSDFRKDFQFYKVREINNYHHAHDAYLNAVVGTALIKKYPKLESEFVYGDYKVYDVRKMIAKSEQEIGKATAKYFFYSNIMNFFKTEITLANGEIRKRPLIETNGETGEIVWDKGRDFATVRKVLSMPQVNIVKKTEVQTGGFSKESILPKRNSDKLIARKKDWDPKKYGGFDSPTVAYSVLVVAKVEKGKSKKLKSVKELLGITIMERSSFEKNPIDFLEAKGYKEVKKDLIIKLPKYSLFELENGRKRMLASAGELQKGNELALPSKYVNFLYLASHYEKLKGSPEDNEQKQLFVEQHKHYLDEIIEQISEFSKRVILADANLDKVLSAYNKHRDKPIREQAENIIHLFTLTNLGAPAAFKYFDTTIDRKRYTSTKEVLDATLIHQSITGLYETRIDLSQLGGDGGGGGGSGGGGSGGGGSGGGGSGGGGSGGGGSGGTLGIEDEYRLHETSTEPDVSLGSTWLSDFPQAWAETGGMGLAVRQAPLIIPLKATSTPVSIQQYPMSHEARLGIKPHIQRLLDQGILVPCQSPWNTPLLPVKKPGTNDYRPVQDLREVNKRVEDIHPTVPNPYNLLSGLPPSHQWYTVLDLKDAFFCLRLHPTSQPLFAFEWRDPGMGISGQLTWTRLPQGFKNSPTLFNEALHRDLADFRIQHPDLILLQYVDDILLAATSELDCQQGTRALLQTLGDLGYRASAKKAQICQKQVKYLGYLLREGQRWLTEARKETVMGQPVPKTPRQLREFLGTAGFCRLWIPGFAEMAAPLYPLTKPGTLFSWGPDQQKAYQEIKQALLTAPALGLPDLTKPFELFVDEKQGYAKGVLTQKLGPWRRPVAYLSKKLDPVAAGWPPCLRMVAAIAVLTKDAGKLTMGQPLVILAPHAVEALVKQPPDRWLSNARMTHYQAMLLDTDRVQFGPVVALNPATLLPLPEEGAPHDCLEILAETHGTRPDLTDQPIPDADHTWYTDGSSFLQEGQRKAGAAVTTETEVIWAGALPAGTSAQRAELIALTQALKMAEGKRLNVYTDSRYAFATAHIHGEIYRRRGWLTSEGREIKNKSEILALLKALFLPKRLSIIHCLGHQKGDSAEARGNRLADQAAREAAIKTPPDTSTLLAGKRTADGSEFEKRTADGSEFESPKKKAKVE

SEQ ID NO: 2194 - protein, 2131 aa, synthetic construct
MPAAKRVKLDGGDKKYSIGLDIGTNSVGWAVITDEYKVPSKKFKVLGNTDRHSIKKNLIGALLFDSGETAEATRLKRTARRRYTRRKNRICYLQEIFSNEMAKVDDSFFHRLEESFLVEEDKKHERHPIFGNIVDEVAYHEKYPTIYHLRKKLVDSTDKADLRLIYLALAHMIKFRGHFLIEGDLNPDNSDVDKLFIQLVQTYNQLFEENPINASGVDAKAILSARLSKSRRLENLIAQLPGEKKNGLFGNLIALSLGLTPNFKSNFDLAEDAKLQLSKDTYDDDLDNLLAQIGDQYADLFLAAKNLSDAILLSDILRVNTEITKAPLSASMIKRYDEHHQDLTLLKALVRQQLPEKYKEIFFDQSKNGYAGYIDGGASQEEFYKFIKPILEKMDGTEELLVKLNREDLLRKQRTFDNGSIPHQIHLGELHAILRRQEDFYPFLKDNREKIEKILTFRIPYYVGPLARGNSRFAWMTRKSEETITPWNFEEVVDKGASAQSFIERMTNFDKNLPNEKVLPKHSLLYEYFTVYNELTKVKYVTEGMRKPAFLSGEQKKAIVDLLFKTNRKVTVKQLKEDYFKKIECFDSVEISGVEDRFNASLGTYHDLLKIIKDKDFLDNEENEDILEDIVLTLTLFEDREMIEERLKTYAHLFDDKVMKQLKRRRYTGWGRLSRKLINGIRDKQSGKTILDFLKSDGFANRNFMQLIHDDSLTFKEDIQKAQVSGQGDSLHEHIANLAGSPAIKKGILQTVKVVDELVKVMGRHKPENIVIEMARENQTTQKGQKNSRERMKRIEEGIKELGSQILKEHPVENTQLQNEKLYLYYLQNGRDMYVDQELDINRLSDYDVDHIVPQSFLKDDSIDNKVLTRSDKARGKSDNVPSEEVVKKMKNYWRQLLNAKLITQRKFDNLTKAERGGLSELDKAGFIKRQLVETRQITKHVAQILDSRMNTKYDENDKLIREVKVITLKSKLVSDFRKDFQFYKVREINNYHHAHDAYLNAVVGTALIKKYPKLESEFVYGDYKVYDVRKMIAKSEQEIGKATAKYFFYSNIMNFFKTEITLANGEIRKRPLIETNGETGEIVWDKGRDFATVRKVLSMPQVNIVKKTEVQTGGFSKESILPKRNSDKLIARKKDWDPKKYGGFDSPTVAYSVLVVAKVEKGKSKKLKSVKELLGITIMERSSFEKNPIDFLEAKGYKEVKKDLIIKLPKYSLFELENGRKRMLASAGELQKGNELALPSKYVNFLYLASHYEKLKGSPEDNEQKQLFVEQHKHYLDEIIEQISEFSKRVILADANLDKVLSAYNKHRDKPIREQAENIIHLFTLTNLGAPAAFKYFDTTIDRKRYTSTKEVLDATLIHQSITGLYETRIDLSQLGGDGGAEAAAKEAAAKEAAAKEAAAKALEAEAAAKEAAAKEAAAKEAAAKAGGTLGIEDEYRLHETSTEPDVSLGSTWLSDFPQAWAETGGMGLAVRQAPLIIPLKATSTPVSIQQYPMSHEARLGIKPHIQRLLDQGILVPCQSPWNTPLLPVKKPGTNDYRPVQDLREVNKRVEDIHPTVPNPYNLLSGLPPSHQWYTVLDLKDAFFCLRLHPTSQPLFAFEWRDPGMGISGQLTWTRLPQGFKNSPTLFNEALHRDLADFRIQHPDLILLQYVDDILLAATSELDCQQGTRALLQTLGDLGYRASAKKAQICQKQVKYLGYLLREGQRWLTEARKETVMGQPVPKTPRQLREFLGTAGFCRLWIPGFAEMAAPLYPLTKPGTLFSWGPDQQKAYQEIKQALLTAPALGLPDLTKPFELFVDEKQGYAKGVLTQKLGPWRRPVAYLSKKLDPVAAGWPPCLRMVAAIAVLTKDAGKLTMGQPLVILAPHAVEALVKQPPDRWLSNARMTHYQAMLLDTDRVQFGPVVALNPATLLPLPEEGAPHDCLEILAETHGTRPDLTDQPIPDADHTWYTDGSSFLQEGQRKAGAAVTTETEVIWAGALPAGTSAQRAELIALTQALKMAEGKRLNVYTDSRYAFATAHIHGEIYRRRGWLTSEGREIKNKSEILALLKALFLPKRLSIIHCLGHQKGDSAEARGNRLADQAAREAAIKTPPDTSTLLAGKRTADGSEFEKRTADGSEFESPKKKAKVE

SEQ ID NO: 2195 - protein, 2096 aa, synthetic construct; identical to SEQ ID NO: 2076

SEQ ID NO: 2196 - protein, 2096 aa, synthetic construct
MPAAKRVKLDGGDKKYSIGLDIGTNSVGWAVITDEYKVPSKKFKVLGNTDRHSIKKNLIGALLFDSGETAEATRLKRTARRRYTRRKNRICYLQEIFSNEMAKVDDSFFHRLEESFLVEEDKKHERHPIFGNIVDEVAYHEKYPTIYHLRKKLVDSTDKADLRLIYLALAHMIKFRGHFLIEGDLNPDNSDVDKLFIQLVQTYNQLFEENPINASGVDAKAILSARLSKSRRLENLIAQLPGEKKNGLFGNLIALSLGLTPNFKSNFDLAEDAKLQLSKDTYDDDLDNLLAQIGDQYADLFLAAKNLSDAILLSDILRVNTEITKAPLSASMIKRYDEHHQDLTLLKALVRQQLPEKYKEIFFDQSKNGYAGYIDGGASQEEFYKFIKPILEKMDGTEELLVKLNREDLLRKQRTFDNGSIPHQIHLGELHAILRRQEDFYPFLKDNREKIEKILTFRIPYYVGPLARGNSRFAWMTRKSEETITPWNFEEVVDKGASAQSFIERMTNFDKNLPNEKVLPKHSLLYEYFTVYNELTKVKYVTEGMRKPAFLSGEQKKAIVDLLFKTNRKVTVKQLKEDYFKKIECFDSVEISGVEDRFNASLGTYHDLLKIIKDKDFLDNEENEDILEDIVLTLTLFEDREMIEERLKTYAHLFDDKVMKQLKRRRYTGWGRLSRKLINGIRDKQSGKTILDFLKSDGFANRNFMQLIHDDSLTFKEDIQKAQVSGQGDSLHEHIANLAGSPAIKKGILQTVKVVDELVKVMGRHKPENIVIEMARENQTTQKGQKNSRERMKRIEEGIKELGSQILKEHPVENTQLQNEKLYLYYLQNGRDMYVDQELDINRLSDYDVDHIVPQSFLKDDSIDNKVLTRSDKARGKSDNVPSEEVVKKMKNYWRQLLNAKLITQRKFDNLTKAERGGLSELDKAGFIKRQLVETRQITKHVAQILDSRMNTKYDENDKLIREVKVITLKSKLVSDFRKDFQFYKVREINNYHHAHDAYLNAVVGTALIKKYPKLESEFVYGDYKVYDVRKMIAKSEQEIGKATAKYFFYSNIMNFFKTEITLANGEIRKRPLIETNGETGEIVWDKGRDFATVRKVLSMPQVNIVKKTEVQTGGFSKESILPKRNSDKLIARKKDWDPKKYGGFDSPTVAYSVLVVAKVEKGKSKKLKSVKELLGITIMERSSFEKNPIDFLEAKGYKEVKKDLIIKLPKYSLFELENGRKRMLASAGELQKGNELALPSKYVNFLYLASHYEKLKGSPEDNEQKQLFVEQHKHYLDEIIEQISEFSKRVILADANLDKVLSAYNKHRDKPIREQAENIIHLFTLTNLGAPAAFKYFDTTIDRKRYTSTKEVLDATLIHQSITGLYETRIDLSQLGGDGGGGGGSSEAAAKGGTLGIEDEYRLHETSTEPDVSLGSTWLSDFPQAWAETGGMGLAVRQAPLIIPLKATSTPVSIQQYPMSHEARLGIKPHIQRLLDQGILVPCQSPWNTPLLPVKKPGTNDYRPVQDLREVNKRVEDIHPTVPNPYNLLSGLPPSHQWYTVLDLKDAFFCLRLHPTSQPLFAFEWRDPGMGISGQLTWTRLPQGFKNSPTLFNEALHRDLADFRIQHPDLILLQYVDDILLAATSELDCQQGTRALLQTLGDLGYRASAKKAQICQKQVKYLGYLLREGQRWLTEARKETVMGQPVPKTPRQLREFLGTAGFCRLWIPGFAEMAAPLYPLTKPGTLFSWGPDQQKAYQEIKQALLTAPALGLPDLTKPFELFVDEKQGYAKGVLTQKLGPWRRPVAYLSKKLDPVAAGWPPCLRMVAAIAVLTKDAGKLTMGQPLVILAPHAVEALVKQPPDRWLSNARMTHYQAMLLDTDRVQFGPVVALNPATLLPLPEEGAPHDCLEILAETHGTRPDLTDQPIPDADHTWYTDGSSFLQEGQRKAGAAVTTETEVIWAGALPAGTSAQRAELIALTQALKMAEGKRLNVYTDSRYAFATAHIHGEIYRRRGWLTSEGREIKNKSEILALLKALFLPKRLSIIHCLGHQKGDSAEARGNRLADQAAREAAIKTPPDTSTLLAGKRTADGSEFEKRTADGSEFESPKKKAKVE

SEQ ID NO: 2197 - protein, 2096 aa, synthetic construct
MPAAKRVKLDGGDKKYSIGLDIGTNSVGWAVITDEYKVPSKKFKVLGNTDRHSIKKNLIGALLFDSGETAEATRLKRTARRRYTRRKNRICYLQEIFSNEMAKVDDSFFHRLEESFLVEEDKKHERHPIFGNIVDEVAYHEKYPTIYHLRKKLVDSTDKADLRLIYLALAHMIKFRGHFLIEGDLNPDNSDVDKLFIQLVQTYNQLFEENPINASGVDAKAILSARLSKSRRLENLIAQLPGEKKNGLFGNLIALSLGLTPNFKSNFDLAEDAKLQLSKDTYDDDLDNLLAQIGDQYADLFLAAKNLSDAILLSDILRVNTEITKAPLSASMIKRYDEHHQDLTLLKALVRQQLPEKYKEIFFDQSKNGYAGYIDGGASQEEFYKFIKPILEKMDGTEELLVKLNREDLLRKQRTFDNGSIPHQIHLGELHAILRRQEDFYPFLKDNREKIEKILTFRIPYYVGPLARGNSRFAWMTRKSEETITPWNFEEVVDKGASAQSFIERMTNFDKNLPNEKVLPKHSLLYEYFTVYNELTKVKYVTEGMRKPAFLSGEQKKAIVDLLFKTNRKVTVKQLKEDYFKKIECFDSVEISGVEDRFNASLGTYHDLLKIIKDKDFLDNEENEDILEDIVLTLTLFEDREMIEERLKTYAHLFDDKVMKQLKRRRYTGWGRLSRKLINGIRDKQSGKTILDFLKSDGFANRNFMQLIHDDSLTFKEDIQKAQVSGQGDSLHEHIANLAGSPAIKKGILQTVKVVDELVKVMGRHKPENIVIEMARENQTTQKGQKNSRERMKRIEEGIKELGSQILKEHPVENTQLQNEKLYLYYLQNGRDMYVDQELDINRLSDYDVDHIVPQSFLKDDSIDNKVLTRSDKARGKSDNVPSEEVVKKMKNYWRQLLNAKLITQRKFDNLTKAERGGLSELDKAGFIKRQLVETRQITKHVAQILDSRMNTKYDENDKLIREVKVITLKSKLVSDFRKDFQFYKVREINNYHHAHDAYLNAVVGTALIKKYPKLESEFVYGDYKVYDVRKMIAKSEQEIGKATAKYFFYSNIMNFFKTEITLANGEIRKRPLIETNGETGEIVWDKGRDFATVRKVLSMPQVNIVKKTEVQTGGFSKESILPKRNSDKLIARKKDWDPKKYGGFDSPTVAYSVLVVAKVEKGKSKKLKSVKELLGITIMERSSFEKNPIDFLEAKGYKEVKKDLIIKLPKYSLFELENGRKRMLASAGELQKGNELALPSKYVNFLYLASHYEKLKGSPEDNEQKQLFVEQHKHYLDEIIEQISEFSKRVILADANLDKVLSAYNKHRDKPIREQAENIIHLFTLTNLGAPAAFKYFDTTIDRKRYTSTKEVLDATLIHQSITGLYETRIDLSQLGGDGGPAPEAAAKGGGGGTLGIEDEYRLHETSTEPDVSLGSTWLSDFPQAWAETGGMGLAVRQAPLIIPLKATSTPVSIQQYPMSHEARLGIKPHIQRLLDQGILVPCQSPWNTPLLPVKKPGTNDYRPVQDLREVNKRVEDIHPTVPNPYNLLSGLPPSHQWYTVLDLKDAFFCLRLHPTSQPLFAFEWRDPGMGISGQLTWTRLPQGFKNSPTLFNEALHRDLADFRIQHPDLILLQYVDDILLAATSELDCQQGTRALLQTLGDLGYRASAKKAQICQKQVKYLGYLLREGQRWLTEARKETVMGQPVPKTPRQLREFLGTAGFCRLWIPGFAEMAAPLYPLTKPGTLFSWGPDQQKAYQEIKQALLTAPALGLPDLTKPFELFVDEKQGYAKGVLTQKLGPWRRPVAYLSKKLDPVAAGWPPCLRMVAAIAVLTKDAGKLTMGQPLVILAPHAVEALVKQPPDRWLSNARMTHYQAMLLDTDRVQFGPVVALNPATLLPLPEEGAPHDCLEILAETHGTRPDLTDQPIPDADHTWYTDGSSFLQEGQRKAGAAVTTETEVIWAGALPAGTSAQRAELIALTQALKMAEGKRLNVYTDSRYAFATAHIHGEIYRRRGWLTSEGREIKNKSEILALLKALFLPKRLSIIHCLGHQKGDSAEARGNRLADQAAREAAIKTPPDTSTLLAGKRTADGSEFEKRTADGSEFESPKKKAKVE

SEQ ID NO: 2198 - protein, 2090 aa, synthetic construct
MPAAKRVKLDGGDKKYSIGLDIGTNSVGWAVITDEYKVPSKKFKVLGNTDRHSIKKNLIGALLFDSGETAEATRLKRTARRRYTRRKNRICYLQEIFSNEMAKVDDSFFHRLEESFLVEEDKKHERHPIFGNIVDEVAYHEKYPTIYHLRKKLVDSTDKADLRLIYLALAHMIKFRGHFLIEGDLNPDNSDVDKLFIQLVQTYNQLFEENPINASGVDAKAILSARLSKSRRLENLIAQLPGEKKNGLFGNLIALSLGLTPNFKSNFDLAEDAKLQLSKDTYDDDLDNLLAQIGDQYADLFLAAKNLSDAILLSDILRVNTEITKAPLSASMIKRYDEHHQDLTLLKALVRQQLPEKYKEIFFDQSKNGYAGYIDGGASQEEFYKFIKPILEKMDGTEELLVKLNREDLLRKQRTFDNGSIPHQIHLGELHAILRRQEDFYPFLKDNREKIEKILTFRIPYYVGPLARGNSRFAWMTRKSEETITPWNFEEVVDKGASAQSFIERMTNFDKNLPNEKVLPKHSLLYEYFTVYNELTKVKYVTEGMRKPAFLSGEQKKAIVDLLFKTNRKVTVKQLKEDYFKKIECFDSVEISGVEDRFNASLGTYHDLLKIIKDKDFLDNEENEDILEDIVLTLTLFEDREMIEERLKTYAHLFDDKVMKQLKRRRYTGWGRLSRKLINGIRDKQSGKTILDFLKSDGFANRNFMQLIHDDSLTFKEDIQKAQVSGQGDSLHEHIANLAGSPAIKKGILQTVKVVDELVKVMGRHKPENIVIEMARENQTTQKGQKNSRERMKRIEEGIKELGSQILKEHPVENTQLQNEKLYLYYLQNGRDMYVDQELDINRLSDYDVDHIVPQSFLKDDSIDNKVLTRSDKARGKSDNVPSEEVVKKMKNYWRQLLNAKLITQRKFDNLTKAERGGLSELDKAGFIKRQLVETRQITKHVAQILDSRMNTKYDENDKLIREVKVITLKSKLVSDFRKDFQFYKVREINNYHHAHDAYLNAVVGTALIKKYPKLESEFVYGDYKVYDVRKMIAKSEQEIGKATAKYFFYSNIMNFFKTEITLANGEIRKRPLIETNGETGEIVWDKGRDFATVRKVLSMPQVNIVKKTEVQTGGFSKESILPKRNSDKLIARKKDWDPKKYGGFDSPTVAYSVLVVAKVEKGKSKKLKSVKELLGITIMERSSFEKNPIDFLEAKGYKEVKKDLIIKLPKYSLFELENGRKRMLASAGELQKGNELALPSKYVNFLYLASHYEKLKGSPEDNEQKQLFVEQHKHYLDEIIEQISEFSKRVILADANLDKVLSAYNKHRDKPIREQAENIIHLFTLTNLGAPAAFKYFDTTIDRKRYTSTKEVLDATLIHQSITGLYETRIDLSQLGGDGGEAAAKGGTLGIEDEYRLHETSTEPDVSLGSTWLSDFPQAWAETGGMGLAVRQAPLIIPLKATSTPVSIQQYPMSHEARLGIKPHIQRLLDQGILVPCQSPWNTPLLPVKKPGTNDYRPVQDLREVNKRVEDIHPTVPNPYNLLSGLPPSHQWYTVLDLKDAFFCLRLHPTSQPLFAFEWRDPGMGISGQLTWTRLPQGFKNSPTLFNEALHRDLADFRIQHPDLILLQYVDDILLAATSELDCQQGTRALLQTLGDLGYRASAKKAQICQKQVKYLGYLLREGQRWLTEARKETVMGQPVPKTPRQLREFLGTAGFCRLWIPGFAEMAAPLYPLTKPGTLFSWGPDQQKAYQEIKQALLTAPALGLPDLTKPFELFVDEKQGYAKGVLTQKLGPWRRPVAYLSKKLDPVAAGWPPCLRMVAAIAVLTKDAGKLTMGQPLVILAPHAVEALVKQPPDRWLSNARMTHYQAMLLDTDRVQFGPVVALNPATLLPLPEEGAPHDCLEILAETHGTRPDLTDQPIPDADHTWYTDGSSFLQEGQRKAGAAVTTETEVIWAGALPAGTSAQRAELIALTQALKMAEGKRLNVYTDSRYAFATAHIHGEIYRRRGWLTSEGREIKNKSEILALLKALFLPKRLSIIHCLGHQKGDSAEARGNRLADQAAREAAIKTPPDTSTLLAGKRTADGSEFEKRTADGSEFESPKKKAKVE

SEQ ID NO: 2199 - protein, 2096 aa, synthetic construct
MPAAKRVKLDGGDKKYSIGLDIGTNSVGWAVITDEYKVPSKKFKVLGNTDRHSIKKNLIGALLFDSGETAEATRLKRTARRRYTRRKNRICYLQEIFSNEMAKVDDSFFHRLEESFLVEEDKKHERHPIFGNIVDEVAYHEKYPTIYHLRKKLVDSTDKADLRLIYLALAHMIKFRGHFLIEGDLNPDNSDVDKLFIQLVQTYNQLFEENPINASGVDAKAILSARLSKSRRLENLIAQLPGEKKNGLFGNLIALSLGLTPNFKSNFDLAEDAKLQLSKDTYDDDLDNLLAQIGDQYADLFLAAKNLSDAILLSDILRVNTEITKAPLSASMIKRYDEHHQDLTLLKALVRQQLPEKYKEIFFDQSKNGYAGYIDGGASQEEFYKFIKPILEKMDGTEELLVKLNREDLLRKQRTFDNGSIPHQIHLGELHAILRRQEDFYPFLKDNREKIEKILTFRIPYYVGPLARGNSRFAWMTRKSEETITPWNFEEVVDKGASAQSFIERMTNFDKNLPNEKVLPKHSLLYEYFTVYNELTKVKYVTEGMRKPAFLSGEQKKAIVDLLFKTNRKVTVKQLKEDYFKKIECFDSVEISGVEDRFNASLGTYHDLLKIIKDKDFLDNEENEDILEDIVLTLTLFEDREMIEERLKTYAHLFDDKVMKQLKRRRYTGWGRLSRKLINGIRDKQSGKTILDFLKSDGFANRNFMQLIHDDSLTFKEDIQKAQVSGQGDSLHEHIANLAGSPAIKKGILQTVKVVDELVKVMGRHKPENIVIEMARENQTTQKGQKNSRERMKRIEEGIKELGSQILKEHPVENTQLQNEKLYLYYLQNGRDMYVDQELDINRLSDYDVDHIVPQSFLKDDSIDNKVLTRSDKARGKSDNVPSEEVVKKMKNYWRQLLNAKLITQRKFDNLTKAERGGLSELDKAGFIKRQLVETRQITKHVAQILDSRMNTKYDENDKLIREVKVITLKSKLVSDFRKDFQFYKVREINNYHHAHDAYLNAVVGTALIKKYPKLESEFVYGDYKVYDVRKMIAKSEQEIGKATAKYFFYSNIMNFFKTEITLANGEIRKRPLIETNGETGEIVWDKGRDFATVRKVLSMPQVNIVKKTEVQTGGFSKESILPKRNSDKLIARKKDWDPKKYGGFDSPTVAYSVLVVAKVEKGKSKKLKSVKELLGITIMERSSFEKNPIDFLEAKGYKEVKKDLIIKLPKYSLFELENGRKRMLASAGELQKGNELALPSKYVNFLYLASHYEKLKGSPEDNEQKQLFVEQHKHYLDEIIEQISEFSKRVILADANLDKVLSAYNKHRDKPIREQAENIIHLFTLTNLGAPAAFKYFDTTIDRKRYTSTKEVLDATLIHQSITGLYETRIDLSQLGGDGGGGSEAAAKGSSGGTLGIEDEYRLHETSTEPDVSLGSTWLSDFPQAWAETGGMGLAVRQAPLIIPLKATSTPVSIQQYPMSHEARLGIKPHIQRLLDQGILVPCQSPWNTPLLPVKKPGTNDYRPVQDLREVNKRVEDIHPTVPNPYNLLSGLPPSHQWYTVLDLKDAFFCLRLHPTSQPLFAFEWRDPGMGISGQLTWTRLPQGFKNSPTLFNEALHRDLADFRIQHPDLILLQYVDDILLAATSELDCQQGTRALLQTLGDLGYRASAKKAQICQKQVKYLGYLLREGQRWLTEARKETVMGQPVPKTPRQLREFLGTAGFCRLWIPGFAEMAAPLYPLTKPGTLFSWGPDQQKAYQEIKQALLTAPALGLPDLTKPFELFVDEKQGYAKGVLTQKLGPWRRPVAYLSKKLDPVAAGWPPCLRMVAAIAVLTKDAGKLTMGQPLVILAPHAVEALVKQPPDRWLSNARMTHYQAMLLDTDRVQFGPVVALNPATLLPLPEEGAPHDCLEILAETHGTRPDLTDQPIPDADHTWYTDGSSFLQEGQRKAGAAVTTETEVIWAGALPAGTSAQRAELIALTQALKMAEGKRLNVYTDSRYAFATAHIHGEIYRRRGWLTSEGREIKNKSEILALLKALFLPKRLSIIHCLGHQKGDSAEARGNRLADQAAREAAIKTPPDTSTLLAGKRTADGSEFEKRTADGSEFESPKKKAKVE

SEQ ID NO: 2200 - protein, 2096 aa, synthetic construct
MPAAKRVKLDGGDKKYSIGLDIGTNSVGWAVITDEYKVPSKKFKVLGNTDRHSIKKNLIGALLFDSGETAEATRLKRTARRRYTRRKNRICYLQEIFSNEMAKVDDSFFHRLEESFLVEEDKKHERHPIFGNIVDEVAYHEKYPTIYHLRKKLVDSTDKADLRLIYLALAHMIKFRGHFLIEGDLNPDNSDVDKLFIQLVQTYNQLFEENPINASGVDAKAILSARLSKSRRLENLIAQLPGEKKNGLFGNLIALSLGLTPNFKSNFDLAEDAKLQLSKDTYDDDLDNLLAQIGDQYADLFLAAKNLSDAILLSDILRVNTEITKAPLSASMIKRYDEHHQDLTLLKALVRQQLPEKYKEIFFDQSKNGYAGYIDGGASQEEFYKFIKPILEKMDGTEELLVKLNREDLLRKQRTFDNGSIPHQIHLGELHAILRRQEDFYPFLKDNREKIEKILTFRIPYYVGPLARGNSRFAWMTRKSEETITPWNFEEVVDKGASAQSFIERMTNFDKNLPNEKVLPKHSLLYEYFTVYNELTKVKYVTEGMRKPAFLSGEQKKAIVDLLFKTNRKVTVKQLKEDYFKKIECFDSVEISGVEDRFNASLGTYHDLLKIIKDKDFLDNEENEDILEDIVLTLTLFEDREMIEERLKTYAHLFDDKVMKQLKRRRYTGWGRLSRKLINGIRDKQSGKTILDFLKSDGFANRNFMQLIHDDSLTFKEDIQKAQVSGQGDSLHEHIANLAGSPAIKKGILQTVKVVDELVKVMGRHKPENIVIEMARENQTTQKGQKNSRERMKRIEEGIKELGSQILKEHPVENTQLQNEKLYLYYLQNGRDMYVDQELDINRLSDYDVDHIVPQSFLKDDSIDNKVLTRSDKARGKSDNVPSEEVVKKMKNYWRQLLNAKLITQRKFDNLTKAERGGLSELDKAGFIKRQLVETRQITKHVAQILDSRMNTKYDENDKLIREVKVITLKSKLVSDFRKDFQFYKVREINNYHHAHDAYLNAVVGTALIKKYPKLESEFVYGDYKVYDVRKMIAKSEQEIGKATAKYFFYSNIMNFFKTEITLANGEIRKRPLIETNGETGEIVWDKGRDFATVRKVLSMPQVNIVKKTEVQTGGFSKESILPKRNSDKLIARKKDWDPKKYGGFDSPTVAYSVLVVAKVEKGKSKKLKSVKELLGITIMERSSFEKNPIDFLEAKGYKEVKKDLIIKLPKYSLFELENGRKRMLASAGELQKGNELALPSKYVNFLYLASHYEKLKGSPEDNEQKQLFVEQHKHYLDEIIEQISEFSKRVILADANLDKVLSAYNKHRDKPIREQAENIIHLFTLTNLGAPAAFKYFDTTIDRKRYTSTKEVLDATLIHQSITGLYETRIDLSQLGGDGGEAAAKGGSGSSGGTLGIEDEYRLHETSTEPDVSLGSTWLSDFPQAWAETGGMGLAVRQAPLIIPLKATSTPVSIQQYPMSHEARLGIKPHIQRLLDQGILVPCQSPWNTPLLPVKKPGTNDYRPVQDLREVNKRVEDIHPTVPNPYNLLSGLPPSHQWYTVLDLKDAFFCLRLHPTSQPLFAFEWRDPGMGISGQLTWTRLPQGFKNSPTLFNEALHRDLADFRIQHPDLILLQYVDDILLAATSELDCQQGTRALLQTLGDLGYRASAKKAQICQKQVKYLGYLLREGQRWLTEARKETVMGQPVPKTPRQLREFLGTAGFCRLWIPGFAEMAAPLYPLTKPGTLFSWGPDQQKAYQEIKQALLTAPALGLPDLTKPFELFVDEKQGYAKGVLTQKLGPWRRPVAYLSKKLDPVAAGWPPCLRMVAAIAVLTKDAGKLTMGQPLVILAPHAVEALVKQPPDRWLSNARMTHYQAMLLDTDRVQFGPVVALNPATLLPLPEEGAPHDCLEILAETHGTRPDLTDQPIPDADHTWYTDGSSFLQEGQRKAGAAVTTETEVIWAGALPAGTSAQRAELIALTQALKMAEGKRLNVYTDSRYAFATAHIHGEIYRRRGWLTSEGREIKNKSEILALLKALFLPKRLSIIHCLGHQKGDSAEARGNRLADQAAREAAIKTPPDTSTLLAGKRTADGSEFEKRTADGSEFESPKKKAKVE

SEQ ID NO: 2201 - protein, 2096 aa, synthetic construct; identical to SEQ ID NO: 2071

SEQ ID NO: 2202 - protein, 2096 aa, synthetic construct; identical to SEQ ID NO: 2075

SEQ ID NO: 2203 - protein, 2091 aa, synthetic construct
MPAAKRVKLDGGDKKYSIGLDIGTNSVGWAVITDEYKVPSKKFKVLGNTDRHSIKKNLIGALLFDSGETAEATRLKRTARRRYTRRKNRICYLQEIFSNEMAKVDDSFFHRLEESFLVEEDKKHERHPIFGNIVDEVAYHEKYPTIYHLRKKLVDSTDKADLRLIYLALAHMIKFRGHFLIEGDLNPDNSDVDKLFIQLVQTYNQLFEENPINASGVDAKAILSARLSKSRRLENLIAQLPGEKKNGLFGNLIALSLGLTPNFKSNFDLAEDAKLQLSKDTYDDDLDNLLAQIGDQYADLFLAAKNLSDAILLSDILRVNTEITKAPLSASMIKRYDEHHQDLTLLKALVRQQLPEKYKEIFFDQSKNGYAGYIDGGASQEEFYKFIKPILEKMDGTEELLVKLNREDLLRKQRTFDNGSIPHQIHLGELHAILRRQEDFYPFLKDNREKIEKILTFRIPYYVGPLARGNSRFAWMTRKSEETITPWNFEEVVDKGASAQSFIERMTNFDKNLPNEKVLPKHSLLYEYFTVYNELTKVKYVTEGMRKPAFLSGEQKKAIVDLLFKTNRKVTVKQLKEDYFKKIECFDSVEISGVEDRFNASLGTYHDLLKIIKDKDFLDNEENEDILEDIVLTLTLFEDREMIEERLKTYAHLFDDKVMKQLKRRRYTGWGRLSRKLINGIRDKQSGKTILDFLKSDGFANRNFMQLIHDDSLTFKEDIQKAQVSGQGDSLHEHIANLAGSPAIKKGILQTVKVVDELVKVMGRHKPENIVIEMARENQTTQKGQKNSRERMKRIEEGIKELGSQILKEHPVENTQLQNEKLYLYYLQNGRDMYVDQELDINRLSDYDVDHIVPQSFLKDDSIDNKVLTRSDKARGKSDNVPSEEVVKKMKNYWRQLLNAKLITQRKFDNLTKAERGGLSELDKAGFIKRQLVETRQITKHVAQILDSRMNTKYDENDKLIREVKVITLKSKLVSDFRKDFQFYKVREINNYHHAHDAYLNAVVGTALIKKYPKLESEFVYGDYKVYDVRKMIAKSEQEIGKATAKYFFYSNIMNFFKTEITLANGEIRKRPLIETNGETGEIVWDKGRDFATVRKVLSMPQVNIVKKTEVQTGGFSKESILPKRNSDKLIARKKDWDPKKYGGFDSPTVAYSVLVVAKVEKGKSKKLKSVKELLGITIMERSSFEKNPIDFLEAKGYKEVKKDLIIKLPKYSLFELENGRKRMLASAGELQKGNELALPSKYVNFLYLASHYEKLKGSPEDNEQKQLFVEQHKHYLDEIIEQISEFSKRVILADANLDKVLSAYNKHRDKPIREQAENIIHLFTLTNLGAPAAFKYFDTTIDRKRYTSTKEVLDATLIHQSITGLYETRIDLSQLGGDGGGSSGGGGGTLGIEDEYRLHETSTEPDVSLGSTWLSDFPQAWAETGGMGLAVRQAPLIIPLKATSTPVSIQQYPMSHEARLGIKPHIQRLLDQGILVPCQSPWNTPLLPVKKPGTNDYRPVQDLREVNKRVEDIHPTVPNPYNLLSGLPPSHQWYTVLDLKDAFFCLRLHPTSQPLFAFEWRDPGMGISGQLTWTRLPQGFKNSPTLFNEALHRDLADFRIQHPDLILLQYVDDILLAATSELDCQQGTRALLQTLGDLGYRASAKKAQICQKQVKYLGYLLREGQRWLTEARKETVMGQPVPKTPRQLREFLGTAGFCRLWIPGFAEMAAPLYPLTKPGTLFSWGPDQQKAYQEIKQALLTAPALGLPDLTKPFELFVDEKQGYAKGVLTQKLGPWRRPVAYLSKKLDPVAAGWPPCLRMVAAIAVLTKDAGKLTMGQPLVILAPHAVEALVKQPPDRWLSNARMTHYQAMLLDTDRVQFGPVVALNPATLLPLPEEGAPHDCLEILAETHGTRPDLTDQPIPDADHTWYTDGSSFLQEGQRKAGAAVTTETEVIWAGALPAGTSAQRAELIALTQALKMAEGKRLNVYTDSRYAFATAHIHGEIYRRRGWLTSEGREIKNKSEILALLKALFLPKRLSIIHCLGHQKGDSAEARGNRLADQAAREAAIKTPPDTSTLLAGKRTADGSEFEKRTADGSEFESPKKKAKVE

SEQ ID NO: 2204 - protein, 2098 aa, synthetic construct
MPAAKRVKLDGGDKKYSIGLDIGTNSVGWAVITDEYKVPSKKFKVLGNTDRHSIKKNLIGALLFDSGETAEATRLKRTARRRYTRRKNRICYLQEIFSNEMAKVDDSFFHRLEESFLVEEDKKHERHPIFGNIVDEVAYHEKYPTIYHLRKKLVDSTDKADLRLIYLALAHMIKFRGHFLIEGDLNPDNSDVDKLFIQLVQTYNQLFEENPINASGVDAKAILSARLSKSRRLENLIAQLPGEKKNGLFGNLIALSLGLTPNFKSNFDLAEDAKLQLSKDTYDDDLDNLLAQIGDQYADLFLAAKNLSDAILLSDILRVNTEITKAPLSASMIKRYDEHHQDLTLLKALVRQQLPEKYKEIFFDQSKNGYAGYIDGGASQEEFYKFIKPILEKMDGTEELLVKLNREDLLRKQRTFDNGSIPHQIHLGELHAILRRQEDFYPFLKDNREKIEKILTFRIPYYVGPLARGNSRFAWMTRKSEETITPWNFEEVVDKGASAQSFIERMTNFDKNLPNEKVLPKHSLLYEYFTVYNELTKVKYVTEGMRKPAFLSGEQKKAIVDLLFKTNRKVTVKQLKEDYFKKIECFDSVEISGVEDRFNASLGTYHDLLKIIKDKDFLDNEENEDILEDIVLTLTLFEDREMIEERLKTYAHLFDDKVMKQLKRRRYTGWGRLSRKLINGIRDKQSGKTILDFLKSDGFANRNFMQLIHDDSLTFKEDIQKAQVSGQGDSLHEHIANLAGSPAIKKGILQTVKVVDELVKVMGRHKPENIVIEMARENQTTQKGQKNSRERMKRIEEGIKELGSQILKEHPVENTQLQNEKLYLYYLQNGRDMYVDQELDINRLSDYDVDHIVPQSFLKDDSIDNKVLTRSDKARGKSDNVPSEEVVKKMKNYWRQLLNAKLITQRKFDNLTKAERGGLSELDKAGFIKRQLVETRQITKHVAQILDSRMNTKYDENDKLIREVKVITLKSKLVSDFRKDFQFYKVREINNYHHAHDAYLNAVVGTALIKKYPKLESEFVYGDYKVYDVRKMIAKSEQEIGKATAKYFFYSNIMNFFKTEITLANGEIRKRPLIETNGETGEIVWDKGRDFATVRKVLSMPQVNIVKKTEVQTGGFSKESILPKRNSDKLIARKKDWDPKKYGGFDSPTVAYSVLVVAKVEKGKSKKLKSVKELLGITIMERSSFEKNPIDFLEAKGYKEVKKDLIIKLPKYSLFELENGRKRMLASAGELQKGNELALPSKYVNFLYLASHYEKLKGSPEDNEQKQLFVEQHKHYLDEIIEQISEFSKRVILADANLDKVLSAYNKHRDKPIREQAENIIHLFTLTNLGAPAAFKYFDTTIDRKRYTSTKEVLDATLIHQSITGLYETRIDLSQLGGDGGPAPAPAPAPAPAPGGTLGIEDEYRLHETSTEPDVSLGSTWLSDFPQAWAETGGMGLAVRQAPLIIPLKATSTPVSIQQYPMSHEARLGIKPHIQRLLDQGILVPCQSPWNTPLLPVKKPGTNDYRPVQDLREVNKRVEDIHPTVPNPYNLLSGLPPSHQWYTVLDLKDAFFCLRLHPTSQPLFAFEWRDPGMGISGQLTWTRLPQGFKNSPTLFNEALHRDLADFRIQHPDLILLQYVDDILLAATSELDCQQGTRALLQTLGDLGYRASAKKAQICQKQVKYLGYLLREGQRWLTEARKETVMGQPVPKTPRQLREFLGTAGFCRLWIPGFAEMAAPLYPLTKPGTLFSWGPDQQKAYQEIKQALLTAPALGLPDLTKPFELFVDEKQGYAKGVLTQKLGPWRRPVAYLSKKLDPVAAGWPPCLRMVAAIAVLTKDAGKLTMGQPLVILAPHAVEALVKQPPDRWLSNARMTHYQAMLLDTDRVQFGPVVALNPATLLPLPEEGAPHDCLEILAETHGTRPDLTDQPIPDADHTWYTDGSSFLQEGQRKAGAAVTTETEVIWAGALPAGTSAQRAELIALTQALKMAEGKRLNVYTDSRYAFATAHIHGEIYRRRGWLTSEGREIKNKSEILALLKALFLPKRLSIIHCLGHQKGDSAEARGNRLADQAAREAAIKTPPDTSTLLAGKRTADGSEFEKRTADGSEFESPKKKAKVE

SEQ ID NO: 2205 - protein, 2094 aa, synthetic construct
MPAAKRVKLDGGDKKYSIGLDIGTNSVGWAVITDEYKVPSKKFKVLGNTDRHSIKKNLIGALLFDSGETAEATRLKRTARRRYTRRKNRICYLQEIFSNEMAKVDDSFFHRLEESFLVEEDKKHERHPIFGNIVDEVAYHEKYPTIYHLRKKLVDSTDKADLRLIYLALAHMIKFRGHFLIEGDLNPDNSDVDKLFIQLVQTYNQLFEENPINASGVDAKAILSARLSKSRRLENLIAQLPGEKKNGLFGNLIALSLGLTPNFKSNFDLAEDAKLQLSKDTYDDDLDNLLAQIGDQYADLFLAAKNLSDAILLSDILRVNTEITKAPLSASMIKRYDEHHQDLTLLKALVRQQLPEKYKEIFFDQSKNGYAGYIDGGASQEEFYKFIKPILEKMDGTEELLVKLNREDLLRKQRTFDNGSIPHQIHLGELHAILRRQEDFYPFLKDNREKIEKILTFRIPYYVGPLARGNSRFAWMTRKSEETITPWNFEEVVDKGASAQSFIERMTNFDKNLPNEKVLPKHSLLYEYFTVYNELTKVKYVTEGMRKPAFLSGEQKKAIVDLLFKTNRKVTVKQLKEDYFKKIECFDSVEISGVEDRFNASLGTYHDLLKIIKDKDFLDNEENEDILEDIVLTLTLFEDREMIEERLKTYAHLFDDKVMKQLKRRRYTGWGRLSRKLINGIRDKQSGKTILDFLKSDGFANRNFMQLIHDDSLTFKEDIQKAQVSGQGDSLHEHIANLAGSPAIKKGILQTVKVVDELVKVMGRHKPENIVIEMARENQTTQKGQKNSRERMKRIEEGIKELGSQILKEHPVENTQLQNEKLYLYYLQNGRDMYVDQELDINRLSDYDVDHIVPQSFLKDDSIDNKVLTRSDKARGKSDNVPSEEVVKKMKNYWRQLLNAKLITQRKFDNLTKAERGGLSELDKAGFIKRQLVETRQITKHVAQILDSRMNTKYDENDKLIREVKVITLKSKLVSDFRKDFQFYKVREINNYHHAHDAYLNAVVGTALIKKYPKLESEFVYGDYKVYDVRKMIAKSEQEIGKATAKYFFYSNIMNFFKTEITLANGEIRKRPLIETNGETGEIVWDKGRDFATVRKVLSMPQVNIVKKTEVQTGGFSKESILPKRNSDKLIARKKDWDPKKYGGFDSPTVAYSVLVVAKVEKGKSKKLKSVKELLGITIMERSSFEKNPIDFLEAKGYKEVKKDLIIKLPKYSLFELENGRKRMLASAGELQKGNELALPSKYVNFLYLASHYEKLKGSPEDNEQKQLFVEQHKHYLDEIIEQISEFSKRVILADANLDKVLSAYNKHRDKPIREQAENIIHLFTLTNLGAPAAFKYFDTTIDRKRYTSTKEVLDATLIHQSITGLYETRIDLSQLGGDGGGGSGSSGGGGGTLGIEDEYRLHETSTEPDVSLGSTWLSDFPQAWAETGGMGLAVRQAPLIIPLKATSTPVSIQQYPMSHEARLGIKPHIQRLLDQGILVPCQSPWNTPLLPVKKPGTNDYRPVQDLREVNKRVEDIHPTVPNPYNLLSGLPPSHQWYTVLDLKDAFFCLRLHPTSQPLFAFEWRDPGMGISGQLTWTRLPQGFKNSPTLFNEALHRDLADFRIQHPDLILLQYVDDILLAATSELDCQQGTRALLQTLGDLGYRASAKKAQICQKQVKYLGYLLREGQRWLTEARKETVMGQPVPKTPRQLREFLGTAGFCRLWIPGFAEMAAPLYPLTKPGTLFSWGPDQQKAYQEIKQALLTAPALGLPDLTKPFELFVDEKQGYAKGVLTQKLGPWRRPVAYLSKKLDPVAAGWPPCLRMVAAIAVLTKDAGKLTMGQPLVILAPHAVEALVKQPPDRWLSNARMTHYQAMLLDTDRVQFGPVVALNPATLLPLPEEGAPHDCLEILAETHGTRPDLTDQPIPDADHTWYTDGSSFLQEGQRKAGAAVTTETEVIWAGALPAGTSAQRAELIALTQALKMAEGKRLNVYTDSRYAFATAHIHGEIYRRRGWLTSEGREIKNKSEILALLKALFLPKRLSIIHCLGHQKGDSAEARGNRLADQAAREAAIKTPPDTSTLLAGKRTADGSEFEKRTADGSEFESPKKKAKVE

SEQ ID NO: 2206 - protein, 2093 aa, synthetic construct
MPAAKRVKLDGGDKKYSIGLDIGTNSVGWAVITDEYKVPSKKFKVLGNTDRHSIKKNLIGALLFDSGETAEATRLKRTARRRYTRRKNRICYLQEIFSNEMAKVDDSFFHRLEESFLVEEDKKHERHPIFGNIVDEVAYHEKYPTIYHLRKKLVDSTDKADLRLIYLALAHMIKFRGHFLIEGDLNPDNSDVDKLFIQLVQTYNQLFEENPINASGVDAKAILSARLSKSRRLENLIAQLPGEKKNGLFGNLIALSLGLTPNFKSNFDLAEDAKLQLSKDTYDDDLDNLLAQIGDQYADLFLAAKNLSDAILLSDILRVNTEITKAPLSASMIKRYDEHHQDLTLLKALVRQQLPEKYKEIFFDQSKNGYAGYIDGGASQEEFYKFIKPILEKMDGTEELLVKLNREDLLRKQRTFDNGSIPHQIHLGELHAILRRQEDFYPFLKDNREKIEKILTFRIPYYVGPLARGNSRFAWMTRKSEETITPWNFEEVVDKGASAQSFIERMTNFDKNLPNEKVLPKHSLLYEYFTVYNELTKVKYVTEGMRKPAFLSGEQKKAIVDLLFKTNRKVTVKQLKEDYFKKIECFDSVEISGVEDRFNASLGTYHDLLKIIKDKDFLDNEENEDILEDIVLTLTLFEDREMIEERLKTYAHLFDDKVMKQLKRRRYTGWGRLSRKLINGIRDKQSGKTILDFLKSDGFANRNFMQLIHDDSLTFKEDIQKAQVSGQGDSLHEHIANLAGSPAIKKGILQTVKVVDELVKVMGRHKPENIVIEMARENQTTQKGQKNSRERMKRIEEGIKELGSQILKEHPVENTQLQNEKLYLYYLQNGRDMYVDQELDINRLSDYDVDHIVPQSFLKDDSIDNKVLTRSDKARGKSDNVPSEEVVKKMKNYWRQLLNAKLITQRKFDNLTKAERGGLSELDKAGFIKRQLVETRQITKHVAQILDSRMNTKYDENDKLIREVKVITLKSKLVSDFRKDFQFYKVREINNYHHAHDAYLNAVVGTALIKKYPKLESEFVYGDYKVYDVRKMIAKSEQEIGKATAKYFFYSNIMNFFKTEITLANGEIRKRPLIETNGETGEIVWDKGRDFATVRKVLSMPQVNIVKKTEVQTGGFSKESILPKRNSDKLIARKKDWDPKKYGGFDSPTVAYSVLVVAKVEKGKSKKLKSVKELLGITIMERSSFEKNPIDFLEAKGYKEVKKDLIIKLPKYSLFELENGRKRMLASAGELQKGNELALPSKYVNFLYLASHYEKLKGSPEDNEQKQLFVEQHKHYLDEIIEQISEFSKRVILADANLDKVLSAYNKHRDKPIREQAENIIHLFTLTNLGAPAAFKYFDTTIDRKRYTSTKEVLDATLIHQSITGLYETRIDLSQLGGDGGPAPEAAAKGGTLGIEDEYRLHETSTEPDVSLGSTWLSDFPQAWAETGGMGLAVRQAPLIIPLKATSTPVSIQQYPMSHEARLGIKPHIQRLLDQGILVPCQSPWNTPLLPVKKPGTNDYRPVQDLREVNKRVEDIHPTVPNPYNLLSGLPPSHQWYTVLDLKDAFFCLRLHPTSQPLFAFEWRDPGMGISGQLTWTRLPQGFKNSPTLFNEALHRDLADFRIQHPDLILLQYVDDILLAATSELDCQQGTRALLQTLGDLGYRASAKKAQICQKQVKYLGYLLREGQRWLTEARKETVMGQPVPKTPRQLREFLGTAGFCRLWIPGFAEMAAPLYPLTKPGTLFSWGPDQQKAYQEIKQALLTAPALGLPDLTKPFELFVDEKQGYAKGVLTQKLGPWRRPVAYLSKKLDPVAAGWPPCLRMVAAIAVLTKDAGKLTMGQPLVILAPHAVEALVKQPPDRWLSNARMTHYQAMLLDTDRVQFGPVVALNPATLLPLPEEGAPHDCLEILAETHGTRPDLTDQPIPDADHTWYTDGSSFLQEGQRKAGAAVTTETEVIWAGALPAGTSAQRAELIALTQALKMAEGKRLNVYTDSRYAFATAHIHGEIYRRRGWLTSEGREIKNKSEILALLKALFLPKRLSIIHCLGHQKGDSAEARGNRLADQAAREAAIKTPPDTSTLLAGKRTADGSEFEKRTADGSEFESPKKKAKVE

SEQ ID NO: 2207 - protein, 2096 aa, synthetic construct; identical to SEQ ID NO: 2074

SEQ ID NO: 2208 - protein, 2093 aa, synthetic construct
MPAAKRVKLDGGDKKYSIGLDIGTNSVGWAVITDEYKVPSKKFKVLGNTDRHSIKKNLIGALLFDSGETAEATRLKRTARRRYTRRKNRICYLQEIFSNEMAKVDDSFFHRLEESFLVEEDKKHERHPIFGNIVDEVAYHEKYPTIYHLRKKLVDSTDKADLRLIYLALAHMIKFRGHFLIEGDLNPDNSDVDKLFIQLVQTYNQLFEENPINASGVDAKAILSARLSKSRRLENLIAQLPGEKKNGLFGNLIALSLGLTPNFKSNFDLAEDAKLQLSKDTYDDDLDNLLAQIGDQYADLFLAAKNLSDAILLSDILRVNTEITKAPLSASMIKRYDEHHQDLTLLKALVRQQLPEKYKEIFFDQSKNGYAGYIDGGASQEEFYKFIKPILEKMDGTEELLVKLNREDLLRKQRTFDNGSIPHQIHLGELHAILRRQEDFYPFLKDNREKIEKILTFRIPYYVGPLARGNSRFAWMTRKSEETITPWNFEEVVDKGASAQSFIERMTNFDKNLPNEKVLPKHSLLYEYFTVYNELTKVKYVTEGMRKPAFLSGEQKKAIVDLLFKTNRKVTVKQLKEDYFKKIECFDSVEISGVEDRFNASLGTYHDLLKIIKDKDFLDNEENEDILEDIVLTLTLFEDREMIEERLKTYAHLFDDKVMKQLKRRRYTGWGRLSRKLINGIRDKQSGKTILDFLKSDGFANRNFMQLIHDDSLTFKEDIQKAQVSGQGDSLHEHIANLAGSPAIKKGILQTVKVVDELVKVMGRHKPENIVIEMARENQTTQKGQKNSRERMKRIEEGIKELGSQILKEHPVENTQLQNEKLYLYYLQNGRDMYVDQELDINRLSDYDVDHIVPQSFLKDDSIDNKVLTRSDKARGKSDNVPSEEVVKKMKNYWRQLLNAKLITQRKFDNLTKAERGGLSELDKAGFIKRQLVETRQITKHVAQILDSRMNTKYDENDKLIREVKVITLKSKLVSDFRKDFQFYKVREINNYHHAHDAYLNAVVGTALIKKYPKLESEFVYGDYKVYDVRKMIAKSEQEIGKATAKYFFYSNIMNFFKTEITLANGEIRKRPLIETNGETGEIVWDKGRDFATVRKVLSMPQVNIVKKTEVQTGGFSKESILPKRNSDKLIARKKDWDPKKYGGFDSPTVAYSVLVVAKVEKGKSKKLKSVKELLGITIMERSSFEKNPIDFLEAKGYKEVKKDLIIKLPKYSLFELENGRKRMLASAGELQKGNELALPSKYVNFLYLASHYEKLKGSPEDNEQKQLFVEQHKHYLDEIIEQISEFSKRVILADANLDKVLSAYNKHRDKPIREQAENIIHLFTLTNLGAPAAFKYFDTTIDRKRYTSTKEVLDATLIHQSITGLYETRIDLSQLGGDGGGGGEAAAKGGTLGIEDEYRLHETSTEPDVSLGSTWLSDFPQAWAETGGMGLAVRQAPLIIPLKATSTPVSIQQYPMSHEARLGIKPHIQRLLDQGILVPCQSPWNTPLLPVKKPGTNDYRPVQDLREVNKRVEDIHPTVPNPYNLLSGLPPSHQWYTVLDLKDAFFCLRLHPTSQPLFAFEWRDPGMGISGQLTWTRLPQGFKNSPTLFNEALHRDLADFRIQHPDLILLQYVDDILLAATSELDCQQGTRALLQTLGDLGYRASAKKAQICQKQVKYLGYLLREGQRWLTEARKETVMGQPVPKTPRQLREFLGTAGFCRLWIPGFAEMAAPLYPLTKPGTLFSWGPDQQKAYQEIKQALLTAPALGLPDLTKPFELFVDEKQGYAKGVLTQKLGPWRRPVAYLSKKLDPVAAGWPPCLRMVAAIAVLTKDAGKLTMGQPLVILAPHAVEALVKQPPDRWLSNARMTHYQAMLLDTDRVQFGPVVALNPATLLPLPEEGAPHDCLEILAETHGTRPDLTDQPIPDADHTWYTDGSSFLQEGQRKAGAAVTTETEVIWAGALPAGTSAQRAELIALTQALKMAEGKRLNVYTDSRYAFATAHIHGEIYRRRGWLTSEGREIKNKSEILALLKALFLPKRLSIIHCLGHQKGDSAEARGNRLADQAAREAAIKTPPDTSTLLAGKRTADGSEFEKRTADGSEFESPKKKAKVE

SEQ ID NO: 2209 - protein, 2096 aa, synthetic construct
MPAAKRVKLDGGDKKYSIGLDIGTNSVGWAVITDEYKVPSKKFKVLGNTDRHSIKKNLIGALLFDSGETAEATRLKRTARRRYTRRKNRICYLQEIFSNEMAKVDDSFFHRLEESFLVEEDKKHERHPIFGNIVDEVAYHEKYPTIYHLRKKLVDSTDKADLRLIYLALAHMIKFRGHFLIEGDLNPDNSDVDKLFIQLVQTYNQLFEENPINASGVDAKAILSARLSKSRRLENLIAQLPGEKKNGLFGNLIALSLGLTPNFKSNFDLAEDAKLQLSKDTYDDDLDNLLAQIGDQYADLFLAAKNLSDAILLSDILRVNTEITKAPLSASMIKRYDEHHQDLTLLKALVRQQLPEKYKEIFFDQSKNGYAGYIDGGASQEEFYKFIKPILEKMDGTEELLVKLNREDLLRKQRTFDNGSIPHQIHLGELHAILRRQEDFYPFLKDNREKIEKILTFRIPYYVGPLARGNSRFAWMTRKSEETITPWNFEEVVDKGASAQSFIERMTNFDKNLPNEKVLPKHSLLYEYFTVYNELTKVKYVTEGMRKPAFLSGEQKKAIVDLLFKTNRKVTVKQLKEDYFKKIECFDSVEISGVEDRFNASLGTYHDLLKIIKDKDFLDNEENEDILEDIVLTLTLFEDREMIEERLKTYAHLFDDKVMKQLKRRRYTGWGRLSRKLINGIRDKQSGKTILDFLKSDGFANRNFMQLIHDDSLTFKEDIQKAQVSGQGDSLHEHIANLAGSPAIKKGILQTVKVVDELVKVMGRHKPENIVIEMARENQTTQKGQKNSRERMKRIEEGIKELGSQILKEHPVENTQLQNEKLYLYYLQNGRDMYVDQELDINRLSDYDVDHIVPQSFLKDDSIDNKVLTRSDKARGKSDNVPSEEVVKKMKNYWRQLLNAKLITQRKFDNLTKAERGGLSELDKAGFIKRQLVETRQITKHVAQILDSRMNTKYDENDKLIREVKVITLKSKLVSDFRKDFQFYKVREINNYHHAHDAYLNAVVGTALIKKYPKLESEFVYGDYKVYDVRKMIAKSEQEIGKATAKYFFYSNIMNFFKTEITLANGEIRKRPLIETNGETGEIVWDKGRDFATVRKVLSMPQVNIVKKTEVQTGGFSKESILPKRNSDKLIARKKDWDPKKYGGFDSPTVAYSVLVVAKVEKGKSKKLKSVKELLGITIMERSSFEKNPIDFLEAKGYKEVKKDLIIKLPKYSLFELENGRKRMLASAGELQKGNELALPSKYVNFLYLASHYEKLKGSPEDNEQKQLFVEQHKHYLDEIIEQISEFSKRVILADANLDKVLSAYNKHRDKPIREQAENIIHLFTLTNLGAPAAFKYFDTTIDRKRYTSTKEVLDATLIHQSITGLYETRIDLSQLGGDGGEAAAKGGGGGSGGTLGIEDEYRLHETSTEPDVSLGSTWLSDFPQAWAETGGMGLAVRQAPLIIPLKATSTPVSIQQYPMSHEARLGIKPHIQRLLDQGILVPCQSPWNTPLLPVKKPGTNDYRPVQDLREVNKRVEDIHPTVPNPYNLLSGLPPSHQWYTVLDLKDAFFCLRLHPTSQPLFAFEWRDPGMGISGQLTWTRLPQGFKNSPTLFNEALHRDLADFRIQHPDLILLQYVDDILLAATSELDCQQGTRALLQTLGDLGYRASAKKAQICQKQVKYLGYLLREGQRWLTEARKETVMGQPVPKTPRQLREFLGTAGFCRLWIPGFAEMAAPLYPLTKPGTLFSWGPDQQKAYQEIKQALLTAPALGLPDLTKPFELFVDEKQGYAKGVLTQKLGPWRRPVAYLSKKLDPVAAGWPPCLRMVAAIAVLTKDAGKLTMGQPLVILAPHAVEALVKQPPDRWLSNARMTHYQAMLLDTDRVQFGPVVALNPATLLPLPEEGAPHDCLEILAETHGTRPDLTDQPIPDADHTWYTDGSSFLQEGQRKAGAAVTTETEVIWAGALPAGTSAQRAELIALTQALKMAEGKRLNVYTDSRYAFATAHIHGEIYRRRGWLTSEGREIKNKSEILALLKALFLPKRLSIIHCLGHQKGDSAEARGNRLADQAAREAAIKTPPDTSTLLAGKRTADGSEFEKRTADGSEFESPKKKAKVE

SEQ ID NO: 2210 - protein, 2110 aa, synthetic construct
MPAAKRVKLDGGDKKYSIGLDIGTNSVGWAVITDEYKVPSKKFKVLGNTDRHSIKKNLIGALLFDSGETAEATRLKRTARRRYTRRKNRICYLQEIFSNEMAKVDDSFFHRLEESFLVEEDKKHERHPIFGNIVDEVAYHEKYPTIYHLRKKLVDSTDKADLRLIYLALAHMIKFRGHFLIEGDLNPDNSDVDKLFIQLVQTYNQLFEENPINASGVDAKAILSARLSKSRRLENLIAQLPGEKKNGLFGNLIALSLGLTPNFKSNFDLAEDAKLQLSKDTYDDDLDNLLAQIGDQYADLFLAAKNLSDAILLSDILRVNTEITKAPLSASMIKRYDEHHQDLTLLKALVRQQLPEKYKEIFFDQSKNGYAGYIDGGASQEEFYKFIKPILEKMDGTEELLVKLNREDLLRKQRTFDNGSIPHQIHLGELHAILRRQEDFYPFLKDNREKIEKILTFRIPYYVGPLARGNSRFAWMTRKSEETITPWNFEEVVDKGASAQSFIERMTNFDKNLPNEKVLPKHSLLYEYFTVYNELTKVKYVTEGMRKPAFLSGEQKKAIVDLLFKTNRKVTVKQLKEDYFKKIECFDSVEISGVEDRFNASLGTYHDLLKIIKDKDFLDNEENEDILEDIVLTLTLFEDREMIEERLKTYAHLFDDKVMKQLKRRRYTGWGRLSRKLINGIRDKQSGKTILDFLKSDGFANRNFMQLIHDDSLTFKEDIQKAQVSGQGDSLHEHIANLAGSPAIKKGILQTVKVVDELVKVMGRHKPENIVIEMARENQTTQKGQKNSRERMKRIEEGIKELGSQILKEHPVENTQLQNEKLYLYYLQNGRDMYVDQELDINRLSDYDVDHIVPQSFLKDDSIDNKVLTRSDKARGKSDNVPSEEVVKKMKNYWRQLLNAKLITQRKFDNLTKAERGGLSELDKAGFIKRQLVETRQITKHVAQILDSRMNTKYDENDKLIREVKVITLKSKLVSDFRKDFQFYKVREINNYHHAHDAYLNAVVGTALIKKYPKLESEFVYGDYKVYDVRKMIAKSEQEIGKATAKYFFYSNIMNFFKTEITLANGEIRKRPLIETNGETGEIVWDKGRDFATVRKVLSMPQVNIVKKTEVQTGGFSKESILPKRNSDKLIARKKDWDPKKYGGFDSPTVAYSVLVVAKVEKGKSKKLKSVKELLGITIMERSSFEKNPIDFLEAKGYKEVKKDLIIKLPKYSLFELENGRKRMLASAGELQKGNELALPSKYVNFLYLASHYEKLKGSPEDNEQKQLFVEQHKHYLDEIIEQISEFSKRVILADANLDKVLSAYNKHRDKPIREQAENIIHLFTLTNLGAPAAFKYFDTTIDRKRYTSTKEVLDATLIHQSITGLYETRIDLSQLGGDGGGGGGSGGGGSGGGGSGGGGSGGGGSGGTLGIEDEYRLHETSTEPDVSLGSTWLSDFPQAWAETGGMGLAVRQAPLIIPLKATSTPVSIQQYPMSHEARLGIKPHIQRLLDQGILVPCQSPWNTPLLPVKKPGTNDYRPVQDLREVNKRVEDIHPTVPNPYNLLSGLPPSHQWYTVLDLKDAFFCLRLHPTSQPLFAFEWRDPGMGISGQLTWTRLPQGFKNSPTLFNEALHRDLADFRIQHPDLILLQYVDDILLAATSELDCQQGTRALLQTLGDLGYRASAKKAQICQKQVKYLGYLLREGQRWLTEARKETVMGQPVPKTPRQLREFLGTAGFCRLWIPGFAEMAAPLYPLTKPGTLFSWGPDQQKAYQEIKQALLTAPALGLPDLTKPFELFVDEKQGYAKGVLTQKLGPWRRPVAYLSKKLDPVAAGWPPCLRMVAAIAVLTKDAGKLTMGQPLVILAPHAVEALVKQPPDRWLSNARMTHYQAMLLDTDRVQFGPVVALNPATLLPLPEEGAPHDCLEILAETHGTRPDLTDQPIPDADHTWYTDGSSFLQEGQRKAGAAVTTETEVIWAGALPAGTSAQRAELIALTQALKMAEGKRLNVYTDSRYAFATAHIHGEIYRRRGWLTSEGREIKNKSEILALLKALFLPKRLSIIHCLGHQKGDSAEARGNRLADQAAREAAIKTPPDTSTLLAGKRTADGSEFEKRTADGSEFESPKKKAKVE

SEQ ID NO: 2211 - protein, 2096 aa, synthetic construct
MPAAKRVKLDGGDKKYSIGLDIGTNSVGWAVITDEYKVPSKKFKVLGNTDRHSIKKNLIGALLFDSGETAEATRLKRTARRRYTRRKNRICYLQEIFSNEMAKVDDSFFHRLEESFLVEEDKKHERHPIFGNIVDEVAYHEKYPTIYHLRKKLVDSTDKADLRLIYLALAHMIKFRGHFLIEGDLNPDNSDVDKLFIQLVQTYNQLFEENPINASGVDAKAILSARLSKSRRLENLIAQLPGEKKNGLFGNLIALSLGLTPNFKSNFDLAEDAKLQLSKDTYDDDLDNLLAQIGDQYADLFLAAKNLSDAILLSDILRVNTEITKAPLSASMIKRYDEHHQDLTLLKALVRQQLPEKYKEIFFDQSKNGYAGYIDGGASQEEFYKFIKPILEKMDGTEELLVKLNREDLLRKQRTFDNGSIPHQIHLGELHAILRRQEDFYPFLKDNREKIEKILTFRIPYYVGPLARGNSRFAWMTRKSEETITPWNFEEVVDKGASAQSFIERMTNFDKNLPNEKVLPKHSLLYEYFTVYNELTKVKYVTEGMRKPAFLSGEQKKAIVDLLFKTNRKVTVKQLKEDYFKKIECFDSVEISGVEDRFNASLGTYHDLLKIIKDKDFLDNEENEDILEDIVLTLTLFEDREMIEERLKTYAHLFDDKVMKQLKRRRYTGWGRLSRKLINGIRDKQSGKTILDFLKSDGFANRNFMQLIHDDSLTFKEDIQKAQVSGQGDSLHEHIANLAGSPAIKKGILQTVKVVDELVKVMGRHKPENIVIEMARENQTTQKGQKNSRERMKRIEEGIKELGSQILKEHPVENTQLQNEKLYLYYLQNGRDMYVDQELDINRLSDYDVDHIVPQSFLKDDSIDNKVLTRSDKARGKSDNVPSEEVVKKMKNYWRQLLNAKLITQRKFDNLTKAERGGLSELDKAGFIKRQLVETRQITKHVAQILDSRMNTKYDENDKLIREVKVITLKSKLVSDFRKDFQFYKVREINNYHHAHDAYLNAVVGTALIKKYPKLESEFVYGDYKVYDVRKMIAKSEQEIGKATAKYFFYSNIMNFFKTEITLANGEIRKRPLIETNGETGEIVWDKGRDFATVRKVLSMPQVNIVKKTEVQTGGFSKESILPKRNSDKLIARKKDWDPKKYGGFDSPTVAYSVLVVAKVEKGKSKKLKSVKELLGITIMERSSFEKNPIDFLEAKGYKEVKKDLIIKLPKYSLFELENGRKRMLASAGELQKGNELALPSKYVNFLYLASHYEKLKGSPEDNEQKQLFVEQHKHYLDEIIEQISEFSKRVILADANLDKVLSAYNKHRDKPIREQAENIIHLFTLTNLGAPAAFKYFDTTIDRKRYTSTKEVLDATLIHQSITGLYETRIDLSQLGGDGGEAAAKGSSPAPGGTLGIEDEYRLHETSTEPDVSLGSTWLSDFPQAWAETGGMGLAVRQAPLIIPLKATSTPVSIQQYPMSHEARLGIKPHIQRLLDQGILVPCQSPWNTPLLPVKKPGTNDYRPVQDLREVNKRVEDIHPTVPNPYNLLSGLPPSHQWYTVLDLKDAFFCLRLHPTSQPLFAFEWRDPGMGISGQLTWTRLPQGFKNSPTLFNEALHRDLADFRIQHPDLILLQYVDDILLAATSELDCQQGTRALLQTLGDLGYRASAKKAQICQKQVKYLGYLLREGQRWLTEARKETVMGQPVPKTPRQLREFLGTAGFCRLWIPGFAEMAAPLYPLTKPGTLFSWGPDQQKAYQEIKQALLTAPALGLPDLTKPFELFVDEKQGYAKGVLTQKLGPWRRPVAYLSKKLDPVAAGWPPCLRMVAAIAVLTKDAGKLTMGQPLVILAPHAVEALVKQPPDRWLSNARMTHYQAMLLDTDRVQFGPVVALNPATLLPLPEEGAPHDCLEILAETHGTRPDLTDQPIPDADHTWYTDGSSFLQEGQRKAGAAVTTETEVIWAGALPAGTSAQRAELIALTQALKMAEGKRLNVYTDSRYAFATAHIHGEIYRRRGWLTSEGREIKNKSEILALLKALFLPKRLSIIHCLGHQKGDSAEARGNRLADQAAREAAIKTPPDTSTLLAGKRTADGSEFEKRTADGSEFESPKKKAKVE

SEQ ID NO: 2212 - protein, 2094 aa, synthetic construct; identical to SEQ ID NO: 2079

SEQ ID NO: 2213 - protein, 2096 aa, synthetic construct
MPAAKRVKLDGGDKKYSIGLDIGTNSVGWAVITDEYKVPSKKFKVLGNTDRHSIKKNLIGALLFDSGETAEATRLKRTARRRYTRRKNRICYLQEIFSNEMAKVDDSFFHRLEESFLVEEDKKHERHPIFGNIVDEVAYHEKYPTIYHLRKKLVDSTDKADLRLIYLALAHMIKFRGHFLIEGDLNPDNSDVDKLFIQLVQTYNQLFEENPINASGVDAKAILSARLSKSRRLENLIAQLPGEKKNGLFGNLIALSLGLTPNFKSNFDLAEDAKLQLSKDTYDDDLDNLLAQIGDQYADLFLAAKNLSDAILLSDILRVNTEITKAPLSASMIKRYDEHHQDLTLLKALVRQQLPEKYKEIFFDQSKNGYAGYIDGGASQEEFYKFIKPILEKMDGTEELLVKLNREDLLRKQRTFDNGSIPHQIHLGELHAILRRQEDFYPFLKDNREKIEKILTFRIPYYVGPLARGNSRFAWMTRKSEETITPWNFEEVVDKGASAQSFIERMTNFDKNLPNEKVLPKHSLLYEYFTVYNELTKVKYVTEGMRKPAFLSGEQKKAIVDLLFKTNRKVTVKQLKEDYFKKIECFDSVEISGVEDRFNASLGTYHDLLKIIKDKDFLDNEENEDILEDIVLTLTLFEDREMIEERLKTYAHLFDDKVMKQLKRRRYTGWGRLSRKLINGIRDKQSGKTILDFLKSDGFANRNFMQLIHDDSLTFKEDIQKAQVSGQGDSLHEHIANLAGSPAIKKGILQTVKVVDELVKVMGRHKPENIVIEMARENQTTQKGQKNSRERMKRIEEGIKELGSQILKEHPVENTQLQNEKLYLYYLQNGRDMYVDQELDINRLSDYDVDHIVPQSFLKDDSIDNKVLTRSDKARGKSDNVPSEEVVKKMKNYWRQLLNAKLITQRKFDNLTKAERGGLSELDKAGFIKRQLVETRQITKHVAQILDSRMNTKYDENDKLIREVKVITLKSKLVSDFRKDFQFYKVREINNYHHAHDAYLNAVVGTALIKKYPKLESEFVYGDYKVYDVRKMIAKSEQEIGKATAKYFFYSNIMNFFKTEITLANGEIRKRPLIETNGETGEIVWDKGRDFATVRKVLSMPQVNIVKKTEVQTGGFSKESILPKRNSDKLIARKKDWDPKKYGGFDSPTVAYSVLVVAKVEKGKSKKLKSVKELLGITIMERSSFEKNPIDFLEAKGYKEVKKDLIIKLPKYSLFELENGRKRMLASAGELQKGNELALPSKYVNFLYLASHYEKLKGSPEDNEQKQLFVEQHKHYLDEIIEQISEFSKRVILADANLDKVLSAYNKHRDKPIREQAENIIHLFTLTNLGAPAAFKYFDTTIDRKRYTSTKEVLDATLIHQSITGLYETRIDLSQLGGDGGEAAAKPAPGSSGGTLGIEDEYRLHETSTEPDVSLGSTWLSDFPQAWAETGGMGLAVRQAPLIIPLKATSTPVSIQQYPMSHEARLGIKPHIQRLLDQGILVPCQSPWNTPLLPVKKPGTNDYRPVQDLREVNKRVEDIHPTVPNPYNLLSGLPPSHQWYTVLDLKDAFFCLRLHPTSQPLFAFEWRDPGMGISGQLTWTRLPQGFKNSPTLFNEALHRDLADFRIQHPDLILLQYVDDILLAATSELDCQQGTRALLQTLGDLGYRASAKKAQICQKQVKYLGYLLREGQRWLTEARKETVMGQPVPKTPRQLREFLGTAGFCRLWIPGFAEMAAPLYPLTKPGTLFSWGPDQQKAYQEIKQALLTAPALGLPDLTKPFELFVDEKQGYAKGVLTQKLGPWRRPVAYLSKKLDPVAAGWPPCLRMVAAIAVLTKDAGKLTMGQPLVILAPHAVEALVKQPPDRWLSNARMTHYQAMLLDTDRVQFGPVVALNPATLLPLPEEGAPHDCLEILAETHGTRPDLTDQPIPDADHTWYTDGSSFLQEGQRKAGAAVTTETEVIWAGALPAGTSAQRAELIALTQALKMAEGKRLNVYTDSRYAFATAHIHGEIYRRRGWLTSEGREIKNKSEILALLKALFLPKRLSIIHCLGHQKGDSAEARGNRLADQAAREAAIKTPPDTSTLLAGKRTADGSEFEKRTADGSEFESPKKKAKVE

SEQ ID NO: 2214 - protein, 2096 aa, synthetic construct
MPAAKRVKLDGGDKKYSIGLDIGTNSVGWAVITDEYKVPSKKFKVLGNTDRHSIKKNLIGALLFDSGETAEATRLKRTARRRYTRRKNRICYLQEIFSNEMAKVDDSFFHRLEESFLVEEDKKHERHPIFGNIVDEVAYHEKYPTIYHLRKKLVDSTDKADLRLIYLALAHMIKFRGHFLIEGDLNPDNSDVDKLFIQLVQTYNQLFEENPINASGVDAKAILSARLSKSRRLENLIAQLPGEKKNGLFGNLIALSLGLTPNFKSNFDLAEDAKLQLSKDTYDDDLDNLLAQIGDQYADLFLAAKNLSDAILLSDILRVNTEITKAPLSASMIKRYDEHHQDLTLLKALVRQQLPEKYKEIFFDQSKNGYAGYIDGGASQEEFYKFIKPILEKMDGTEELLVKLNREDLLRKQRTFDNGSIPHQIHLGELHAILRRQEDFYPFLKDNREKIEKILTFRIPYYVGPLARGNSRFAWMTRKSEETITPWNFEEVVDKGASAQSFIERMTNFDKNLPNEKVLPKHSLLYEYFTVYNELTKVKYVTEGMRKPAFLSGEQKKAIVDLLFKTNRKVTVKQLKEDYFKKIECFDSVEISGVEDRFNASLGTYHDLLKIIKDKDFLDNEENEDILEDIVLTLTLFEDREMIEERLKTYAHLFDDKVMKQLKRRRYTGWGRLSRKLINGIRDKQSGKTILDFLKSDGFANRNFMQLIHDDSLTFKEDIQKAQVSGQGDSLHEHIANLAGSPAIKKGILQTVKVVDELVKVMGRHKPENIVIEMARENQTTQKGQKNSRERMKRIEEGIKELGSQILKEHPVENTQLQNEKLYLYYLQNGRDMYVDQELDINRLSDYDVDHIVPQSFLKDDSIDNKVLTRSDKARGKSDNVPSEEVVKKMKNYWRQLLNAKLITQRKFDNLTKAERGGLSELDKAGFIKRQLVETRQITKHVAQILDSRMNTKYDENDKLIREVKVITLKSKLVSDFRKDFQFYKVREINNYHHAHDAYLNAVVGTALIKKYPKLESEFVYGDYKVYDVRKMIAKSEQEIGKATAKYFFYSNIMNFFKTEITLANGEIRKRPLIETNGETGEIVWDKGRDFATVRKVLSMPQVNIVKKTEVQTGGFSKESILPKRNSDKLIARKKDWDPKKYGGFDSPTVAYSVLVVAKVEKGKSKKLKSVKELLGITIMERSSFEKNPIDFLEAKGYKEVKKDLIIKLPKYSLFELENGRKRMLASAGELQKGNELALPSKYVNFLYLASHYEKLKGSPEDNEQKQLFVEQHKHYLDEIIEQISEFSKRVILADANLDKVLSAYNKHRDKPIREQAENIIHLFTLTNLGAPAAFKYFDTTIDRKRYTSTKEVLDATLIHQSITGLYETRIDLSQLGGDGGGSSGGGEAAAKGGTLGIEDEYRLHETSTEPDVSLGSTWLSDFPQAWAETGGMGLAVRQAPLIIPLKATSTPVSIQQYPMSHEARLGIKPHIQRLLDQGILVPCQSPWNTPLLPVKKPGTNDYRPVQDLREVNKRVEDIHPTVPNPYNLLSGLPPSHQWYTVLDLKDAFFCLRLHPTSQPLFAFEWRDPGMGISGQLTWTRLPQGFKNSPTLFNEALHRDLADFRIQHPDLILLQYVDDILLAATSELDCQQGTRALLQTLGDLGYRASAKKAQICQKQVKYLGYLLREGQRWLTEARKETVMGQPVPKTPRQLREFLGTAGFCRLWIPGFAEMAAPLYPLTKPGTLFSWGPDQQKAYQEIKQALLTAPALGLPDLTKPFELFVDEKQGYAKGVLTQKLGPWRRPVAYLSKKLDPVAAGWPPCLRMVAAIAVLTKDAGKLTMGQPLVILAPHAVEALVKQPPDRWLSNARMTHYQAMLLDTDRVQFGPVVALNPATLLPLPEEGAPHDCLEILAETHGTRPDLTDQPIPDADHTWYTDGSSFLQEGQRKAGAAVTTETEVIWAGALPAGTSAQRAELIALTQALKMAEGKRLNVYTDSRYAFATAHIHGEIYRRRGWLTSEGREIKNKSEILALLKALFLPKRLSIIHCLGHQKGDSAEARGNRLADQAAREAAIKTPPDTSTLLAGKRTADGSEFEKRTADGSEFESPKKKAKVE

SEQ ID NO: 2215 - protein, 2096 aa, synthetic construct
MPAAKRVKLDGGDKKYSIGLDIGTNSVGWAVITDEYKVPSKKFKVLGNTDRHSIKKNLIGALLFDSGETAEATRLKRTARRRYTRRKNRICYLQEIFSNEMAKVDDSFFHRLEESFLVEEDKKHERHPIFGNIVDEVAYHEKYPTIYHLRKKLVDSTDKADLRLIYLALAHMIKFRGHFLIEGDLNPDNSDVDKLFIQLVQTYNQLFEENPINASGVDAKAILSARLSKSRRLENLIAQLPGEKKNGLFGNLIALSLGLTPNFKSNFDLAEDAKLQLSKDTYDDDLDNLLAQIGDQYADLFLAAKNLSDAILLSDILRVNTEITKAPLSASMIKRYDEHHQDLTLLKALVRQQLPEKYKEIFFDQSKNGYAGYIDGGASQEEFYKFIKPILEKMDGTEELLVKLNREDLLRKQRTFDNGSIPHQIHLGELHAILRRQEDFYPFLKDNREKIEKILTFRIPYYVGPLARGNSRFAWMTRKSEETITPWNFEEVVDKGASAQSFIERMTNFDKNLPNEKVLPKHSLLYEYFTVYNELTKVKYVTEGMRKPAFLSGEQKKAIVDLLFKTNRKVTVKQLKEDYFKKIECFDSVEISGVEDRFNASLGTYHDLLKIIKDKDFLDNEENEDILEDIVLTLTLFEDREMIEERLKTYAHLFDDKVMKQLKRRRYTGWGRLSRKLINGIRDKQSGKTILDFLKSDGFANRNFMQLIHDDSLTFKEDIQKAQVSGQGDSLHEHIANLAGSPAIKKGILQTVKVVDELVKVMGRHKPENIVIEMARENQTTQKGQKNSRERMKRIEEGIKELGSQILKEHPVENTQLQNEKLYLYYLQNGRDMYVDQELDINRLSDYDVDHIVPQSFLKDDSIDNKVLTRSDKARGKSDNVPSEEVVKKMKNYWRQLLNAKLITQRKFDNLTKAERGGLSELDKAGFIKRQLVETRQITKHVAQILDSRMNTKYDENDKLIREVKVITLKSKLVSDFRKDFQFYKVREINNYHHAHDAYLNAVVGTALIKKYPKLESEFVYGDYKVYDVRKMIAKSEQEIGKATAKYFFYSNIMNFFKTEITLANGEIRKRPLIETNGETGEIVWDKGRDFATVRKVLSMPQVNIVKKTEVQTGGFSKESILPKRNSDKLIARKKDWDPKKYGGFDSPTVAYSVLVVAKVEKGKSKKLKSVKELLGITIMERSSFEKNPIDFLEAKGYKEVKKDLIIKLPKYSLFELENGRKRMLASAGELQKGNELALPSKYVNFLYLASHYEKLKGSPEDNEQKQLFVEQHKHYLDEIIEQISEFSKRVILADANLDKVLSAYNKHRDKPIREQAENIIHLFTLTNLGAPAAFKYFDTTIDRKRYTSTKEVLDATLIHQSITGLYETRIDLSQLGGDGGGSSEAAAKPAPGGTLGIEDEYRLHETSTEPDVSLGSTWLSDFPQAWAETGGMGLAVRQAPLIIPLKATSTPVSIQQYPMSHEARLGIKPHIQRLLDQGILVPCQSPWNTPLLPVKKPGTNDYRPVQDLREVNKRVEDIHPTVPNPYNLLSGLPPSHQWYTVLDLKDAFFCLRLHPTSQPLFAFEWRDPGMGISGQLTWTRLPQGFKNSPTLFNEALHRDLADFRIQHPDLILLQYVDDILLAATSELDCQQGTRALLQTLGDLGYRASAKKAQICQKQVKYLGYLLREGQRWLTEARKETVMGQPVPKTPRQLREFLGTAGFCRLWIPGFAEMAAPLYPLTKPGTLFSWGPDQQKAYQEIKQALLTAPALGLPDLTKPFELFVDEKQGYAKGVLTQKLGPWRRPVAYLSKKLDPVAAGWPPCLRMVAAIAVLTKDAGKLTMGQPLVILAPHAVEALVKQPPDRWLSNARMTHYQAMLLDTDRVQFGPVVALNPATLLPLPEEGAPHDCLEILAETHGTRPDLTDQPIPDADHTWYTDGSSFLQEGQRKAGAAVTTETEVIWAGALPAGTSAQRAELIALTQALKMAEGKRLNVYTDSRYAFATAHIHGEIYRRRGWLTSEGREIKNKSEILALLKALFLPKRLSIIHCLGHQKGDSAEARGNRLADQAAREAAIKTPPDTSTLLAGKRTADGSEFEKRTADGSEFESPKKKAKVE

SEQ ID NO: 2216 - protein, 2091 aa, synthetic construct
MPAAKRVKLDGGDKKYSIGLDIGTNSVGWAVITDEYKVPSKKFKVLGNTDRHSIKKNLIGALLFDSGETAEATRLKRTARRRYTRRKNRICYLQEIFSNEMAKVDDSFFHRLEESFLVEEDKKHERHPIFGNIVDEVAYHEKYPTIYHLRKKLVDSTDKADLRLIYLALAHMIKFRGHFLIEGDLNPDNSDVDKLFIQLVQTYNQLFEENPINASGVDAKAILSARLSKSRRLENLIAQLPGEKKNGLFGNLIALSLGLTPNFKSNFDLAEDAKLQLSKDTYDDDLDNLLAQIGDQYADLFLAAKNLSDAILLSDILRVNTEITKAPLSASMIKRYDEHHQDLTLLKALVRQQLPEKYKEIFFDQSKNGYAGYIDGGASQEEFYKFIKPILEKMDGTEELLVKLNREDLLRKQRTFDNGSIPHQIHLGELHAILRRQEDFYPFLKDNREKIEKILTFRIPYYVGPLARGNSRFAWMTRKSEETITPWNFEEVVDKGASAQSFIERMTNFDKNLPNEKVLPKHSLLYEYFTVYNELTKVKYVTEGMRKPAFLSGEQKKAIVDLLFKTNRKVTVKQLKEDYFKKIECFDSVEISGVEDRFNASLGTYHDLLKIIKDKDFLDNEENEDILEDIVLTLTLFEDREMIEERLKTYAHLFDDKVMKQLKRRRYTGWGRLSRKLINGIRDKQSGKTILDFLKSDGFANRNFMQLIHDDSLTFKEDIQKAQVSGQGDSLHEHIANLAGSPAIKKGILQTVKVVDELVKVMGRHKPENIVIEMARENQTTQKGQKNSRERMKRIEEGIKELGSQILKEHPVENTQLQNEKLYLYYLQNGRDMYVDQELDINRLSDYDVDHIVPQSFLKDDSIDNKVLTRSDKARGKSDNVPSEEVVKKMKNYWRQLLNAKLITQRKFDNLTKAERGGLSELDKAGFIKRQLVETRQITKHVAQILDSRMNTKYDENDKLIREVKVITLKSKLVSDFRKDFQFYKVREINNYHHAHDAYLNAVVGTALIKKYPKLESEFVYGDYKVYDVRKMIAKSEQEIGKATAKYFFYSNIMNFFKTEITLANGEIRKRPLIETNGETGEIVWDKGRDFATVRKVLSMPQVNIVKKTEVQTGGFSKESILPKRNSDKLIARKKDWDPKKYGGFDSPTVAYSVLVVAKVEKGKSKKLKSVKELLGITIMERSSFEKNPIDFLEAKGYKEVKKDLIIKLPKYSLFELENGRKRMLASAGELQKGNELALPSKYVNFLYLASHYEKLKGSPEDNEQKQLFVEQHKHYLDEIIEQISEFSKRVILADANLDKVLSAYNKHRDKPIREQAENIIHLFTLTNLGAPAAFKYFDTTIDRKRYTSTKEVLDATLIHQSITGLYETRIDLSQLGGDGGGGGGGGGGTLGIEDEYRLHETSTEPDVSLGSTWLSDFPQAWAETGGMGLAVRQAPLIIPLKATSTPVSIQQYPMSHEARLGIKPHIQRLLDQGILVPCQSPWNTPLLPVKKPGTNDYRPVQDLREVNKRVEDIHPTVPNPYNLLSGLPPSHQWYTVLDLKDAFFCLRLHPTSQPLFAFEWRDPGMGISGQLTWTRLPQGFKNSPTLFNEALHRDLADFRIQHPDLILLQYVDDILLAATSELDCQQGTRALLQTLGDLGYRASAKKAQICQKQVKYLGYLLREGQRWLTEARKETVMGQPVPKTPRQLREFLGTAGFCRLWIPGFAEMAAPLYPLTKPGTLFSWGPDQQKAYQEIKQALLTAPALGLPDLTKPFELFVDEKQGYAKGVLTQKLGPWRRPVAYLSKKLDPVAAGWPPCLRMVAAIAVLTKDAGKLTMGQPLVILAPHAVEALVKQPPDRWLSNARMTHYQAMLLDTDRVQFGPVVALNPATLLPLPEEGAPHDCLEILAETHGTRPDLTDQPIPDADHTWYTDGSSFLQEGQRKAGAAVTTETEVIWAGALPAGTSAQRAELIALTQALKMAEGKRLNVYTDSRYAFATAHIHGEIYRRRGWLTSEGREIKNKSEILALLKALFLPKRLSIIHCLGHQKGDSAEARGNRLADQAAREAAIKTPPDTSTLLAGKRTADGSEFEKRTADGSEFESPKKKAKVE

SEQ ID NO: 2217 - protein, 2094 aa, synthetic construct
MPAAKRVKLDGGDKKYSIGLDIGTNSVGWAVITDEYKVPSKKFKVLGNTDRHSIKKNLIGALLFDSGETAEATRLKRTARRRYTRRKNRICYLQEIFSNEMAKVDDSFFHRLEESFLVEEDKKHERHPIFGNIVDEVAYHEKYPTIYHLRKKLVDSTDKADLRLIYLALAHMIKFRGHFLIEGDLNPDNSDVDKLFIQLVQTYNQLFEENPINASGVDAKAILSARLSKSRRLENLIAQLPGEKKNGLFGNLIALSLGLTPNFKSNFDLAEDAKLQLSKDTYDDDLDNLLAQIGDQYADLFLAAKNLSDAILLSDILRVNTEITKAPLSASMIKRYDEHHQDLTLLKALVRQQLPEKYKEIFFDQSKNGYAGYIDGGASQEEFYKFIKPILEKMDGTEELLVKLNREDLLRKQRTFDNGSIPHQIHLGELHAILRRQEDFYPFLKDNREKIEKILTFRIPYYVGPLARGNSRFAWMTRKSEETITPWNFEEVVDKGASAQSFIERMTNFDKNLPNEKVLPKHSLLYEYFTVYNELTKVKYVTEGMRKPAFLSGEQKKAIVDLLFKTNRKVTVKQLKEDYFKKIECFDSVEISGVEDRFNASLGTYHDLLKIIKDKDFLDNEENEDILEDIVLTLTLFEDREMIEERLKTYAHLFDDKVMKQLKRRRYTGWGRLSRKLINGIRDKQSGKTILDFLKSDGFANRNFMQLIHDDSLTFKEDIQKAQVSGQGDSLHEHIANLAGSPAIKKGILQTVKVVDELVKVMGRHKPENIVIEMARENQTTQKGQKNSRERMKRIEEGIKELGSQILKEHPVENTQLQNEKLYLYYLQNGRDMYVDQELDINRLSDYDVDHIVPQSFLKDDSIDNKVLTRSDKARGKSDNVPSEEVVKKMKNYWRQLLNAKLITQRKFDNLTKAERGGLSELDKAGFIKRQLVETRQITKHVAQILDSRMNTKYDENDKLIREVKVITLKSKLVSDFRKDFQFYKVREINNYHHAHDAYLNAVVGTALIKKYPKLESEFVYGDYKVYDVRKMIAKSEQEIGKATAKYFFYSNIMNFFKTEITLANGEIRKRPLIETNGETGEIVWDKGRDFATVRKVLSMPQVNIVKKTEVQTGGFSKESILPKRNSDKLIARKKDWDPKKYGGFDSPTVAYSVLVVAKVEKGKSKKLKSVKELLGITIMERSSFEKNPIDFLEAKGYKEVKKDLIIKLPKYSLFELENGRKRMLASAGELQKGNELALPSKYVNFLYLASHYEKLKGSPEDNEQKQLFVEQHKHYLDEIIEQISEFSKRVILADANLDKVLSAYNKHRDKPIREQAENIIHLFTLTNLGAPAAFKYFDTTIDRKRYTSTKEVLDATLIHQSITGLYETRIDLSQLGGDGGGGSGSSPAPGGTLGIEDEYRLHETSTEPDVSLGSTWLSDFPQAWAETGGMGLAVRQAPLIIPLKATSTPVSIQQYPMSHEARLGIKPHIQRLLDQGILVPCQSPWNTPLLPVKKPGTNDYRPVQDLREVNKRVEDIHPTVPNPYNLLSGLPPSHQWYTVLDLKDAFFCLRLHPTSQPLFAFEWRDPGMGISGQLTWTRLPQGFKNSPTLFNEALHRDLADFRIQHPDLILLQYVDDILLAATSELDCQQGTRALLQTLGDLGYRASAKKAQICQKQVKYLGYLLREGQRWLTEARKETVMGQPVPKTPRQLREFLGTAGFCRLWIPGFAEMAAPLYPLTKPGTLFSWGPDQQKAYQEIKQALLTAPALGLPDLTKPFELFVDEKQGYAKGVLTQKLGPWRRPVAYLSKKLDPVAAGWPPCLRMVAAIAVLTKDAGKLTMGQPLVILAPHAVEALVKQPPDRWLSNARMTHYQAMLLDTDRVQFGPVVALNPATLLPLPEEGAPHDCLEILAETHGTRPDLTDQPIPDADHTWYTDGSSFLQEGQRKAGAAVTTETEVIWAGALPAGTSAQRAELIALTQALKMAEGKRLNVYTDSRYAFATAHIHGEIYRRRGWLTSEGREIKNKSEILALLKALFLPKRLSIIHCLGHQKGDSAEARGNRLADQAAREAAIKTPPDTSTLLAGKRTADGSEFEKRTADGSEFESPKKKAKVE

SEQ ID NO: 2218 - protein, 2096 aa, synthetic construct
MPAAKRVKLDGGDKKYSIGLDIGTNSVGWAVITDEYKVPSKKFKVLGNTDRHSIKKNLIGALLFDSGETAEATRLKRTARRRYTRRKNRICYLQEIFSNEMAKVDDSFFHRLEESFLVEEDKKHERHPIFGNIVDEVAYHEKYPTIYHLRKKLVDSTDKADLRLIYLALAHMIKFRGHFLIEGDLNPDNSDVDKLFIQLVQTYNQLFEENPINASGVDAKAILSARLSKSRRLENLIAQLPGEKKNGLFGNLIALSLGLTPNFKSNFDLAEDAKLQLSKDTYDDDLDNLLAQIGDQYADLFLAAKNLSDAILLSDILRVNTEITKAPLSASMIKRYDEHHQDLTLLKALVRQQLPEKYKEIFFDQSKNGYAGYIDGGASQEEFYKFIKPILEKMDGTEELLVKLNREDLLRKQRTFDNGSIPHQIHLGELHAILRRQEDFYPFLKDNREKIEKILTFRIPYYVGPLARGNSRFAWMTRKSEETITPWNFEEVVDKGASAQSFIERMTNFDKNLPNEKVLPKHSLLYEYFTVYNELTKVKYVTEGMRKPAFLSGEQKKAIVDLLFKTNRKVTVKQLKEDYFKKIECFDSVEISGVEDRFNASLGTYHDLLKIIKDKDFLDNEENEDILEDIVLTLTLFEDREMIEERLKTYAHLFDDKVMKQLKRRRYTGWGRLSRKLINGIRDKQSGKTILDFLKSDGFANRNFMQLIHDDSLTFKEDIQKAQVSGQGDSLHEHIANLAGSPAIKKGILQTVKVVDELVKVMGRHKPENIVIEMARENQTTQKGQKNSRERMKRIEEGIKELGSQILKEHPVENTQLQNEKLYLYYLQNGRDMYVDQELDINRLSDYDVDHIVPQSFLKDDSIDNKVLTRSDKARGKSDNVPSEEVVKKMKNYWRQLLNAKLITQRKFDNLTKAERGGLSELDKAGFIKRQLVETRQITKHVAQILDSRMNTKYDENDKLIREVKVITLKSKLVSDFRKDFQFYKVREINNYHHAHDAYLNAVVGTALIKKYPKLESEFVYGDYKVYDVRKMIAKSEQEIGKATAKYFFYSNIMNFFKTEITLANGEIRKRPLIETNGETGEIVWDKGRDFATVRKVLSMPQVNIVKKTEVQTGGFSKESILPKRNSDKLIARKKDWDPKKYGGFDSPTVAYSVLVVAKVEKGKSKKLKSVKELLGITIMERSSFEKNPIDFLEAKGYKEVKKDLIIKLPKYSLFELENGRKRMLASAGELQKGNELALPSKYVNFLYLASHYEKLKGSPEDNEQKQLFVEQHKHYLDEIIEQISEFSKRVILADANLDKVLSAYNKHRDKPIREQAENIIHLFTLTNLGAPAAFKYFDTTIDRKRYTSTKEVLDATLIHQSITGLYETRIDLSQLGGDGGEAAAKGGSGGGGGTLGIEDEYRLHETSTEPDVSLGSTWLSDFPQAWAETGGMGLAVRQAPLIIPLKATSTPVSIQQYPMSHEARLGIKPHIQRLLDQGILVPCQSPWNTPLLPVKKPGTNDYRPVQDLREVNKRVEDIHPTVPNPYNLLSGLPPSHQWYTVLDLKDAFFCLRLHPTSQPLFAFEWRDPGMGISGQLTWTRLPQGFKNSPTLFNEALHRDLADFRIQHPDLILLQYVDDILLAATSELDCQQGTRALLQTLGDLGYRASAKKAQICQKQVKYLGYLLREGQRWLTEARKETVMGQPVPKTPRQLREFLGTAGFCRLWIPGFAEMAAPLYPLTKPGTLFSWGPDQQKAYQEIKQALLTAPALGLPDLTKPFELFVDEKQGYAKGVLTQKLGPWRRPVAYLSKKLDPVAAGWPPCLRMVAAIAVLTKDAGKLTMGQPLVILAPHAVEALVKQPPDRWLSNARMTHYQAMLLDTDRVQFGPVVALNPATLLPLPEEGAPHDCLEILAETHGTRPDLTDQPIPDADHTWYTDGSSFLQEGQRKAGAAVTTETEVIWAGALPAGTSAQRAELIALTQALKMAEGKRLNVYTDSRYAFATAHIHGEIYRRRGWLTSEGREIKNKSEILALLKALFLPKRLSIIHCLGHQKGDSAEARGNRLADQAAREAAIKTPPDTSTLLAGKRTADGSEFEKRTADGSEFESPKKKAKVE

SEQ ID NO: 2219 - protein, 2094 aa, synthetic construct
MPAAKRVKLDGGDKKYSIGLDIGTNSVGWAVITDEYKVPSKKFKVLGNTDRHSIKKNLIGALLFDSGETAEATRLKRTARRRYTRRKNRICYLQEIFSNEMAKVDDSFFHRLEESFLVEEDKKHERHPIFGNIVDEVAYHEKYPTIYHLRKKLVDSTDKADLRLIYLALAHMIKFRGHFLIEGDLNPDNSDVDKLFIQLVQTYNQLFEENPINASGVDAKAILSARLSKSRRLENLIAQLPGEKKNGLFGNLIALSLGLTPNFKSNFDLAEDAKLQLSKDTYDDDLDNLLAQIGDQYADLFLAAKNLSDAILLSDILRVNTEITKAPLSASMIKRYDEHHQDLTLLKALVRQQLPEKYKEIFFDQSKNGYAGYIDGGASQEEFYKFIKPILEKMDGTEELLVKLNREDLLRKQRTFDNGSIPHQIHLGELHAILRRQEDFYPFLKDNREKIEKILTFRIPYYVGPLARGNSRFAWMTRKSEETITPWNFEEVVDKGASAQSFIERMTNFDKNLPNEKVLPKHSLLYEYFTVYNELTKVKYVTEGMRKPAFLSGEQKKAIVDLLFKTNRKVTVKQLKEDYFKKIECFDSVEISGVEDRFNASLGTYHDLLKIIKDKDFLDNEENEDILEDIVLTLTLFEDREMIEERLKTYAHLFDDKVMKQLKRRRYTGWGRLSRKLINGIRDKQSGKTILDFLKSDGFANRNFMQLIHDDSLTFKEDIQKAQVSGQGDSLHEHIANLAGSPAIKKGILQTVKVVDELVKVMGRHKPENIVIEMARENQTTQKGQKNSRERMKRIEEGIKELGSQILKEHPVENTQLQNEKLYLYYLQNGRDMYVDQELDINRLSDYDVDHIVPQSFLKDDSIDNKVLTRSDKARGKSDNVPSEEVVKKMKNYWRQLLNAKLITQRKFDNLTKAERGGLSELDKAGFIKRQLVETRQITKHVAQILDSRMNTKYDENDKLIREVKVITLKSKLVSDFRKDFQFYKVREINNYHHAHDAYLNAVVGTALIKKYPKLESEFVYGDYKVYDVRKMIAKSEQEIGKATAKYFFYSNIMNFFKTEITLANGEIRKRPLIETNGETGEIVWDKGRDFATVRKVLSMPQVNIVKKTEVQTGGFSKESILPKRNSDKLIARKKDWDPKKYGGFDSPTVAYSVLVVAKVEKGKSKKLKSVKELLGITIMERSSFEKNPIDFLEAKGYKEVKKDLIIKLPKYSLFELENGRKRMLASAGELQKGNELALPSKYVNFLYLASHYEKLKGSPEDNEQKQLFVEQHKHYLDEIIEQISEFSKRVILADANLDKVLSAYNKHRDKPIREQAENIIHLFTLTNLGAPAAFKYFDTTIDRKRYTSTKEVLDATLIHQSITGLYETRIDLSQLGGDGGGSSGSSGSSGGTLGIEDEYRLHETSTEPDVSLGSTWLSDFPQAWAETGGMGLAVRQAPLIIPLKATSTPVSIQQYPMSHEARLGIKPHIQRLLDQGILVPCQSPWNTPLLPVKKPGTNDYRPVQDLREVNKRVEDIHPTVPNPYNLLSGLPPSHQWYTVLDLKDAFFCLRLHPTSQPLFAFEWRDPGMGISGQLTWTRLPQGFKNSPTLFNEALHRDLADFRIQHPDLILLQYVDDILLAATSELDCQQGTRALLQTLGDLGYRASAKKAQICQKQVKYLGYLLREGQRWLTEARKETVMGQPVPKTPRQLREFLGTAGFCRLWIPGFAEMAAPLYPLTKPGTLFSWGPDQQKAYQEIKQALLTAPALGLPDLTKPFELFVDEKQGYAKGVLTQKLGPWRRPVAYLSKKLDPVAAGWPPCLRMVAAIAVLTKDAGKLTMGQPLVILAPHAVEALVKQPPDRWLSNARMTHYQAMLLDTDRVQFGPVVALNPATLLPLPEEGAPHDCLEILAETHGTRPDLTDQPIPDADHTWYTDGSSFLQEGQRKAGAAVTTETEVIWAGALPAGTSAQRAELIALTQALKMAEGKRLNVYTDSRYAFATAHIHGEIYRRRGWLTSEGREIKNKSEILALLKALFLPKRLSIIHCLGHQKGDSAEARGNRLADQAAREAAIKTPPDTSTLLAGKRTADGSEFEKRTADGSEFESPKKKAKVE

SEQ ID NO: 2220 - protein, 2097 aa, synthetic construct
MPAAKRVKLDGGDKKYSIGLDIGTNSVGWAVITDEYKVPSKKFKVLGNTDRHSIKKNLIGALLFDSGETAEATRLKRTARRRYTRRKNRICYLQEIFSNEMAKVDDSFFHRLEESFLVEEDKKHERHPIFGNIVDEVAYHEKYPTIYHLRKKLVDSTDKADLRLIYLALAHMIKFRGHFLIEGDLNPDNSDVDKLFIQLVQTYNQLFEENPINASGVDAKAILSARLSKSRRLENLIAQLPGEKKNGLFGNLIALSLGLTPNFKSNFDLAEDAKLQLSKDTYDDDLDNLLAQIGDQYADLFLAAKNLSDAILLSDILRVNTEITKAPLSASMIKRYDEHHQDLTLLKALVRQQLPEKYKEIFFDQSKNGYAGYIDGGASQEEFYKFIKPILEKMDGTEELLVKLNREDLLRKQRTFDNGSIPHQIHLGELHAILRRQEDFYPFLKDNREKIEKILTFRIPYYVGPLARGNSRFAWMTRKSEETITPWNFEEVVDKGASAQSFIERMTNFDKNLPNEKVLPKHSLLYEYFTVYNELTKVKYVTEGMRKPAFLSGEQKKAIVDLLFKTNRKVTVKQLKEDYFKKIECFDSVEISGVEDRFNASLGTYHDLLKIIKDKDFLDNEENEDILEDIVLTLTLFEDREMIEERLKTYAHLFDDKVMKQLKRRRYTGWGRLSRKLINGIRDKQSGKTILDFLKSDGFANRNFMQLIHDDSLTFKEDIQKAQVSGQGDSLHEHIANLAGSPAIKKGILQTVKVVDELVKVMGRHKPENIVIEMARENQTTQKGQKNSRERMKRIEEGIKELGSQILKEHPVENTQLQNEKLYLYYLQNGRDMYVDQELDINRLSDYDVDHIVPQSFLKDDSIDNKVLTRSDKARGKSDNVPSEEVVKKMKNYWRQLLNAKLITQRKFDNLTKAERGGLSELDKAGFIKRQLVETRQITKHVAQILDSRMNTKYDENDKLIREVKVITLKSKLVSDFRKDFQFYKVREINNYHHAHDAYLNAVVGTALIKKYPKLESEFVYGDYKVYDVRKMIAKSEQEIGKATAKYFFYSNIMNFFKTEITLANGEIRKRPLIETNGETGEIVWDKGRDFATVRKVLSMPQVNIVKKTEVQTGGFSKESILPKRNSDKLIARKKDWDPKKYGGFDSPTVAYSVLVVAKVEKGKSKKLKSVKELLGITIMERSSFEKNPIDFLEAKGYKEVKKDLIIKLPKYSLFELENGRKRMLASAGELQKGNELALPSKYVNFLYLASHYEKLKGSPEDNEQKQLFVEQHKHYLDEIIEQISEFSKRVILADANLDKVLSAYNKHRDKPIREQAENIIHLFTLTNLGAPAAFKYFDTTIDRKRYTSTKEVLDATLIHQSITGLYETRIDLSQLGGDGGGSAGSAAGSGEFGGTLGIEDEYRLHETSTEPDVSLGSTWLSDFPQAWAETGGMGLAVRQAPLIIPLKATSTPVSIQQYPMSHEARLGIKPHIQRLLDQGILVPCQSPWNTPLLPVKKPGTNDYRPVQDLREVNKRVEDIHPTVPNPYNLLSGLPPSHQWYTVLDLKDAFFCLRLHPTSQPLFAFEWRDPGMGISGQLTWTRLPQGFKNSPTLFNEALHRDLADFRIQHPDLILLQYVDDILLAATSELDCQQGTRALLQTLGDLGYRASAKKAQICQKQVKYLGYLLREGQRWLTEARKETVMGQPVPKTPRQLREFLGTAGFCRLWIPGFAEMAAPLYPLTKPGTLFSWGPDQQKAYQEIKQALLTAPALGLPDLTKPFELFVDEKQGYAKGVLTQKLGPWRRPVAYLSKKLDPVAAGWPPCLRMVAAIAVLTKDAGKLTMGQPLVILAPHAVEALVKQPPDRWLSNARMTHYQAMLLDTDRVQFGPVVALNPATLLPLPEEGAPHDCLEILAETHGTRPDLTDQPIPDADHTWYTDGSSFLQEGQRKAGAAVTTETEVIWAGALPAGTSAQRAELIALTQALKMAEGKRLNVYTDSRYAFATAHIHGEIYRRRGWLTSEGREIKNKSEILALLKALFLPKRLSIIHCLGHQKGDSAEARGNRLADQAAREAAIKTPPDTSTLLAGKRTADGSEFEKRTADGSEFESPKKKAKVE

SEQ ID NO: 2221 - protein, 2090 aa, synthetic construct
MPAAKRVKLDGGDKKYSIGLDIGTNSVGWAVITDEYKVPSKKFKVLGNTDRHSIKKNLIGALLFDSGETAEATRLKRTARRRYTRRKNRICYLQEIFSNEMAKVDDSFFHRLEESFLVEEDKKHERHPIFGNIVDEVAYHEKYPTIYHLRKKLVDSTDKADLRLIYLALAHMIKFRGHFLIEGDLNPDNSDVDKLFIQLVQTYNQLFEENPINASGVDAKAILSARLSKSRRLENLIAQLPGEKKNGLFGNLIALSLGLTPNFKSNFDLAEDAKLQLSKDTYDDDLDNLLAQIGDQYADLFLAAKNLSDAILLSDILRVNTEITKAPLSASMIKRYDEHHQDLTLLKALVRQQLPEKYKEIFFDQSKNGYAGYIDGGASQEEFYKFIKPILEKMDGTEELLVKLNREDLLRKQRTFDNGSIPHQIHLGELHAILRRQEDFYPFLKDNREKIEKILTFRIPYYVGPLARGNSRFAWMTRKSEETITPWNFEEVVDKGASAQSFIERMTNFDKNLPNEKVLPKHSLLYEYFTVYNELTKVKYVTEGMRKPAFLSGEQKKAIVDLLFKTNRKVTVKQLKEDYFKKIECFDSVEISGVEDRFNASLGTYHDLLKIIKDKDFLDNEENEDILEDIVLTLTLFEDREMIEERLKTYAHLFDDKVMKQLKRRRYTGWGRLSRKLINGIRDKQSGKTILDFLKSDGFANRNFMQLIHDDSLTFKEDIQKAQVSGQGDSLHEHIANLAGSPAIKKGILQTVKVVDELVKVMGRHKPENIVIEMARENQTTQKGQKNSRERMKRIEEGIKELGSQILKEHPVENTQLQNEKLYLYYLQNGRDMYVDQELDINRLSDYDVDHIVPQSFLKDDSIDNKVLTRSDKARGKSDNVPSEEVVKKMKNYWRQLLNAKLITQRKFDNLTKAERGGLSELDKAGFIKRQLVETRQITKHVAQILDSRMNTKYDENDKLIREVKVITLKSKLVSDFRKDFQFYKVREINNYHHAHDAYLNAVVGTALIKKYPKLESEFVYGDYKVYDVRKMIAKSEQEIGKATAKYFFYSNIMNFFKTEITLANGEIRKRPLIETNGETGEIVWDKGRDFATVRKVLSMPQVNIVKKTEVQTGGFSKESILPKRNSDKLIARKKDWDPKKYGGFDSPTVAYSVLVVAKVEKGKSKKLKSVKELLGITIMERSSFEKNPIDFLEAKGYKEVKKDLIIKLPKYSLFELENGRKRMLASAGELQKGNELALPSKYVNFLYLASHYEKLKGSPEDNEQKQLFVEQHKHYLDEIIEQISEFSKRVILADANLDKVLSAYNKHRDKPIREQAENIIHLFTLTNLGAPAAFKYFDTTIDRKRYTSTKEVLDATLIHQSITGLYETRIDLSQLGGDGGGGGGGGGTLGIEDEYRLHETSTEPDVSLGSTWLSDFPQAWAETGGMGLAVRQAPLIIPLKATSTPVSIQQYPMSHEARLGIKPHIQRLLDQGILVPCQSPWNTPLLPVKKPGTNDYRPVQDLREVNKRVEDIHPTVPNPYNLLSGLPPSHQWYTVLDLKDAFFCLRLHPTSQPLFAFEWRDPGMGISGQLTWTRLPQGFKNSPTLFNEALHRDLADFRIQHPDLILLQYVDDILLAATSELDCQQGTRALLQTLGDLGYRASAKKAQICQKQVKYLGYLLREGQRWLTEARKETVMGQPVPKTPRQLREFLGTAGFCRLWIPGFAEMAAPLYPLTKPGTLFSWGPDQQKAYQEIKQALLTAPALGLPDLTKPFELFVDEKQGYAKGVLTQKLGPWRRPVAYLSKKLDPVAAGWPPCLRMVAAIAVLTKDAGKLTMGQPLVILAPHAVEALVKQPPDRWLSNARMTHYQAMLLDTDRVQFGPVVALNPATLLPLPEEGAPHDCLEILAETHGTRPDLTDQPIPDADHTWYTDGSSFLQEGQRKAGAAVTTETEVIWAGALPAGTSAQRAELIALTQALKMAEGKRLNVYTDSRYAFATAHIHGEIYRRRGWLTSEGREIKNKSEILALLKALFLPKRLSIIHCLGHQKGDSAEARGNRLADQAAREAAIKTPPDTSTLLAGKRTADGSEFEKRTADGSEFESPKKKAKVE

SEQ ID NO: 2222 - protein, 2094 aa, synthetic construct
MPAAKRVKLDGGDKKYSIGLDIGTNSVGWAVITDEYKVPSKKFKVLGNTDRHSIKKNLIGALLFDSGETAEATRLKRTARRRYTRRKNRICYLQEIFSNEMAKVDDSFFHRLEESFLVEEDKKHERHPIFGNIVDEVAYHEKYPTIYHLRKKLVDSTDKADLRLIYLALAHMIKFRGHFLIEGDLNPDNSDVDKLFIQLVQTYNQLFEENPINASGVDAKAILSARLSKSRRLENLIAQLPGEKKNGLFGNLIALSLGLTPNFKSNFDLAEDAKLQLSKDTYDDDLDNLLAQIGDQYADLFLAAKNLSDAILLSDILRVNTEITKAPLSASMIKRYDEHHQDLTLLKALVRQQLPEKYKEIFFDQSKNGYAGYIDGGASQEEFYKFIKPILEKMDGTEELLVKLNREDLLRKQRTFDNGSIPHQIHLGELHAILRRQEDFYPFLKDNREKIEKILTFRIPYYVGPLARGNSRFAWMTRKSEETITPWNFEEVVDKGASAQSFIERMTNFDKNLPNEKVLPKHSLLYEYFTVYNELTKVKYVTEGMRKPAFLSGEQKKAIVDLLFKTNRKVTVKQLKEDYFKKIECFDSVEISGVEDRFNASLGTYHDLLKIIKDKDFLDNEENEDILEDIVLTLTLFEDREMIEERLKTYAHLFDDKVMKQLKRRRYTGWGRLSRKLINGIRDKQSGKTILDFLKSDGFANRNFMQLIHDDSLTFKEDIQKAQVSGQGDSLHEHIANLAGSPAIKKGILQTVKVVDELVKVMGRHKPENIVIEMARENQTTQKGQKNSRERMKRIEEGIKELGSQILKEHPVENTQLQNEKLYLYYLQNGRDMYVDQELDINRLSDYDVDHIVPQSFLKDDSIDNKVLTRSDKARGKSDNVPSEEVVKKMKNYWRQLLNAKLITQRKFDNLTKAERGGLSELDKAGFIKRQLVETRQITKHVAQILDSRMNTKYDENDKLIREVKVITLKSKLVSDFRKDFQFYKVREINNYHHAHDAYLNAVVGTALIKKYPKLESEFVYGDYKVYDVRKMIAKSEQEIGKATAKYFFYSNIMNFFKTEITLANGEIRKRPLIETNGETGEIVWDKGRDFATVRKVLSMPQVNIVKKTEVQTGGFSKESILPKRNSDKLIARKKDWDPKKYGGFDSPTVAYSVLVVAKVEKGKSKKLKSVKELLGITIMERSSFEKNPIDFLEAKGYKEVKKDLIIKLPKYSLFELENGRKRMLASAGELQKGNELALPSKYVNFLYLASHYEKLKGSPEDNEQKQLFVEQHKHYLDEIIEQISEFSKRVILADANLDKVLSAYNKHRDKPIREQAENIIHLFTLTNLGAPAAFKYFDTTIDRKRYTSTKEVLDATLIHQSITGLYETRIDLSQLGGDGGGSSGGSPAPGGTLGIEDEYRLHETSTEPDVSLGSTWLSDFPQAWAETGGMGLAVRQAPLIIPLKATSTPVSIQQYPMSHEARLGIKPHIQRLLDQGILVPCQSPWNTPLLPVKKPGTNDYRPVQDLREVNKRVEDIHPTVPNPYNLLSGLPPSHQWYTVLDLKDAFFCLRLHPTSQPLFAFEWRDPGMGISGQLTWTRLPQGFKNSPTLFNEALHRDLADFRIQHPDLILLQYVDDILLAATSELDCQQGTRALLQTLGDLGYRASAKKAQICQKQVKYLGYLLREGQRWLTEARKETVMGQPVPKTPRQLREFLGTAGFCRLWIPGFAEMAAPLYPLTKPGTLFSWGPDQQKAYQEIKQALLTAPALGLPDLTKPFELFVDEKQGYAKGVLTQKLGPWRRPVAYLSKKLDPVAAGWPPCLRMVAAIAVLTKDAGKLTMGQPLVILAPHAVEALVKQPPDRWLSNARMTHYQAMLLDTDRVQFGPVVALNPATLLPLPEEGAPHDCLEILAETHGTRPDLTDQPIPDADHTWYTDGSSFLQEGQRKAGAAVTTETEVIWAGALPAGTSAQRAELIALTQALKMAEGKRLNVYTDSRYAFATAHIHGEIYRRRGWLTSEGREIKNKSEILALLKALFLPKRLSIIHCLGHQKGDSAEARGNRLADQAAREAAIKTPPDTSTLLAGKRTADGSEFEKRTADGSEFESPKKKAKVE

SEQ ID NO: 2223 - protein, 2096 aa, synthetic construct
MPAAKRVKLDGGDKKYSIGLDIGTNSVGWAVITDEYKVPSKKFKVLGNTDRHSIKKNLIGALLFDSGETAEATRLKRTARRRYTRRKNRICYLQEIFSNEMAKVDDSFFHRLEESFLVEEDKKHERHPIFGNIVDEVAYHEKYPTIYHLRKKLVDSTDKADLRLIYLALAHMIKFRGHFLIEGDLNPDNSDVDKLFIQLVQTYNQLFEENPINASGVDAKAILSARLSKSRRLENLIAQLPGEKKNGLFGNLIALSLGLTPNFKSNFDLAEDAKLQLSKDTYDDDLDNLLAQIGDQYADLFLAAKNLSDAILLSDILRVNTEITKAPLSASMIKRYDEHHQDLTLLKALVRQQLPEKYKEIFFDQSKNGYAGYIDGGASQEEFYKFIKPILEKMDGTEELLVKLNREDLLRKQRTFDNGSIPHQIHLGELHAILRRQEDFYPFLKDNREKIEKILTFRIPYYVGPLARGNSRFAWMTRKSEETITPWNFEEVVDKGASAQSFIERMTNFDKNLPNEKVLPKHSLLYEYFTVYNELTKVKYVTEGMRKPAFLSGEQKKAIVDLLFKTNRKVTVKQLKEDYFKKIECFDSVEISGVEDRFNASLGTYHDLLKIIKDKDFLDNEENEDILEDIVLTLTLFEDREMIEERLKTYAHLFDDKVMKQLKRRRYTGWGRLSRKLINGIRDKQSGKTILDFLKSDGFANRNFMQLIHDDSLTFKEDIQKAQVSGQGDSLHEHIANLAGSPAIKKGILQTVKVVDELVKVMGRHKPENIVIEMARENQTTQKGQKNSRERMKRIEEGIKELGSQILKEHPVENTQLQNEKLYLYYLQNGRDMYVDQELDINRLSDYDVDHIVPQSFLKDDSIDNKVLTRSDKARGKSDNVPSEEVVKKMKNYWRQLLNAKLITQRKFDNLTKAERGGLSELDKAGFIKRQLVETRQITKHVAQILDSRMNTKYDENDKLIREVKVITLKSKLVSDFRKDFQFYKVREINNYHHAHDAYLNAVVGTALIKKYPKLESEFVYGDYKVYDVRKMIAKSEQEIGKATAKYFFYSNIMNFFKTEITLANGEIRKRPLIETNGETGEIVWDKGRDFATVRKVLSMPQVNIVKKTEVQTGGFSKESILPKRNSDKLIARKKDWDPKKYGGFDSPTVAYSVLVVAKVEKGKSKKLKSVKELLGITIMERSSFEKNPIDFLEAKGYKEVKKDLIIKLPKYSLFELENGRKRMLASAGELQKGNELALPSKYVNFLYLASHYEKLKGSPEDNEQKQLFVEQHKHYLDEIIEQISEFSKRVILADANLDKVLSAYNKHRDKPIREQAENIIHLFTLTNLGAPAAFKYFDTTIDRKRYTSTKEVLDATLIHQSITGLYETRIDLSQLGGDGGEAAAKPAPGGGGGTLNIEDEYRLHETSKEPDVSLGSTWLSDFPQAWAETGGMGLAVRQAPLIIPLKATSTPVSIKQYPMSQEARLGIKPHIQRLLDQGILVPCQSPWNTPLLPVKKPGTNDYRPVQDLREVNKRVEDIHPTVPNPYNLLSGLPPSHQWYTVLDLKDAFFCLRLHPTSQPLFAFEWRDPEMGISGQLTWTRLPQGFKNSPTLFDEALHRDLAGFRIQHPDLILLQYVDDLLLAATSELDCQQGTRALLQTLGDLGYRASAKKAQICQKQVKYLGYLLKEGQRWLTEARKETVMGQPIPKTPRQLREFLGTAGFCRLWIPGFAEMAAPLYPLTKTGTLFNWGPDQQKAFQEIKQALLTAPALGLPDLTKPFELFVDEKQGYAKGVLTQKLGPWRRPVAYLSKKLDPVAAGWPPCLRMVAAIAVLTKDAGKLTMGQPLVILAPHAVEALVKQPPDRWLSNARMTHYQALLLDTDRVQFGPVVALNPATLLPLPEEGLQHDCLDILAEAHGTRSDLMDQPLPDADHTWYTDGSSFLQEGQRKAGAAVTTETEVIWARALPAGTSAQRAELIALTQALKMAEGKKLNVYTDSRYAFATAHIHGEIYRRRGLLTSEGKEIKNKDEILALLKALFLPKRLSIIHCPGHQKGNSAEARGNRMADQAAREVATRETPETSTLLAGKRTADGSEFEKRTADGSEFESPKKKAKVE

SEQ ID NO: 2224 - protein, 2115 aa, synthetic construct
MPAAKRVKLDGGDKKYSIGLDIGTNSVGWAVITDEYKVPSKKFKVLGNTDRHSIKKNLIGALLFDSGETAEATRLKRTARRRYTRRKNRICYLQEIFSNEMAKVDDSFFHRLEESFLVEEDKKHERHPIFGNIVDEVAYHEKYPTIYHLRKKLVDSTDKADLRLIYLALAHMIKFRGHFLIEGDLNPDNSDVDKLFIQLVQTYNQLFEENPINASGVDAKAILSARLSKSRRLENLIAQLPGEKKNGLFGNLIALSLGLTPNFKSNFDLAEDAKLQLSKDTYDDDLDNLLAQIGDQYADLFLAAKNLSDAILLSDILRVNTEITKAPLSASMIKRYDEHHQDLTLLKALVRQQLPEKYKEIFFDQSKNGYAGYIDGGASQEEFYKFIKPILEKMDGTEELLVKLNREDLLRKQRTFDNGSIPHQIHLGELHAILRRQEDFYPFLKDNREKIEKILTFRIPYYVGPLARGNSRFAWMTRKSEETITPWNFEEVVDKGASAQSFIERMTNFDKNLPNEKVLPKHSLLYEYFTVYNELTKVKYVTEGMRKPAFLSGEQKKAIVDLLFKTNRKVTVKQLKEDYFKKIECFDSVEISGVEDRFNASLGTYHDLLKIIKDKDFLDNEENEDILEDIVLTLTLFEDREMIEERLKTYAHLFDDKVMKQLKRRRYTGWGRLSRKLINGIRDKQSGKTILDFLKSDGFANRNFMQLIHDDSLTFKEDIQKAQVSGQGDSLHEHIANLAGSPAIKKGILQTVKVVDELVKVMGRHKPENIVIEMARENQTTQKGQKNSRERMKRIEEGIKELGSQILKEHPVENTQLQNEKLYLYYLQNGRDMYVDQELDINRLSDYDVDHIVPQSFLKDDSIDNKVLTRSDKARGKSDNVPSEEVVKKMKNYWRQLLNAKLITQRKFDNLTKAERGGLSELDKAGFIKRQLVETRQITKHVAQILDSRMNTKYDENDKLIREVKVITLKSKLVSDFRKDFQFYKVREINNYHHAHDAYLNAVVGTALIKKYPKLESEFVYGDYKVYDVRKMIAKSEQEIGKATAKYFFYSNIMNFFKTEITLANGEIRKRPLIETNGETGEIVWDKGRDFATVRKVLSMPQVNIVKKTEVQTGGFSKESILPKRNSDKLIARKKDWDPKKYGGFDSPTVAYSVLVVAKVEKGKSKKLKSVKELLGITIMERSSFEKNPIDFLEAKGYKEVKKDLIIKLPKYSLFELENGRKRMLASAGELQKGNELALPSKYVNFLYLASHYEKLKGSPEDNEQKQLFVEQHKHYLDEIIEQISEFSKRVILADANLDKVLSAYNKHRDKPIREQAENIIHLFTLTNLGAPAAFKYFDTTIDRKRYTSTKEVLDATLIHQSITGLYETRIDLSQLGGDGGGGGGSGGGGSGGGGSGGGGSGGGGSGGGGSGGTLNIEDEYRLHETSKEPDVSLGSTWLSDFPQAWAETGGMGLAVRQAPLIIPLKATSTPVSIKQYPMSQEARLGIKPHIQRLLDQGILVPCQSPWNTPLLPVKKPGTNDYRPVQDLREVNKRVEDIHPTVPNPYNLLSGLPPSHQWYTVLDLKDAFFCLRLHPTSQPLFAFEWRDPEMGISGQLTWTRLPQGFKNSPTLFNEALHRDLAGFRIQHPDLILLQYVDDLLLAATSELDCQQGTRALLQTLGDLGYRASAKKAQICQKQVKYLGYLLKEGQRWLTEARKETVMGQPIPKTPRQLREFLGTAGFCRLWIPGFAEMAAPLYPLTKPGTLFNWGPDQQKAFQEIKQALLTAPALGLPDLTKPFELFVDEKQGYAKGVLTQKLGPWRRPVAYLSKKLDPVAAGWPPCLRMVAAIAVLTKDAGKLTMGQPLVILAPHAVEALVKQPPDRWLSNARMTHYQALLLDTDRVQFGPVVALNPATLLPLPEEGLQHDCLDILAEAHGTRSDLMDQPLPDADHTWYTDGSSFLQEGQRKAGAAVTTETEVIWARALPAGTSAQRAELIALTQALKMAEGKKLNVYTDSRYAFATAHIHGEIYRRRGWLTSEGKEIKNKDEILALLKALFLPKRLSIIHCPGHQKGNSAEARGNRMADQAAREVATRETPETSTLLAGKRTADGSEFEKRTADGSEFESPKKKAKVE

SEQ ID NO: 2225 - protein, 2096 aa, synthetic construct
MPAAKRVKLDGGDKKYSIGLDIGTNSVGWAVITDEYKVPSKKFKVLGNTDRHSIKKNLIGALLFDSGETAEATRLKRTARRRYTRRKNRICYLQEIFSNEMAKVDDSFFHRLEESFLVEEDKKHERHPIFGNIVDEVAYHEKYPTIYHLRKKLVDSTDKADLRLIYLALAHMIKFRGHFLIEGDLNPDNSDVDKLFIQLVQTYNQLFEENPINASGVDAKAILSARLSKSRRLENLIAQLPGEKKNGLFGNLIALSLGLTPNFKSNFDLAEDAKLQLSKDTYDDDLDNLLAQIGDQYADLFLAAKNLSDAILLSDILRVNTEITKAPLSASMIKRYDEHHQDLTLLKALVRQQLPEKYKEIFFDQSKNGYAGYIDGGASQEEFYKFIKPILEKMDGTEELLVKLNREDLLRKQRTFDNGSIPHQIHLGELHAILRRQEDFYPFLKDNREKIEKILTFRIPYYVGPLARGNSRFAWMTRKSEETITPWNFEEVVDKGASAQSFIERMTNFDKNLPNEKVLPKHSLLYEYFTVYNELTKVKYVTEGMRKPAFLSGEQKKAIVDLLFKTNRKVTVKQLKEDYFKKIECFDSVEISGVEDRFNASLGTYHDLLKIIKDKDFLDNEENEDILEDIVLTLTLFEDREMIEERLKTYAHLFDDKVMKQLKRRRYTGWGRLSRKLINGIRDKQSGKTILDFLKSDGFANRNFMQLIHDDSLTFKEDIQKAQVSGQGDSLHEHIANLAGSPAIKKGILQTVKVVDELVKVMGRHKPENIVIEMARENQTTQKGQKNSRERMKRIEEGIKELGSQILKEHPVENTQLQNEKLYLYYLQNGRDMYVDQELDINRLSDYDVDHIVPQSFLKDDSIDNKVLTRSDKARGKSDNVPSEEVVKKMKNYWRQLLNAKLITQRKFDNLTKAERGGLSELDKAGFIKRQLVETRQITKHVAQILDSRMNTKYDENDKLIREVKVITLKSKLVSDFRKDFQFYKVREINNYHHAHDAYLNAVVGTALIKKYPKLESEFVYGDYKVYDVRKMIAKSEQEIGKATAKYFFYSNIMNFFKTEITLANGEIRKRPLIETNGETGEIVWDKGRDFATVRKVLSMPQVNIVKKTEVQTGGFSKESILPKRNSDKLIARKKDWDPKKYGGFDSPTVAYSVLVVAKVEKGKSKKLKSVKELLGITIMERSSFEKNPIDFLEAKGYKEVKKDLIIKLPKYSLFELENGRKRMLASAGELQKGNELALPSKYVNFLYLASHYEKLKGSPEDNEQKQLFVEQHKHYLDEIIEQISEFSKRVILADANLDKVLSAYNKHRDKPIREQAENIIHLFTLTNLGAPAAFKYFDTTIDRKRYTSTKEVLDATLIHQSITGLYETRIDLSQLGGDGGPAPGSSEAAAKGGTLNIEDEYRLHETSKEPDVSLGSTWLSDFPQAWAETGGMGLAVRQAPLIIPLKATSTPVSIKQYPMSQEARLGIKPHIQRLLDQGILVPCQSPWNTPLLPVKKPGTNDYRPVQDLREVNKRVEDIHPTVPNPYNLLSGLPPSHQWYTVLDLKDAFFCLRLHPTSQPLFAFEWRDPEMGISGQLTWTRLPQGFKNSPTLFNEALHRDLAGFRIQHPDLILLQYVDDLLLAATSELDCQQGTRALLQTLGDLGYRASAKKAQICQKQVKYLGYLLKEGQRWLTEARKETVMGQPIPKTPRQLREFLGTAGFCRLWIPGFAEMAAPLYPLTKPGTLFNWGPDQQKAFQEIKQALLTAPALGLPDLTKPFELFVDEKQGYAKGVLTQKLGPWRRPVAYLSKKLDPVAAGWPPCLRMVAAIAVLTKDAGKLTMGQPLVILAPHAVEALVKQPPDRWLSNARMTHYQALLLDTDRVQFGPVVALNPATLLPLPEEGLQHDCLDILAEAHGTRSDLMDQPLPDADHTWYTDGSSFLQEGQRKAGAAVTTETEVIWARALPAGTSAQRAELIALTQALKMAEGKKLNVYTDSRYAFATAHIHGEIYRRRGWLTSEGKEIKNKDEILALLKALFLPKRLSIIHCPGHQKGNSAEARGNRMADQAAREVATRETPETSTLLAGKRTADGSEFEKRTADGSEFESPKKKAKVE

SEQ ID NO: 2226 - protein, 2100 aa, synthetic construct
MPAAKRVKLDGGDKKYSIGLDIGTNSVGWAVITDEYKVPSKKFKVLGNTDRHSIKKNLIGALLFDSGETAEATRLKRTARRRYTRRKNRICYLQEIFSNEMAKVDDSFFHRLEESFLVEEDKKHERHPIFGNIVDEVAYHEKYPTIYHLRKKLVDSTDKADLRLIYLALAHMIKFRGHFLIEGDLNPDNSDVDKLFIQLVQTYNQLFEENPINASGVDAKAILSARLSKSRRLENLIAQLPGEKKNGLFGNLIALSLGLTPNFKSNFDLAEDAKLQLSKDTYDDDLDNLLAQIGDQYADLFLAAKNLSDAILLSDILRVNTEITKAPLSASMIKRYDEHHQDLTLLKALVRQQLPEKYKEIFFDQSKNGYAGYIDGGASQEEFYKFIKPILEKMDGTEELLVKLNREDLLRKQRTFDNGSIPHQIHLGELHAILRRQEDFYPFLKDNREKIEKILTFRIPYYVGPLARGNSRFAWMTRKSEETITPWNFEEVVDKGASAQSFIERMTNFDKNLPNEKVLPKHSLLYEYFTVYNELTKVKYVTEGMRKPAFLSGEQKKAIVDLLFKTNRKVTVKQLKEDYFKKIECFDSVEISGVEDRFNASLGTYHDLLKIIKDKDFLDNEENEDILEDIVLTLTLFEDREMIEERLKTYAHLFDDKVMKQLKRRRYTGWGRLSRKLINGIRDKQSGKTILDFLKSDGFANRNFMQLIHDDSLTFKEDIQKAQVSGQGDSLHEHIANLAGSPAIKKGILQTVKVVDELVKVMGRHKPENIVIEMARENQTTQKGQKNSRERMKRIEEGIKELGSQILKEHPVENTQLQNEKLYLYYLQNGRDMYVDQELDINRLSDYDVDHIVPQSFLKDDSIDNKVLTRSDKARGKSDNVPSEEVVKKMKNYWRQLLNAKLITQRKFDNLTKAERGGLSELDKAGFIKRQLVETRQITKHVAQILDSRMNTKYDENDKLIREVKVITLKSKLVSDFRKDFQFYKVREINNYHHAHDAYLNAVVGTALIKKYPKLESEFVYGDYKVYDVRKMIAKSEQEIGKATAKYFFYSNIMNFFKTEITLANGEIRKRPLIETNGETGEIVWDKGRDFATVRKVLSMPQVNIVKKTEVQTGGFSKESILPKRNSDKLIARKKDWDPKKYGGFDSPTVAYSVLVVAKVEKGKSKKLKSVKELLGITIMERSSFEKNPIDFLEAKGYKEVKKDLIIKLPKYSLFELENGRKRMLASAGELQKGNELALPSKYVNFLYLASHYEKLKGSPEDNEQKQLFVEQHKHYLDEIIEQISEFSKRVILADANLDKVLSAYNKHRDKPIREQAENIIHLFTLTNLGAPAAFKYFDTTIDRKRYTSTKEVLDATLIHQSITGLYETRIDLSQLGGDGGEAAAKGGGGSEAAAKGGTLNIEDEYRLHETSKEPDVSLGSTWLSDFPQAWAETGGMGLAVRQAPLIIPLKATSTPVSIKQYPMSQEARLGIKPHIQRLLDQGILVPCQSPWNTPLLPVKKPGTNDYRPVQDLREVNKRVEDIHPTVPNPYNLLSGLPPSHQWYTVLDLKDAFFCLRLHPTSQPLFAFEWRDPEMGISGQLTWTRLPQGFKNSPTLFNEALHRDLAGFRIQHPDLILLQYVDDLLLAATSELDCQQGTRALLQTLGDLGYRASAKKAQICQKQVKYLGYLLKEGQRWLTEARKETVMGQPIPKTPRQLREFLGTAGFCRLWIPGFAEMAAPLYPLTKPGTLFNWGPDQQKAFQEIKQALLTAPALGLPDLTKPFELFVDEKQGYAKGVLTQKLGPWRRPVAYLSKKLDPVAAGWPPCLRMVAAIAVLTKDAGKLTMGQPLVILAPHAVEALVKQPPDRWLSNARMTHYQALLLDTDRVQFGPVVALNPATLLPLPEEGLQHDCLDILAEAHGTRSDLMDQPLPDADHTWYTDGSSFLQEGQRKAGAAVTTETEVIWARALPAGTSAQRAELIALTQALKMAEGKKLNVYTDSRYAFATAHIHGEIYRRRGWLTSEGKEIKNKDEILALLKALFLPKRLSIIHCPGHQKGNSAEARGNRMADQAAREVATRETPETSTLLAGKRTADGSEFEKRTADGSEFESPKKKAKVE

SEQ ID NO: 2227 - protein, 2091 aa, synthetic construct
MPAAKRVKLDGGDKKYSIGLDIGTNSVGWAVITDEYKVPSKKFKVLGNTDRHSIKKNLIGALLFDSGETAEATRLKRTARRRYTRRKNRICYLQEIFSNEMAKVDDSFFHRLEESFLVEEDKKHERHPIFGNIVDEVAYHEKYPTIYHLRKKLVDSTDKADLRLIYLALAHMIKFRGHFLIEGDLNPDNSDVDKLFIQLVQTYNQLFEENPINASGVDAKAILSARLSKSRRLENLIAQLPGEKKNGLFGNLIALSLGLTPNFKSNFDLAEDAKLQLSKDTYDDDLDNLLAQIGDQYADLFLAAKNLSDAILLSDILRVNTEITKAPLSASMIKRYDEHHQDLTLLKALVRQQLPEKYKEIFFDQSKNGYAGYIDGGASQEEFYKFIKPILEKMDGTEELLVKLNREDLLRKQRTFDNGSIPHQIHLGELHAILRRQEDFYPFLKDNREKIEKILTFRIPYYVGPLARGNSRFAWMTRKSEETITPWNFEEVVDKGASAQSFIERMTNFDKNLPNEKVLPKHSLLYEYFTVYNELTKVKYVTEGMRKPAFLSGEQKKAIVDLLFKTNRKVTVKQLKEDYFKKIECFDSVEISGVEDRFNASLGTYHDLLKIIKDKDFLDNEENEDILEDIVLTLTLFEDREMIEERLKTYAHLFDDKVMKQLKRRRYTGWGRLSRKLINGIRDKQSGKTILDFLKSDGFANRNFMQLIHDDSLTFKEDIQKAQVSGQGDSLHEHIANLAGSPAIKKGILQTVKVVDELVKVMGRHKPENIVIEMARENQTTQKGQKNSRERMKRIEEGIKELGSQILKEHPVENTQLQNEKLYLYYLQNGRDMYVDQELDINRLSDYDVDHIVPQSFLKDDSIDNKVLTRSDKARGKSDNVPSEEVVKKMKNYWRQLLNAKLITQRKFDNLTKAERGGLSELDKAGFIKRQLVETRQITKHVAQILDSRMNTKYDENDKLIREVKVITLKSKLVSDFRKDFQFYKVREINNYHHAHDAYLNAVVGTALIKKYPKLESEFVYGDYKVYDVRKMIAKSEQEIGKATAKYFFYSNIMNFFKTEITLANGEIRKRPLIETNGETGEIVWDKGRDFATVRKVLSMPQVNIVKKTEVQTGGFSKESILPKRNSDKLIARKKDWDPKKYGGFDSPTVAYSVLVVAKVEKGKSKKLKSVKELLGITIMERSSFEKNPIDFLEAKGYKEVKKDLIIKLPKYSLFELENGRKRMLASAGELQKGNELALPSKYVNFLYLASHYEKLKGSPEDNEQKQLFVEQHKHYLDEIIEQISEFSKRVILADANLDKVLSAYNKHRDKPIREQAENIIHLFTLTNLGAPAAFKYFDTTIDRKRYTSTKEVLDATLIHQSITGLYETRIDLSQLGGDGGGSSGSSGGTLNIEDEYRLHETSKEPDVSLGSTWLSDFPQAWAETGGMGLAVRQAPLIIPLKATSTPVSIKQYPMSQEARLGIKPHIQRLLDQGILVPCQSPWNTPLLPVKKPGTNDYRPVQDLREVNKRVEDIHPTVPNPYNLLSGLPPSHQWYTVLDLKDAFFCLRLHPTSQPLFAFEWRDPEMGISGQLTWTRLPQGFKNSPTLFNEALHRDLAGFRIQHPDLILLQYVDDLLLAATSELDCQQGTRALLQTLGDLGYRASAKKAQICQKQVKYLGYLLKEGQRWLTEARKETVMGQPIPKTPRQLREFLGTAGFCRLWIPGFAEMAAPLYPLTKPGTLFNWGPDQQKAFQEIKQALLTAPALGLPDLTKPFELFVDEKQGYAKGVLTQKLGPWRRPVAYLSKKLDPVAAGWPPCLRMVAAIAVLTKDAGKLTMGQPLVILAPHAVEALVKQPPDRWLSNARMTHYQALLLDTDRVQFGPVVALNPATLLPLPEEGLQHDCLDILAEAHGTRSDLMDQPLPDADHTWYTDGSSFLQEGQRKAGAAVTTETEVIWARALPAGTSAQRAELIALTQALKMAEGKKLNVYTDSRYAFATAHIHGEIYRRRGWLTSEGKEIKNKDEILALLKALFLPKRLSIIHCPGHQKGNSAEARGNRMADQAAREVATRETPETSTLLAGKRTADGSEFEKRTADGSEFESPKKKAKVE

SEQ ID NO: 2228 - protein, 2097 aa, synthetic construct
MPAAKRVKLDGGDKKYSIGLDIGTNSVGWAVITDEYKVPSKKFKVLGNTDRHSIKKNLIGALLFDSGETAEATRLKRTARRRYTRRKNRICYLQEIFSNEMAKVDDSFFHRLEESFLVEEDKKHERHPIFGNIVDEVAYHEKYPTIYHLRKKLVDSTDKADLRLIYLALAHMIKFRGHFLIEGDLNPDNSDVDKLFIQLVQTYNQLFEENPINASGVDAKAILSARLSKSRRLENLIAQLPGEKKNGLFGNLIALSLGLTPNFKSNFDLAEDAKLQLSKDTYDDDLDNLLAQIGDQYADLFLAAKNLSDAILLSDILRVNTEITKAPLSASMIKRYDEHHQDLTLLKALVRQQLPEKYKEIFFDQSKNGYAGYIDGGASQEEFYKFIKPILEKMDGTEELLVKLNREDLLRKQRTFDNGSIPHQIHLGELHAILRRQEDFYPFLKDNREKIEKILTFRIPYYVGPLARGNSRFAWMTRKSEETITPWNFEEVVDKGASAQSFIERMTNFDKNLPNEKVLPKHSLLYEYFTVYNELTKVKYVTEGMRKPAFLSGEQKKAIVDLLFKTNRKVTVKQLKEDYFKKIECFDSVEISGVEDRFNASLGTYHDLLKIIKDKDFLDNEENEDILEDIVLTLTLFEDREMIEERLKTYAHLFDDKVMKQLKRRRYTGWGRLSRKLINGIRDKQSGKTILDFLKSDGFANRNFMQLIHDDSLTFKEDIQKAQVSGQGDSLHEHIANLAGSPAIKKGILQTVKVVDELVKVMGRHKPENIVIEMARENQTTQKGQKNSRERMKRIEEGIKELGSQILKEHPVENTQLQNEKLYLYYLQNGRDMYVDQELDINRLSDYDVDHIVPQSFLKDDSIDNKVLTRSDKARGKSDNVPSEEVVKKMKNYWRQLLNAKLITQRKFDNLTKAERGGLSELDKAGFIKRQLVETRQITKHVAQILDSRMNTKYDENDKLIREVKVITLKSKLVSDFRKDFQFYKVREINNYHHAHDAYLNAVVGTALIKKYPKLESEFVYGDYKVYDVRKMIAKSEQEIGKATAKYFFYSNIMNFFKTEITLANGEIRKRPLIETNGETGEIVWDKGRDFATVRKVLSMPQVNIVKKTEVQTGGFSKESILPKRNSDKLIARKKDWDPKKYGGFDSPTVAYSVLVVAKVEKGKSKKLKSVKELLGITIMERSSFEKNPIDFLEAKGYKEVKKDLIIKLPKYSLFELENGRKRMLASAGELQKGNELALPSKYVNFLYLASHYEKLKGSPEDNEQKQLFVEQHKHYLDEIIEQISEFSKRVILADANLDKVLSAYNKHRDKPIREQAENIIHLFTLTNLGAPAAFKYFDTTIDRKRYTSTKEVLDATLIHQSITGLYETRIDLSQLGGDGGGSAGSAAGSGEFGGTLNIEDEYRLHETSKEPDVSLGSTWLSDFPQAWAETGGMGLAVRQAPLIIPLKATSTPVSIKQYPMSQEARLGIKPHIQRLLDQGILVPCQSPWNTPLLPVKKPGTNDYRPVQDLREVNKRVEDIHPTVPNPYNLLSGLPPSHQWYTVLDLKDAFFCLRLHPTSQPLFAFEWRDPEMGISGQLTWTRLPQGFKNSPTLFNEALHRDLAGFRIQHPDLILLQYVDDLLLAATSELDCQQGTRALLQTLGDLGYRASAKKAQICQKQVKYLGYLLKEGQRWLTEARKETVMGQPIPKTPRQLREFLGTAGFCRLWIPGFAEMAAPLYPLTKPGTLFNWGPDQQKAFQEIKQALLTAPALGLPDLTKPFELFVDEKQGYAKGVLTQKLGPWRRPVAYLSKKLDPVAAGWPPCLRMVAAIAVLTKDAGKLTMGQPLVILAPHAVEALVKQPPDRWLSNARMTHYQALLLDTDRVQFGPVVALNPATLLPLPEEGLQHDCLDILAEAHGTRSDLMDQPLPDADHTWYTDGSSFLQEGQRKAGAAVTTETEVIWARALPAGTSAQRAELIALTQALKMAEGKKLNVYTDSRYAFATAHIHGEIYRRRGWLTSEGKEIKNKDEILALLKALFLPKRLSIIHCPGHQKGNSAEARGNRMADQAAREVATRETPETSTLLAGKRTADGSEFEKRTADGSEFESPKKKAKVE

SEQ ID NO: 2229 - protein, 2088 aa, synthetic construct
MPAAKRVKLDGGDKKYSIGLDIGTNSVGWAVITDEYKVPSKKFKVLGNTDRHSIKKNLIGALLFDSGETAEATRLKRTARRRYTRRKNRICYLQEIFSNEMAKVDDSFFHRLEESFLVEEDKKHERHPIFGNIVDEVAYHEKYPTIYHLRKKLVDSTDKADLRLIYLALAHMIKFRGHFLIEGDLNPDNSDVDKLFIQLVQTYNQLFEENPINASGVDAKAILSARLSKSRRLENLIAQLPGEKKNGLFGNLIALSLGLTPNFKSNFDLAEDAKLQLSKDTYDDDLDNLLAQIGDQYADLFLAAKNLSDAILLSDILRVNTEITKAPLSASMIKRYDEHHQDLTLLKALVRQQLPEKYKEIFFDQSKNGYAGYIDGGASQEEFYKFIKPILEKMDGTEELLVKLNREDLLRKQRTFDNGSIPHQIHLGELHAILRRQEDFYPFLKDNREKIEKILTFRIPYYVGPLARGNSRFAWMTRKSEETITPWNFEEVVDKGASAQSFIERMTNFDKNLPNEKVLPKHSLLYEYFTVYNELTKVKYVTEGMRKPAFLSGEQKKAIVDLLFKTNRKVTVKQLKEDYFKKIECFDSVEISGVEDRFNASLGTYHDLLKIIKDKDFLDNEENEDILEDIVLTLTLFEDREMIEERLKTYAHLFDDKVMKQLKRRRYTGWGRLSRKLINGIRDKQSGKTILDFLKSDGFANRNFMQLIHDDSLTFKEDIQKAQVSGQGDSLHEHIANLAGSPAIKKGILQTVKVVDELVKVMGRHKPENIVIEMARENQTTQKGQKNSRERMKRIEEGIKELGSQILKEHPVENTQLQNEKLYLYYLQNGRDMYVDQELDINRLSDYDVDHIVPQSFLKDDSIDNKVLTRSDKARGKSDNVPSEEVVKKMKNYWRQLLNAKLITQRKFDNLTKAERGGLSELDKAGFIKRQLVETRQITKHVAQILDSRMNTKYDENDKLIREVKVITLKSKLVSDFRKDFQFYKVREINNYHHAHDAYLNAVVGTALIKKYPKLESEFVYGDYKVYDVRKMIAKSEQEIGKATAKYFFYSNIMNFFKTEITLANGEIRKRPLIETNGETGEIVWDKGRDFATVRKVLSMPQVNIVKKTEVQTGGFSKESILPKRNSDKLIARKKDWDPKKYGGFDSPTVAYSVLVVAKVEKGKSKKLKSVKELLGITIMERSSFEKNPIDFLEAKGYKEVKKDLIIKLPKYSLFELENGRKRMLASAGELQKGNELALPSKYVNFLYLASHYEKLKGSPEDNEQKQLFVEQHKHYLDEIIEQISEFSKRVILADANLDKVLSAYNKHRDKPIREQAENIIHLFTLTNLGAPAAFKYFDTTIDRKRYTSTKEVLDATLIHQSITGLYETRIDLSQLGGDGGGGGGGTLNIEDEYRLHETSKEPDVSLGSTWLSDFPQAWAETGGMGLAVRQAPLIIPLKATSTPVSIKQYPMSQEARLGIKPHIQRLLDQGILVPCQSPWNTPLLPVKKPGTNDYRPVQDLREVNKRVEDIHPTVPNPYNLLSGLPPSHQWYTVLDLKDAFFCLRLHPTSQPLFAFEWRDPEMGISGQLTWTRLPQGFKNSPTLFNEALHRDLAGFRIQHPDLILLQYVDDLLLAATSELDCQQGTRALLQTLGDLGYRASAKKAQICQKQVKYLGYLLKEGQRWLTEARKETVMGQPIPKTPRQLREFLGTAGFCRLWIPGFAEMAAPLYPLTKPGTLFNWGPDQQKAFQEIKQALLTAPALGLPDLTKPFELFVDEKQGYAKGVLTQKLGPWRRPVAYLSKKLDPVAAGWPPCLRMVAAIAVLTKDAGKLTMGQPLVILAPHAVEALVKQPPDRWLSNARMTHYQALLLDTDRVQFGPVVALNPATLLPLPEEGLQHDCLDILAEAHGTRSDLMDQPLPDADHTWYTDGSSFLQEGQRKAGAAVTTETEVIWARALPAGTSAQRAELIALTQALKMAEGKKLNVYTDSRYAFATAHIHGEIYRRRGWLTSEGKEIKNKDEILALLKALFLPKRLSIIHCPGHQKGNSAEARGNRMADQAAREVATRETPETSTLLAGKRTADGSEFEKRTADGSEFESPKKKAKVE

SEQ ID NO: 2230 - protein, 2096 aa, synthetic construct
MPAAKRVKLDGGDKKYSIGLDIGTNSVGWAVITDEYKVPSKKFKVLGNTDRHSIKKNLIGALLFDSGETAEATRLKRTARRRYTRRKNRICYLQEIFSNEMAKVDDSFFHRLEESFLVEEDKKHERHPIFGNIVDEVAYHEKYPTIYHLRKKLVDSTDKADLRLIYLALAHMIKFRGHFLIEGDLNPDNSDVDKLFIQLVQTYNQLFEENPINASGVDAKAILSARLSKSRRLENLIAQLPGEKKNGLFGNLIALSLGLTPNFKSNFDLAEDAKLQLSKDTYDDDLDNLLAQIGDQYADLFLAAKNLSDAILLSDILRVNTEITKAPLSASMIKRYDEHHQDLTLLKALVRQQLPEKYKEIFFDQSKNGYAGYIDGGASQEEFYKFIKPILEKMDGTEELLVKLNREDLLRKQRTFDNGSIPHQIHLGELHAILRRQEDFYPFLKDNREKIEKILTFRIPYYVGPLARGNSRFAWMTRKSEETITPWNFEEVVDKGASAQSFIERMTNFDKNLPNEKVLPKHSLLYEYFTVYNELTKVKYVTEGMRKPAFLSGEQKKAIVDLLFKTNRKVTVKQLKEDYFKKIECFDSVEISGVEDRFNASLGTYHDLLKIIKDKDFLDNEENEDILEDIVLTLTLFEDREMIEERLKTYAHLFDDKVMKQLKRRRYTGWGRLSRKLINGIRDKQSGKTILDFLKSDGFANRNFMQLIHDDSLTFKEDIQKAQVSGQGDSLHEHIANLAGSPAIKKGILQTVKVVDELVKVMGRHKPENIVIEMARENQTTQKGQKNSRERMKRIEEGIKELGSQILKEHPVENTQLQNEKLYLYYLQNGRDMYVDQELDINRLSDYDVDHIVPQSFLKDDSIDNKVLTRSDKARGKSDNVPSEEVVKKMKNYWRQLLNAKLITQRKFDNLTKAERGGLSELDKAGFIKRQLVETRQITKHVAQILDSRMNTKYDENDKLIREVKVITLKSKLVSDFRKDFQFYKVREINNYHHAHDAYLNAVVGTALIKKYPKLESEFVYGDYKVYDVRKMIAKSEQEIGKATAKYFFYSNIMNFFKTEITLANGEIRKRPLIETNGETGEIVWDKGRDFATVRKVLSMPQVNIVKKTEVQTGGFSKESILPKRNSDKLIARKKDWDPKKYGGFDSPTVAYSVLVVAKVEKGKSKKLKSVKELLGITIMERSSFEKNPIDFLEAKGYKEVKKDLIIKLPKYSLFELENGRKRMLASAGELQKGNELALPSKYVNFLYLASHYEKLKGSPEDNEQKQLFVEQHKHYLDEIIEQISEFSKRVILADANLDKVLSAYNKHRDKPIREQAENIIHLFTLTNLGAPAAFKYFDTTIDRKRYTSTKEVLDATLIHQSITGLYETRIDLSQLGGDGGEAAAKPAPGGGGGTLNIEDEYRLHETSKEPDVSLGSTWLSDFPQAWAETGGMGLAVRQAPLIIPLKATSTPVSIKQYPMSQEARLGIKPHIQRLLDQGILVPCQSPWNTPLLPVKKPGTNDYRPVQDLREVNKRVEDIHPTVPNPYNLLSGLPPSHQWYTVLDLKDAFFCLRLHPTSQPLFAFEWRDPEMGISGQLTWTRLPQGFKNSPTLFNEALHRDLAGFRIQHPDLILLQYVDDLLLAATSELDCQQGTRALLQTLGDLGYRASAKKAQICQKQVKYLGYLLKEGQRWLTEARKETVMGQPIPKTPRQLREFLGTAGFCRLWIPGFAEMAAPLYPLTKPGTLFNWGPDQQKAFQEIKQALLTAPALGLPDLTKPFELFVDEKQGYAKGVLTQKLGPWRRPVAYLSKKLDPVAAGWPPCLRMVAAIAVLTKDAGKLTMGQPLVILAPHAVEALVKQPPDRWLSNARMTHYQALLLDTDRVQFGPVVALNPATLLPLPEEGLQHDCLDILAEAHGTRSDLMDQPLPDADHTWYTDGSSFLQEGQRKAGAAVTTETEVIWARALPAGTSAQRAELIALTQALKMAEGKKLNVYTDSRYAFATAHIHGEIYRRRGWLTSEGKEIKNKDEILALLKALFLPKRLSIIHCPGHQKGNSAEARGNRMADQAAREVATRETPETSTLLAGKRTADGSEFEKRTADGSEFESPKKKAKVE

SEQ ID NO: 2231 - protein, 2094 aa, synthetic construct
MPAAKRVKLDGGDKKYSIGLDIGTNSVGWAVITDEYKVPSKKFKVLGNTDRHSIKKNLIGALLFDSGETAEATRLKRTARRRYTRRKNRICYLQEIFSNEMAKVDDSFFHRLEESFLVEEDKKHERHPIFGNIVDEVAYHEKYPTIYHLRKKLVDSTDKADLRLIYLALAHMIKFRGHFLIEGDLNPDNSDVDKLFIQLVQTYNQLFEENPINASGVDAKAILSARLSKSRRLENLIAQLPGEKKNGLFGNLIALSLGLTPNFKSNFDLAEDAKLQLSKDTYDDDLDNLLAQIGDQYADLFLAAKNLSDAILLSDILRVNTEITKAPLSASMIKRYDEHHQDLTLLKALVRQQLPEKYKEIFFDQSKNGYAGYIDGGASQEEFYKFIKPILEKMDGTEELLVKLNREDLLRKQRTFDNGSIPHQIHLGELHAILRRQEDFYPFLKDNREKIEKILTFRIPYYVGPLARGNSRFAWMTRKSEETITPWNFEEVVDKGASAQSFIERMTNFDKNLPNEKVLPKHSLLYEYFTVYNELTKVKYVTEGMRKPAFLSGEQKKAIVDLLFKTNRKVTVKQLKEDYFKKIECFDSVEISGVEDRFNASLGTYHDLLKIIKDKDFLDNEENEDILEDIVLTLTLFEDREMIEERLKTYAHLFDDKVMKQLKRRRYTGWGRLSRKLINGIRDKQSGKTILDFLKSDGFANRNFMQLIHDDSLTFKEDIQKAQVSGQGDSLHEHIANLAGSPAIKKGILQTVKVVDELVKVMGRHKPENIVIEMARENQTTQKGQKNSRERMKRIEEGIKELGSQILKEHPVENTQLQNEKLYLYYLQNGRDMYVDQELDINRLSDYDVDHIVPQSFLKDDSIDNKVLTRSDKARGKSDNVPSEEVVKKMKNYWRQLLNAKLITQRKFDNLTKAERGGLSELDKAGFIKRQLVETRQITKHVAQILDSRMNTKYDENDKLIREVKVITLKSKLVSDFRKDFQFYKVREINNYHHAHDAYLNAVVGTALIKKYPKLESEFVYGDYKVYDVRKMIAKSEQEIGKATAKYFFYSNIMNFFKTEITLANGEIRKRPLIETNGETGEIVWDKGRDFATVRKVLSMPQVNIVKKTEVQTGGFSKESILPKRNSDKLIARKKDWDPKKYGGFDSPTVAYSVLVVAKVEKGKSKKLKSVKELLGITIMERSSFEKNPIDFLEAKGYKEVKKDLIIKLPKYSLFELENGRKRMLASAGELQKGNELALPSKYVNFLYLASHYEKLKGSPEDNEQKQLFVEQHKHYLDEIIEQISEFSKRVILADANLDKVLSAYNKHRDKPIREQAENIIHLFTLTNLGAPAAFKYFDTTIDRKRYTSTKEVLDATLIHQSITGLYETRIDLSQLGGDGGGGGGGSGSSGGTLNIEDEYRLHETSKEPDVSLGSTWLSDFPQAWAETGGMGLAVRQAPLIIPLKATSTPVSIKQYPMSQEARLGIKPHIQRLLDQGILVPCQSPWNTPLLPVKKPGTNDYRPVQDLREVNKRVEDIHPTVPNPYNLLSGLPPSHQWYTVLDLKDAFFCLRLHPTSQPLFAFEWRDPEMGISGQLTWTRLPQGFKNSPTLFNEALHRDLAGFRIQHPDLILLQYVDDLLLAATSELDCQQGTRALLQTLGDLGYRASAKKAQICQKQVKYLGYLLKEGQRWLTEARKETVMGQPIPKTPRQLREFLGTAGFCRLWIPGFAEMAAPLYPLTKPGTLFNWGPDQQKAFQEIKQALLTAPALGLPDLTKPFELFVDEKQGYAKGVLTQKLGPWRRPVAYLSKKLDPVAAGWPPCLRMVAAIAVLTKDAGKLTMGQPLVILAPHAVEALVKQPPDRWLSNARMTHYQALLLDTDRVQFGPVVALNPATLLPLPEEGLQHDCLDILAEAHGTRSDLMDQPLPDADHTWYTDGSSFLQEGQRKAGAAVTTETEVIWARALPAGTSAQRAELIALTQALKMAEGKKLNVYTDSRYAFATAHIHGEIYRRRGWLTSEGKEIKNKDEILALLKALFLPKRLSIIHCPGHQKGNSAEARGNRMADQAAREVATRETPETSTLLAGKRTADGSEFEKRTADGSEFESPKKKAKVE

SEQ ID NO: 2232 - protein, 2096 aa, synthetic construct
MPAAKRVKLDGGDKKYSIGLDIGTNSVGWAVITDEYKVPSKKFKVLGNTDRHSIKKNLIGALLFDSGETAEATRLKRTARRRYTRRKNRICYLQEIFSNEMAKVDDSFFHRLEESFLVEEDKKHERHPIFGNIVDEVAYHEKYPTIYHLRKKLVDSTDKADLRLIYLALAHMIKFRGHFLIEGDLNPDNSDVDKLFIQLVQTYNQLFEENPINASGVDAKAILSARLSKSRRLENLIAQLPGEKKNGLFGNLIALSLGLTPNFKSNFDLAEDAKLQLSKDTYDDDLDNLLAQIGDQYADLFLAAKNLSDAILLSDILRVNTEITKAPLSASMIKRYDEHHQDLTLLKALVRQQLPEKYKEIFFDQSKNGYAGYIDGGASQEEFYKFIKPILEKMDGTEELLVKLNREDLLRKQRTFDNGSIPHQIHLGELHAILRRQEDFYPFLKDNREKIEKILTFRIPYYVGPLARGNSRFAWMTRKSEETITPWNFEEVVDKGASAQSFIERMTNFDKNLPNEKVLPKHSLLYEYFTVYNELTKVKYVTEGMRKPAFLSGEQKKAIVDLLFKTNRKVTVKQLKEDYFKKIECFDSVEISGVEDRFNASLGTYHDLLKIIKDKDFLDNEENEDILEDIVLTLTLFEDREMIEERLKTYAHLFDDKVMKQLKRRRYTGWGRLSRKLINGIRDKQSGKTILDFLKSDGFANRNFMQLIHDDSLTFKEDIQKAQVSGQGDSLHEHIANLAGSPAIKKGILQTVKVVDELVKVMGRHKPENIVIEMARENQTTQKGQKNSRERMKRIEEGIKELGSQILKEHPVENTQLQNEKLYLYYLQNGRDMYVDQELDINRLSDYDVDHIVPQSFLKDDSIDNKVLTRSDKARGKSDNVPSEEVVKKMKNYWRQLLNAKLITQRKFDNLTKAERGGLSELDKAGFIKRQLVETRQITKHVAQILDSRMNTKYDENDKLIREVKVITLKSKLVSDFRKDFQFYKVREINNYHHAHDAYLNAVVGTALIKKYPKLESEFVYGDYKVYDVRKMIAKSEQEIGKATAKYFFYSNIMNFFKTEITLANGEIRKRPLIETNGETGEIVWDKGRDFATVRKVLSMPQVNIVKKTEVQTGGFSKESILPKRNSDKLIARKKDWDPKKYGGFDSPTVAYSVLVVAKVEKGKSKKLKSVKELLGITIMERSSFEKNPIDFLEAKGYKEVKKDLIIKLPKYSLFELENGRKRMLASAGELQKGNELALPSKYVNFLYLASHYEKLKGSPEDNEQKQLFVEQHKHYLDEIIEQISEFSKRVILADANLDKVLSAYNKHRDKPIREQAENIIHLFTLTNLGAPAAFKYFDTTIDRKRYTSTKEVLDATLIHQSITGLYETRIDLSQLGGDGGPAPEAAAKGGSGGTLNIEDEYRLHETSKEPDVSLGSTWLSDFPQAWAETGGMGLAVRQAPLIIPLKATSTPVSIKQYPMSQEARLGIKPHIQRLLDQGILVPCQSPWNTPLLPVKKPGTNDYRPVQDLREVNKRVEDIHPTVPNPYNLLSGLPPSHQWYTVLDLKDAFFCLRLHPTSQPLFAFEWRDPEMGISGQLTWTRLPQGFKNSPTLFNEALHRDLAGFRIQHPDLILLQYVDDLLLAATSELDCQQGTRALLQTLGDLGYRASAKKAQICQKQVKYLGYLLKEGQRWLTEARKETVMGQPIPKTPRQLREFLGTAGFCRLWIPGFAEMAAPLYPLTKPGTLFNWGPDQQKAFQEIKQALLTAPALGLPDLTKPFELFVDEKQGYAKGVLTQKLGPWRRPVAYLSKKLDPVAAGWPPCLRMVAAIAVLTKDAGKLTMGQPLVILAPHAVEALVKQPPDRWLSNARMTHYQALLLDTDRVQFGPVVALNPATLLPLPEEGLQHDCLDILAEAHGTRSDLMDQPLPDADHTWYTDGSSFLQEGQRKAGAAVTTETEVIWARALPAGTSAQRAELIALTQALKMAEGKKLNVYTDSRYAFATAHIHGEIYRRRGWLTSEGKEIKNKDEILALLKALFLPKRLSIIHCPGHQKGNSAEARGNRMADQAAREVATRETPETSTLLAGKRTADGSEFEKRTADGSEFESPKKKAKVE

SEQ ID NO: 2233 - protein, 2093 aa, synthetic construct
MPAAKRVKLDGGDKKYSIGLDIGTNSVGWAVITDEYKVPSKKFKVLGNTDRHSIKKNLIGALLFDSGETAEATRLKRTARRRYTRRKNRICYLQEIFSNEMAKVDDSFFHRLEESFLVEEDKKHERHPIFGNIVDEVAYHEKYPTIYHLRKKLVDSTDKADLRLIYLALAHMIKFRGHFLIEGDLNPDNSDVDKLFIQLVQTYNQLFEENPINASGVDAKAILSARLSKSRRLENLIAQLPGEKKNGLFGNLIALSLGLTPNFKSNFDLAEDAKLQLSKDTYDDDLDNLLAQIGDQYADLFLAAKNLSDAILLSDILRVNTEITKAPLSASMIKRYDEHHQDLTLLKALVRQQLPEKYKEIFFDQSKNGYAGYIDGGASQEEFYKFIKPILEKMDGTEELLVKLNREDLLRKQRTFDNGSIPHQIHLGELHAILRRQEDFYPFLKDNREKIEKILTFRIPYYVGPLARGNSRFAWMTRKSEETITPWNFEEVVDKGASAQSFIERMTNFDKNLPNEKVLPKHSLLYEYFTVYNELTKVKYVTEGMRKPAFLSGEQKKAIVDLLFKTNRKVTVKQLKEDYFKKIECFDSVEISGVEDRFNASLGTYHDLLKIIKDKDFLDNEENEDILEDIVLTLTLFEDREMIEERLKTYAHLFDDKVMKQLKRRRYTGWGRLSRKLINGIRDKQSGKTILDFLKSDGFANRNFMQLIHDDSLTFKEDIQKAQVSGQGDSLHEHIANLAGSPAIKKGILQTVKVVDELVKVMGRHKPENIVIEMARENQTTQKGQKNSRERMKRIEEGIKELGSQILKEHPVENTQLQNEKLYLYYLQNGRDMYVDQELDINRLSDYDVDHIVPQSFLKDDSIDNKVLTRSDKARGKSDNVPSEEVVKKMKNYWRQLLNAKLITQRKFDNLTKAERGGLSELDKAGFIKRQLVETRQITKHVAQILDSRMNTKYDENDKLIREVKVITLKSKLVSDFRKDFQFYKVREINNYHHAHDAYLNAVVGTALIKKYPKLESEFVYGDYKVYDVRKMIAKSEQEIGKATAKYFFYSNIMNFFKTEITLANGEIRKRPLIETNGETGEIVWDKGRDFATVRKVLSMPQVNIVKKTEVQTGGFSKESILPKRNSDKLIARKKDWDPKKYGGFDSPTVAYSVLVVAKVEKGKSKKLKSVKELLGITIMERSSFEKNPIDFLEAKGYKEVKKDLIIKLPKYSLFELENGRKRMLASAGELQKGNELALPSKYVNFLYLASHYEKLKGSPEDNEQKQLFVEQHKHYLDEIIEQISEFSKRVILADANLDKVLSAYNKHRDKPIREQAENIIHLFTLTNLGAPAAFKYFDTTIDRKRYTSTKEVLDATLIHQSITGLYETRIDLSQLGGDGGGSSEAAAKGGTLNIEDEYRLHETSKEPDVSLGSTWLSDFPQAWAETGGMGLAVRQAPLIIPLKATSTPVSIKQYPMSQEARLGIKPHIQRLLDQGILVPCQSPWNTPLLPVKKPGTNDYRPVQDLREVNKRVEDIHPTVPNPYNLLSGLPPSHQWYTVLDLKDAFFCLRLHPTSQPLFAFEWRDPEMGISGQLTWTRLPQGFKNSPTLFNEALHRDLAGFRIQHPDLILLQYVDDLLLAATSELDCQQGTRALLQTLGDLGYRASAKKAQICQKQVKYLGYLLKEGQRWLTEARKETVMGQPIPKTPRQLREFLGTAGFCRLWIPGFAEMAAPLYPLTKPGTLFNWGPDQQKAFQEIKQALLTAPALGLPDLTKPFELFVDEKQGYAKGVLTQKLGPWRRPVAYLSKKLDPVAAGWPPCLRMVAAIAVLTKDAGKLTMGQPLVILAPHAVEALVKQPPDRWLSNARMTHYQALLLDTDRVQFGPVVALNPATLLPLPEEGLQHDCLDILAEAHGTRSDLMDQPLPDADHTWYTDGSSFLQEGQRKAGAAVTTETEVIWARALPAGTSAQRAELIALTQALKMAEGKKLNVYTDSRYAFATAHIHGEIYRRRGWLTSEGKEIKNKDEILALLKALFLPKRLSIIHCPGHQKGNSAEARGNRMADQAAREVATRETPETSTLLAGKRTADGSEFEKRTADGSEFESPKKKAKVE

SEQ ID NO: 2234 - protein, 2094 aa, synthetic construct
MPAAKRVKLDGGDKKYSIGLDIGTNSVGWAVITDEYKVPSKKFKVLGNTDRHSIKKNLIGALLFDSGETAEATRLKRTARRRYTRRKNRICYLQEIFSNEMAKVDDSFFHRLEESFLVEEDKKHERHPIFGNIVDEVAYHEKYPTIYHLRKKLVDSTDKADLRLIYLALAHMIKFRGHFLIEGDLNPDNSDVDKLFIQLVQTYNQLFEENPINASGVDAKAILSARLSKSRRLENLIAQLPGEKKNGLFGNLIALSLGLTPNFKSNFDLAEDAKLQLSKDTYDDDLDNLLAQIGDQYADLFLAAKNLSDAILLSDILRVNTEITKAPLSASMIKRYDEHHQDLTLLKALVRQQLPEKYKEIFFDQSKNGYAGYIDGGASQEEFYKFIKPILEKMDGTEELLVKLNREDLLRKQRTFDNGSIPHQIHLGELHAILRRQEDFYPFLKDNREKIEKILTFRIPYYVGPLARGNSRFAWMTRKSEETITPWNFEEVVDKGASAQSFIERMTNFDKNLPNEKVLPKHSLLYEYFTVYNELTKVKYVTEGMRKPAFLSGEQKKAIVDLLFKTNRKVTVKQLKEDYFKKIECFDSVEISGVEDRFNASLGTYHDLLKIIKDKDFLDNEENEDILEDIVLTLTLFEDREMIEERLKTYAHLFDDKVMKQLKRRRYTGWGRLSRKLINGIRDKQSGKTILDFLKSDGFANRNFMQLIHDDSLTFKEDIQKAQVSGQGDSLHEHIANLAGSPAIKKGILQTVKVVDELVKVMGRHKPENIVIEMARENQTTQKGQKNSRERMKRIEEGIKELGSQILKEHPVENTQLQNEKLYLYYLQNGRDMYVDQELDINRLSDYDVDHIVPQSFLKDDSIDNKVLTRSDKARGKSDNVPSEEVVKKMKNYWRQLLNAKLITQRKFDNLTKAERGGLSELDKAGFIKRQLVETRQITKHVAQILDSRMNTKYDENDKLIREVKVITLKSKLVSDFRKDFQFYKVREINNYHHAHDAYLNAVVGTALIKKYPKLESEFVYGDYKVYDVRKMIAKSEQEIGKATAKYFFYSNIMNFFKTEITLANGEIRKRPLIETNGETGEIVWDKGRDFATVRKVLSMPQVNIVKKTEVQTGGFSKESILPKRNSDKLIARKKDWDPKKYGGFDSPTVAYSVLVVAKVEKGKSKKLKSVKELLGITIMERSSFEKNPIDFLEAKGYKEVKKDLIIKLPKYSLFELENGRKRMLASAGELQKGNELALPSKYVNFLYLASHYEKLKGSPEDNEQKQLFVEQHKHYLDEIIEQISEFSKRVILADANLDKVLSAYNKHRDKPIREQAENIIHLFTLTNLGAPAAFKYFDTTIDRKRYTSTKEVLDATLIHQSITGLYETRIDLSQLGGDGGPAPGGGGSSGGTLNIEDEYRLHETSKEPDVSLGSTWLSDFPQAWAETGGMGLAVRQAPLIIPLKATSTPVSIKQYPMSQEARLGIKPHIQRLLDQGILVPCQSPWNTPLLPVKKPGTNDYRPVQDLREVNKRVEDIHPTVPNPYNLLSGLPPSHQWYTVLDLKDAFFCLRLHPTSQPLFAFEWRDPEMGISGQLTWTRLPQGFKNSPTLFNEALHRDLAGFRIQHPDLILLQYVDDLLLAATSELDCQQGTRALLQTLGDLGYRASAKKAQICQKQVKYLGYLLKEGQRWLTEARKETVMGQPIPKTPRQLREFLGTAGFCRLWIPGFAEMAAPLYPLTKPGTLFNWGPDQQKAFQEIKQALLTAPALGLPDLTKPFELFVDEKQGYAKGVLTQKLGPWRRPVAYLSKKLDPVAAGWPPCLRMVAAIAVLTKDAGKLTMGQPLVILAPHAVEALVKQPPDRWLSNARMTHYQALLLDTDRVQFGPVVALNPATLLPLPEEGLQHDCLDILAEAHGTRSDLMDQPLPDADHTWYTDGSSFLQEGQRKAGAAVTTETEVIWARALPAGTSAQRAELIALTQALKMAEGKKLNVYTDSRYAFATAHIHGEIYRRRGWLTSEGKEIKNKDEILALLKALFLPKRLSIIHCPGHQKGNSAEARGNRMADQAAREVATRETPETSTLLAGKRTADGSEFEKRTADGSEFESPKKKAKVE

SEQ ID NO: 2235 - protein, 2096 aa, synthetic construct
MPAAKRVKLDGGDKKYSIGLDIGTNSVGWAVITDEYKVPSKKFKVLGNTDRHSIKKNLIGALLFDSGETAEATRLKRTARRRYTRRKNRICYLQEIFSNEMAKVDDSFFHRLEESFLVEEDKKHERHPIFGNIVDEVAYHEKYPTIYHLRKKLVDSTDKADLRLIYLALAHMIKFRGHFLIEGDLNPDNSDVDKLFIQLVQTYNQLFEENPINASGVDAKAILSARLSKSRRLENLIAQLPGEKKNGLFGNLIALSLGLTPNFKSNFDLAEDAKLQLSKDTYDDDLDNLLAQIGDQYADLFLAAKNLSDAILLSDILRVNTEITKAPLSASMIKRYDEHHQDLTLLKALVRQQLPEKYKEIFFDQSKNGYAGYIDGGASQEEFYKFIKPILEKMDGTEELLVKLNREDLLRKQRTFDNGSIPHQIHLGELHAILRRQEDFYPFLKDNREKIEKILTFRIPYYVGPLARGNSRFAWMTRKSEETITPWNFEEVVDKGASAQSFIERMTNFDKNLPNEKVLPKHSLLYEYFTVYNELTKVKYVTEGMRKPAFLSGEQKKAIVDLLFKTNRKVTVKQLKEDYFKKIECFDSVEISGVEDRFNASLGTYHDLLKIIKDKDFLDNEENEDILEDIVLTLTLFEDREMIEERLKTYAHLFDDKVMKQLKRRRYTGWGRLSRKLINGIRDKQSGKTILDFLKSDGFANRNFMQLIHDDSLTFKEDIQKAQVSGQGDSLHEHIANLAGSPAIKKGILQTVKVVDELVKVMGRHKPENIVIEMARENQTTQKGQKNSRERMKRIEEGIKELGSQILKEHPVENTQLQNEKLYLYYLQNGRDMYVDQELDINRLSDYDVDHIVPQSFLKDDSIDNKVLTRSDKARGKSDNVPSEEVVKKMKNYWRQLLNAKLITQRKFDNLTKAERGGLSELDKAGFIKRQLVETRQITKHVAQILDSRMNTKYDENDKLIREVKVITLKSKLVSDFRKDFQFYKVREINNYHHAHDAYLNAVVGTALIKKYPKLESEFVYGDYKVYDVRKMIAKSEQEIGKATAKYFFYSNIMNFFKTEITLANGEIRKRPLIETNGETGEIVWDKGRDFATVRKVLSMPQVNIVKKTEVQTGGFSKESILPKRNSDKLIARKKDWDPKKYGGFDSPTVAYSVLVVAKVEKGKSKKLKSVKELLGITIMERSSFEKNPIDFLEAKGYKEVKKDLIIKLPKYSLFELENGRKRMLASAGELQKGNELALPSKYVNFLYLASHYEKLKGSPEDNEQKQLFVEQHKHYLDEIIEQISEFSKRVILADANLDKVLSAYNKHRDKPIREQAENIIHLFTLTNLGAPAAFKYFDTTIDRKRYTSTKEVLDATLIHQSITGLYETRIDLSQLGGDGGEAAAKGSSPAPGGTLNIEDEYRLHETSKEPDVSLGSTWLSDFPQAWAETGGMGLAVRQAPLIIPLKATSTPVSIKQYPMSQEARLGIKPHIQRLLDQGILVPCQSPWNTPLLPVKKPGTNDYRPVQDLREVNKRVEDIHPTVPNPYNLLSGLPPSHQWYTVLDLKDAFFCLRLHPTSQPLFAFEWRDPEMGISGQLTWTRLPQGFKNSPTLFNEALHRDLAGFRIQHPDLILLQYVDDLLLAATSELDCQQGTRALLQTLGDLGYRASAKKAQICQKQVKYLGYLLKEGQRWLTEARKETVMGQPIPKTPRQLREFLGTAGFCRLWIPGFAEMAAPLYPLTKPGTLFNWGPDQQKAFQEIKQALLTAPALGLPDLTKPFELFVDEKQGYAKGVLTQKLGPWRRPVAYLSKKLDPVAAGWPPCLRMVAAIAVLTKDAGKLTMGQPLVILAPHAVEALVKQPPDRWLSNARMTHYQALLLDTDRVQFGPVVALNPATLLPLPEEGLQHDCLDILAEAHGTRSDLMDQPLPDADHTWYTDGSSFLQEGQRKAGAAVTTETEVIWARALPAGTSAQRAELIALTQALKMAEGKKLNVYTDSRYAFATAHIHGEIYRRRGWLTSEGKEIKNKDEILALLKALFLPKRLSIIHCPGHQKGNSAEARGNRMADQAAREVATRETPETSTLLAGKRTADGSEFEKRTADGSEFESPKKKAKVE

SEQ ID NO: 2236 - protein, 2095 aa, synthetic construct
MPAAKRVKLDGGDKKYSIGLDIGTNSVGWAVITDEYKVPSKKFKVLGNTDRHSIKKNLIGALLFDSGETAEATRLKRTARRRYTRRKNRICYLQEIFSNEMAKVDDSFFHRLEESFLVEEDKKHERHPIFGNIVDEVAYHEKYPTIYHLRKKLVDSTDKADLRLIYLALAHMIKFRGHFLIEGDLNPDNSDVDKLFIQLVQTYNQLFEENPINASGVDAKAILSARLSKSRRLENLIAQLPGEKKNGLFGNLIALSLGLTPNFKSNFDLAEDAKLQLSKDTYDDDLDNLLAQIGDQYADLFLAAKNLSDAILLSDILRVNTEITKAPLSASMIKRYDEHHQDLTLLKALVRQQLPEKYKEIFFDQSKNGYAGYIDGGASQEEFYKFIKPILEKMDGTEELLVKLNREDLLRKQRTFDNGSIPHQIHLGELHAILRRQEDFYPFLKDNREKIEKILTFRIPYYVGPLARGNSRFAWMTRKSEETITPWNFEEVVDKGASAQSFIERMTNFDKNLPNEKVLPKHSLLYEYFTVYNELTKVKYVTEGMRKPAFLSGEQKKAIVDLLFKTNRKVTVKQLKEDYFKKIECFDSVEISGVEDRFNASLGTYHDLLKIIKDKDFLDNEENEDILEDIVLTLTLFEDREMIEERLKTYAHLFDDKVMKQLKRRRYTGWGRLSRKLINGIRDKQSGKTILDFLKSDGFANRNFMQLIHDDSLTFKEDIQKAQVSGQGDSLHEHIANLAGSPAIKKGILQTVKVVDELVKVMGRHKPENIVIEMARENQTTQKGQKNSRERMKRIEEGIKELGSQILKEHPVENTQLQNEKLYLYYLQNGRDMYVDQELDINRLSDYDVDHIVPQSFLKDDSIDNKVLTRSDKARGKSDNVPSEEVVKKMKNYWRQLLNAKLITQRKFDNLTKAERGGLSELDKAGFIKRQLVETRQITKHVAQILDSRMNTKYDENDKLIREVKVITLKSKLVSDFRKDFQFYKVREINNYHHAHDAYLNAVVGTALIKKYPKLESEFVYGDYKVYDVRKMIAKSEQEIGKATAKYFFYSNIMNFFKTEITLANGEIRKRPLIETNGETGEIVWDKGRDFATVRKVLSMPQVNIVKKTEVQTGGFSKESILPKRNSDKLIARKKDWDPKKYGGFDSPTVAYSVLVVAKVEKGKSKKLKSVKELLGITIMERSSFEKNPIDFLEAKGYKEVKKDLIIKLPKYSLFELENGRKRMLASAGELQKGNELALPSKYVNFLYLASHYEKLKGSPEDNEQKQLFVEQHKHYLDEIIEQISEFSKRVILADANLDKVLSAYNKHRDKPIREQAENIIHLFTLTNLGAPAAFKYFDTTIDRKRYTSTKEVLDATLIHQSITGLYETRIDLSQLGGDGGEAAAKEAAAKGGTLNIEDEYRLHETSKEPDVSLGSTWLSDFPQAWAETGGMGLAVRQAPLIIPLKATSTPVSIKQYPMSQEARLGIKPHIQRLLDQGILVPCQSPWNTPLLPVKKPGTNDYRPVQDLREVNKRVEDIHPTVPNPYNLLSGLPPSHQWYTVLDLKDAFFCLRLHPTSQPLFAFEWRDPEMGISGQLTWTRLPQGFKNSPTLFNEALHRDLAGFRIQHPDLILLQYVDDLLLAATSELDCQQGTRALLQTLGDLGYRASAKKAQICQKQVKYLGYLLKEGQRWLTEARKETVMGQPIPKTPRQLREFLGTAGFCRLWIPGFAEMAAPLYPLTKPGTLFNWGPDQQKAFQEIKQALLTAPALGLPDLTKPFELFVDEKQGYAKGVLTQKLGPWRRPVAYLSKKLDPVAAGWPPCLRMVAAIAVLTKDAGKLTMGQPLVILAPHAVEALVKQPPDRWLSNARMTHYQALLLDTDRVQFGPVVALNPATLLPLPEEGLQHDCLDILAEAHGTRSDLMDQPLPDADHTWYTDGSSFLQEGQRKAGAAVTTETEVIWARALPAGTSAQRAELIALTQALKMAEGKKLNVYTDSRYAFATAHIHGEIYRRRGWLTSEGKEIKNKDEILALLKALFLPKRLSIIHCPGHQKGNSAEARGNRMADQAAREVATRETPETSTLLAGKRTADGSEFEKRTADGSEFESPKKKAKVE

SEQ ID NO: 2237 - protein, 2105 aa, synthetic construct
MPAAKRVKLDGGDKKYSIGLDIGTNSVGWAVITDEYKVPSKKFKVLGNTDRHSIKKNLIGALLFDSGETAEATRLKRTARRRYTRRKNRICYLQEIFSNEMAKVDDSFFHRLEESFLVEEDKKHERHPIFGNIVDEVAYHEKYPTIYHLRKKLVDSTDKADLRLIYLALAHMIKFRGHFLIEGDLNPDNSDVDKLFIQLVQTYNQLFEENPINASGVDAKAILSARLSKSRRLENLIAQLPGEKKNGLFGNLIALSLGLTPNFKSNFDLAEDAKLQLSKDTYDDDLDNLLAQIGDQYADLFLAAKNLSDAILLSDILRVNTEITKAPLSASMIKRYDEHHQDLTLLKALVRQQLPEKYKEIFFDQSKNGYAGYIDGGASQEEFYKFIKPILEKMDGTEELLVKLNREDLLRKQRTFDNGSIPHQIHLGELHAILRRQEDFYPFLKDNREKIEKILTFRIPYYVGPLARGNSRFAWMTRKSEETITPWNFEEVVDKGASAQSFIERMTNFDKNLPNEKVLPKHSLLYEYFTVYNELTKVKYVTEGMRKPAFLSGEQKKAIVDLLFKTNRKVTVKQLKEDYFKKIECFDSVEISGVEDRFNASLGTYHDLLKIIKDKDFLDNEENEDILEDIVLTLTLFEDREMIEERLKTYAHLFDDKVMKQLKRRRYTGWGRLSRKLINGIRDKQSGKTILDFLKSDGFANRNFMQLIHDDSLTFKEDIQKAQVSGQGDSLHEHIANLAGSPAIKKGILQTVKVVDELVKVMGRHKPENIVIEMARENQTTQKGQKNSRERMKRIEEGIKELGSQILKEHPVENTQLQNEKLYLYYLQNGRDMYVDQELDINRLSDYDVDHIVPQSFLKDDSIDNKVLTRSDKARGKSDNVPSEEVVKKMKNYWRQLLNAKLITQRKFDNLTKAERGGLSELDKAGFIKRQLVETRQITKHVAQILDSRMNTKYDENDKLIREVKVITLKSKLVSDFRKDFQFYKVREINNYHHAHDAYLNAVVGTALIKKYPKLESEFVYGDYKVYDVRKMIAKSEQEIGKATAKYFFYSNIMNFFKTEITLANGEIRKRPLIETNGETGEIVWDKGRDFATVRKVLSMPQVNIVKKTEVQTGGFSKESILPKRNSDKLIARKKDWDPKKYGGFDSPTVAYSVLVVAKVEKGKSKKLKSVKELLGITIMERSSFEKNPIDFLEAKGYKEVKKDLIIKLPKYSLFELENGRKRMLASAGELQKGNELALPSKYVNFLYLASHYEKLKGSPEDNEQKQLFVEQHKHYLDEIIEQISEFSKRVILADANLDKVLSAYNKHRDKPIREQAENIIHLFTLTNLGAPAAFKYFDTTIDRKRYTSTKEVLDATLIHQSITGLYETRIDLSQLGGDGGEAAAKEAAAKEAAAKEAAAKGGTLNIEDEYRLHETSKEPDVSLGSTWLSDFPQAWAETGGMGLAVRQAPLIIPLKATSTPVSIKQYPMSQEARLGIKPHIQRLLDQGILVPCQSPWNTPLLPVKKPGTNDYRPVQDLREVNKRVEDIHPTVPNPYNLLSGLPPSHQWYTVLDLKDAFFCLRLHPTSQPLFAFEWRDPEMGISGQLTWTRLPQGFKNSPTLFNEALHRDLAGFRIQHPDLILLQYVDDLLLAATSELDCQQGTRALLQTLGDLGYRASAKKAQICQKQVKYLGYLLKEGQRWLTEARKETVMGQPIPKTPRQLREFLGTAGFCRLWIPGFAEMAAPLYPLTKPGTLFNWGPDQQKAFQEIKQALLTAPALGLPDLTKPFELFVDEKQGYAKGVLTQKLGPWRRPVAYLSKKLDPVAAGWPPCLRMVAAIAVLTKDAGKLTMGQPLVILAPHAVEALVKQPPDRWLSNARMTHYQALLLDTDRVQFGPVVALNPATLLPLPEEGLQHDCLDILAEAHGTRSDLMDQPLPDADHTWYTDGSSFLQEGQRKAGAAVTTETEVIWARALPAGTSAQRAELIALTQALKMAEGKKLNVYTDSRYAFATAHIHGEIYRRRGWLTSEGKEIKNKDEILALLKALFLPKRLSIIHCPGHQKGNSAEARGNRMADQAAREVATRETPETSTLLAGKRTADGSEFEKRTADGSEFESPKKKAKVE

SEQ ID NO: 2238 - protein, 2093 aa, synthetic construct
MPAAKRVKLDGGDKKYSIGLDIGTNSVGWAVITDEYKVPSKKFKVLGNTDRHSIKKNLIGALLFDSGETAEATRLKRTARRRYTRRKNRICYLQEIFSNEMAKVDDSFFHRLEESFLVEEDKKHERHPIFGNIVDEVAYHEKYPTIYHLRKKLVDSTDKADLRLIYLALAHMIKFRGHFLIEGDLNPDNSDVDKLFIQLVQTYNQLFEENPINASGVDAKAILSARLSKSRRLENLIAQLPGEKKNGLFGNLIALSLGLTPNFKSNFDLAEDAKLQLSKDTYDDDLDNLLAQIGDQYADLFLAAKNLSDAILLSDILRVNTEITKAPLSASMIKRYDEHHQDLTLLKALVRQQLPEKYKEIFFDQSKNGYAGYIDGGASQEEFYKFIKPILEKMDGTEELLVKLNREDLLRKQRTFDNGSIPHQIHLGELHAILRRQEDFYPFLKDNREKIEKILTFRIPYYVGPLARGNSRFAWMTRKSEETITPWNFEEVVDKGASAQSFIERMTNFDKNLPNEKVLPKHSLLYEYFTVYNELTKVKYVTEGMRKPAFLSGEQKKAIVDLLFKTNRKVTVKQLKEDYFKKIECFDSVEISGVEDRFNASLGTYHDLLKIIKDKDFLDNEENEDILEDIVLTLTLFEDREMIEERLKTYAHLFDDKVMKQLKRRRYTGWGRLSRKLINGIRDKQSGKTILDFLKSDGFANRNFMQLIHDDSLTFKEDIQKAQVSGQGDSLHEHIANLAGSPAIKKGILQTVKVVDELVKVMGRHKPENIVIEMARENQTTQKGQKNSRERMKRIEEGIKELGSQILKEHPVENTQLQNEKLYLYYLQNGRDMYVDQELDINRLSDYDVDHIVPQSFLKDDSIDNKVLTRSDKARGKSDNVPSEEVVKKMKNYWRQLLNAKLITQRKFDNLTKAERGGLSELDKAGFIKRQLVETRQITKHVAQILDSRMNTKYDENDKLIREVKVITLKSKLVSDFRKDFQFYKVREINNYHHAHDAYLNAVVGTALIKKYPKLESEFVYGDYKVYDVRKMIAKSEQEIGKATAKYFFYSNIMNFFKTEITLANGEIRKRPLIETNGETGEIVWDKGRDFATVRKVLSMPQVNIVKKTEVQTGGFSKESILPKRNSDKLIARKKDWDPKKYGGFDSPTVAYSVLVVAKVEKGKSKKLKSVKELLGITIMERSSFEKNPIDFLEAKGYKEVKKDLIIKLPKYSLFELENGRKRMLASAGELQKGNELALPSKYVNFLYLASHYEKLKGSPEDNEQKQLFVEQHKHYLDEIIEQISEFSKRVILADANLDKVLSAYNKHRDKPIREQAENIIHLFTLTNLGAPAAFKYFDTTIDRKRYTSTKEVLDATLIHQSITGLYETRIDLSQLGGDGGEAAAKGGSGGTLNIEDEYRLHETSKEPDVSLGSTWLSDFPQAWAETGGMGLAVRQAPLIIPLKATSTPVSIKQYPMSQEARLGIKPHIQRLLDQGILVPCQSPWNTPLLPVKKPGTNDYRPVQDLREVNKRVEDIHPTVPNPYNLLSGLPPSHQWYTVLDLKDAFFCLRLHPTSQPLFAFEWRDPEMGISGQLTWTRLPQGFKNSPTLFNEALHRDLAGFRIQHPDLILLQYVDDLLLAATSELDCQQGTRALLQTLGDLGYRASAKKAQICQKQVKYLGYLLKEGQRWLTEARKETVMGQPIPKTPRQLREFLGTAGFCRLWIPGFAEMAAPLYPLTKPGTLFNWGPDQQKAFQEIKQALLTAPALGLPDLTKPFELFVDEKQGYAKGVLTQKLGPWRRPVAYLSKKLDPVAAGWPPCLRMVAAIAVLTKDAGKLTMGQPLVILAPHAVEALVKQPPDRWLSNARMTHYQALLLDTDRVQFGPVVALNPATLLPLPEEGLQHDCLDILAEAHGTRSDLMDQPLPDADHTWYTDGSSFLQEGQRKAGAAVTTETEVIWARALPAGTSAQRAELIALTQALKMAEGKKLNVYTDSRYAFATAHIHGEIYRRRGWLTSEGKEIKNKDEILALLKALFLPKRLSIIHCPGHQKGNSAEARGNRMADQAAREVATRETPETSTLLAGKRTADGSEFEKRTADGSEFESPKKKAKVE

SEQ ID NO: 2239 - protein, 2096 aa, synthetic construct
MPAAKRVKLDGGDKKYSIGLDIGTNSVGWAVITDEYKVPSKKFKVLGNTDRHSIKKNLIGALLFDSGETAEATRLKRTARRRYTRRKNRICYLQEIFSNEMAKVDDSFFHRLEESFLVEEDKKHERHPIFGNIVDEVAYHEKYPTIYHLRKKLVDSTDKADLRLIYLALAHMIKFRGHFLIEGDLNPDNSDVDKLFIQLVQTYNQLFEENPINASGVDAKAILSARLSKSRRLENLIAQLPGEKKNGLFGNLIALSLGLTPNFKSNFDLAEDAKLQLSKDTYDDDLDNLLAQIGDQYADLFLAAKNLSDAILLSDILRVNTEITKAPLSASMIKRYDEHHQDLTLLKALVRQQLPEKYKEIFFDQSKNGYAGYIDGGASQEEFYKFIKPILEKMDGTEELLVKLNREDLLRKQRTFDNGSIPHQIHLGELHAILRRQEDFYPFLKDNREKIEKILTFRIPYYVGPLARGNSRFAWMTRKSEETITPWNFEEVVDKGASAQSFIERMTNFDKNLPNEKVLPKHSLLYEYFTVYNELTKVKYVTEGMRKPAFLSGEQKKAIVDLLFKTNRKVTVKQLKEDYFKKIECFDSVEISGVEDRFNASLGTYHDLLKIIKDKDFLDNEENEDILEDIVLTLTLFEDREMIEERLKTYAHLFDDKVMKQLKRRRYTGWGRLSRKLINGIRDKQSGKTILDFLKSDGFANRNFMQLIHDDSLTFKEDIQKAQVSGQGDSLHEHIANLAGSPAIKKGILQTVKVVDELVKVMGRHKPENIVIEMARENQTTQKGQKNSRERMKRIEEGIKELGSQILKEHPVENTQLQNEKLYLYYLQNGRDMYVDQELDINRLSDYDVDHIVPQSFLKDDSIDNKVLTRSDKARGKSDNVPSEEVVKKMKNYWRQLLNAKLITQRKFDNLTKAERGGLSELDKAGFIKRQLVETRQITKHVAQILDSRMNTKYDENDKLIREVKVITLKSKLVSDFRKDFQFYKVREINNYHHAHDAYLNAVVGTALIKKYPKLESEFVYGDYKVYDVRKMIAKSEQEIGKATAKYFFYSNIMNFFKTEITLANGEIRKRPLIETNGETGEIVWDKGRDFATVRKVLSMPQVNIVKKTEVQTGGFSKESILPKRNSDKLIARKKDWDPKKYGGFDSPTVAYSVLVVAKVEKGKSKKLKSVKELLGITIMERSSFEKNPIDFLEAKGYKEVKKDLIIKLPKYSLFELENGRKRMLASAGELQKGNELALPSKYVNFLYLASHYEKLKGSPEDNEQKQLFVEQHKHYLDEIIEQISEFSKRVILADANLDKVLSAYNKHRDKPIREQAENIIHLFTLTNLGAPAAFKYFDTTIDRKRYTSTKEVLDATLIHQSITGLYETRIDLSQLGGDGGEAAAKGGSGSSGGTLNIEDEYRLHETSKEPDVSLGSTWLSDFPQAWAETGGMGLAVRQAPLIIPLKATSTPVSIKQYPMSQEARLGIKPHIQRLLDQGILVPCQSPWNTPLLPVKKPGTNDYRPVQDLREVNKRVEDIHPTVPNPYNLLSGLPPSHQWYTVLDLKDAFFCLRLHPTSQPLFAFEWRDPEMGISGQLTWTRLPQGFKNSPTLFNEALHRDLAGFRIQHPDLILLQYVDDLLLAATSELDCQQGTRALLQTLGDLGYRASAKKAQICQKQVKYLGYLLKEGQRWLTEARKETVMGQPIPKTPRQLREFLGTAGFCRLWIPGFAEMAAPLYPLTKPGTLFNWGPDQQKAFQEIKQALLTAPALGLPDLTKPFELFVDEKQGYAKGVLTQKLGPWRRPVAYLSKKLDPVAAGWPPCLRMVAAIAVLTKDAGKLTMGQPLVILAPHAVEALVKQPPDRWLSNARMTHYQALLLDTDRVQFGPVVALNPATLLPLPEEGLQHDCLDILAEAHGTRSDLMDQPLPDADHTWYTDGSSFLQEGQRKAGAAVTTETEVIWARALPAGTSAQRAELIALTQALKMAEGKKLNVYTDSRYAFATAHIHGEIYRRRGWLTSEGKEIKNKDEILALLKALFLPKRLSIIHCPGHQKGNSAEARGNRMADQAAREVATRETPETSTLLAGKRTADGSEFEKRTADGSEFESPKKKAKVE

SEQ ID NO: 2240 - protein, 2100 aa, synthetic construct
MPAAKRVKLDGGDKKYSIGLDIGTNSVGWAVITDEYKVPSKKFKVLGNTDRHSIKKNLIGALLFDSGETAEATRLKRTARRRYTRRKNRICYLQEIFSNEMAKVDDSFFHRLEESFLVEEDKKHERHPIFGNIVDEVAYHEKYPTIYHLRKKLVDSTDKADLRLIYLALAHMIKFRGHFLIEGDLNPDNSDVDKLFIQLVQTYNQLFEENPINASGVDAKAILSARLSKSRRLENLIAQLPGEKKNGLFGNLIALSLGLTPNFKSNFDLAEDAKLQLSKDTYDDDLDNLLAQIGDQYADLFLAAKNLSDAILLSDILRVNTEITKAPLSASMIKRYDEHHQDLTLLKALVRQQLPEKYKEIFFDQSKNGYAGYIDGGASQEEFYKFIKPILEKMDGTEELLVKLNREDLLRKQRTFDNGSIPHQIHLGELHAILRRQEDFYPFLKDNREKIEKILTFRIPYYVGPLARGNSRFAWMTRKSEETITPWNFEEVVDKGASAQSFIERMTNFDKNLPNEKVLPKHSLLYEYFTVYNELTKVKYVTEGMRKPAFLSGEQKKAIVDLLFKTNRKVTVKQLKEDYFKKIECFDSVEISGVEDRFNASLGTYHDLLKIIKDKDFLDNEENEDILEDIVLTLTLFEDREMIEERLKTYAHLFDDKVMKQLKRRRYTGWGRLSRKLINGIRDKQSGKTILDFLKSDGFANRNFMQLIHDDSLTFKEDIQKAQVSGQGDSLHEHIANLAGSPAIKKGILQTVKVVDELVKVMGRHKPENIVIEMARENQTTQKGQKNSRERMKRIEEGIKELGSQILKEHPVENTQLQNEKLYLYYLQNGRDMYVDQELDINRLSDYDVDHIVPQSFLKDDSIDNKVLTRSDKARGKSDNVPSEEVVKKMKNYWRQLLNAKLITQRKFDNLTKAERGGLSELDKAGFIKRQLVETRQITKHVAQILDSRMNTKYDENDKLIREVKVITLKSKLVSDFRKDFQFYKVREINNYHHAHDAYLNAVVGTALIKKYPKLESEFVYGDYKVYDVRKMIAKSEQEIGKATAKYFFYSNIMNFFKTEITLANGEIRKRPLIETNGETGEIVWDKGRDFATVRKVLSMPQVNIVKKTEVQTGGFSKESILPKRNSDKLIARKKDWDPKKYGGFDSPTVAYSVLVVAKVEKGKSKKLKSVKELLGITIMERSSFEKNPIDFLEAKGYKEVKKDLIIKLPKYSLFELENGRKRMLASAGELQKGNELALPSKYVNFLYLASHYEKLKGSPEDNEQKQLFVEQHKHYLDEIIEQISEFSKRVILADANLDKVLSAYNKHRDKPIREQAENIIHLFTLTNLGAPAAFKYFDTTIDRKRYTSTKEVLDATLIHQSITGLYETRIDLSQLGGDGGGGGGSGGGGSGGGGSGGTLNIEDEYRLHETSKEPDVSLGSTWLSDFPQAWAETGGMGLAVRQAPLIIPLKATSTPVSIKQYPMSQEARLGIKPHIQRLLDQGILVPCQSPWNTPLLPVKKPGTNDYRPVQDLREVNKRVEDIHPTVPNPYNLLSGLPPSHQWYTVLDLKDAFFCLRLHPTSQPLFAFEWRDPEMGISGQLTWTRLPQGFKNSPTLFNEALHRDLAGFRIQHPDLILLQYVDDLLLAATSELDCQQGTRALLQTLGDLGYRASAKKAQICQKQVKYLGYLLKEGQRWLTEARKETVMGQPIPKTPRQLREFLGTAGFCRLWIPGFAEMAAPLYPLTKPGTLFNWGPDQQKAFQEIKQALLTAPALGLPDLTKPFELFVDEKQGYAKGVLTQKLGPWRRPVAYLSKKLDPVAAGWPPCLRMVAAIAVLTKDAGKLTMGQPLVILAPHAVEALVKQPPDRWLSNARMTHYQALLLDTDRVQFGPVVALNPATLLPLPEEGLQHDCLDILAEAHGTRSDLMDQPLPDADHTWYTDGSSFLQEGQRKAGAAVTTETEVIWARALPAGTSAQRAELIALTQALKMAEGKKLNVYTDSRYAFATAHIHGEIYRRRGWLTSEGKEIKNKDEILALLKALFLPKRLSIIHCPGHQKGNSAEARGNRMADQAAREVATRETPETSTLLAGKRTADGSEFEKRTADGSEFESPKKKAKVE

SEQ ID NO: 2241 - protein, 2093 aa, synthetic construct
MPAAKRVKLDGGDKKYSIGLDIGTNSVGWAVITDEYKVPSKKFKVLGNTDRHSIKKNLIGALLFDSGETAEATRLKRTARRRYTRRKNRICYLQEIFSNEMAKVDDSFFHRLEESFLVEEDKKHERHPIFGNIVDEVAYHEKYPTIYHLRKKLVDSTDKADLRLIYLALAHMIKFRGHFLIEGDLNPDNSDVDKLFIQLVQTYNQLFEENPINASGVDAKAILSARLSKSRRLENLIAQLPGEKKNGLFGNLIALSLGLTPNFKSNFDLAEDAKLQLSKDTYDDDLDNLLAQIGDQYADLFLAAKNLSDAILLSDILRVNTEITKAPLSASMIKRYDEHHQDLTLLKALVRQQLPEKYKEIFFDQSKNGYAGYIDGGASQEEFYKFIKPILEKMDGTEELLVKLNREDLLRKQRTFDNGSIPHQIHLGELHAILRRQEDFYPFLKDNREKIEKILTFRIPYYVGPLARGNSRFAWMTRKSEETITPWNFEEVVDKGASAQSFIERMTNFDKNLPNEKVLPKHSLLYEYFTVYNELTKVKYVTEGMRKPAFLSGEQKKAIVDLLFKTNRKVTVKQLKEDYFKKIECFDSVEISGVEDRFNASLGTYHDLLKIIKDKDFLDNEENEDILEDIVLTLTLFEDREMIEERLKTYAHLFDDKVMKQLKRRRYTGWGRLSRKLINGIRDKQSGKTILDFLKSDGFANRNFMQLIHDDSLTFKEDIQKAQVSGQGDSLHEHIANLAGSPAIKKGILQTVKVVDELVKVMGRHKPENIVIEMARENQTTQKGQKNSRERMKRIEEGIKELGSQILKEHPVENTQLQNEKLYLYYLQNGRDMYVDQELDINRLSDYDVDHIVPQSFLKDDSIDNKVLTRSDKARGKSDNVPSEEVVKKMKNYWRQLLNAKLITQRKFDNLTKAERGGLSELDKAGFIKRQLVETRQITKHVAQILDSRMNTKYDENDKLIREVKVITLKSKLVSDFRKDFQFYKVREINNYHHAHDAYLNAVVGTALIKKYPKLESEFVYGDYKVYDVRKMIAKSEQEIGKATAKYFFYSNIMNFFKTEITLANGEIRKRPLIETNGETGEIVWDKGRDFATVRKVLSMPQVNIVKKTEVQTGGFSKESILPKRNSDKLIARKKDWDPKKYGGFDSPTVAYSVLVVAKVEKGKSKKLKSVKELLGITIMERSSFEKNPIDFLEAKGYKEVKKDLIIKLPKYSLFELENGRKRMLASAGELQKGNELALPSKYVNFLYLASHYEKLKGSPEDNEQKQLFVEQHKHYLDEIIEQISEFSKRVILADANLDKVLSAYNKHRDKPIREQAENIIHLFTLTNLGAPAAFKYFDTTIDRKRYTSTKEVLDATLIHQSITGLYETRIDLSQLGGDGGGGGEAAAKGGTLNIEDEYRLHETSKEPDVSLGSTWLSDFPQAWAETGGMGLAVRQAPLIIPLKATSTPVSIKQYPMSQEARLGIKPHIQRLLDQGILVPCQSPWNTPLLPVKKPGTNDYRPVQDLREVNKRVEDIHPTVPNPYNLLSGLPPSHQWYTVLDLKDAFFCLRLHPTSQPLFAFEWRDPEMGISGQLTWTRLPQGFKNSPTLFNEALHRDLAGFRIQHPDLILLQYVDDLLLAATSELDCQQGTRALLQTLGDLGYRASAKKAQICQKQVKYLGYLLKEGQRWLTEARKETVMGQPIPKTPRQLREFLGTAGFCRLWIPGFAEMAAPLYPLTKPGTLFNWGPDQQKAFQEIKQALLTAPALGLPDLTKPFELFVDEKQGYAKGVLTQKLGPWRRPVAYLSKKLDPVAAGWPPCLRMVAAIAVLTKDAGKLTMGQPLVILAPHAVEALVKQPPDRWLSNARMTHYQALLLDTDRVQFGPVVALNPATLLPLPEEGLQHDCLDILAEAHGTRSDLMDQPLPDADHTWYTDGSSFLQEGQRKAGAAVTTETEVIWARALPAGTSAQRAELIALTQALKMAEGKKLNVYTDSRYAFATAHIHGEIYRRRGWLTSEGKEIKNKDEILALLKALFLPKRLSIIHCPGHQKGNSAEARGNRMADQAAREVATRETPETSTLLAGKRTADGSEFEKRTADGSEFESPKKKAKVE

SEQ ID NO: 2242 - protein, 2088 aa, synthetic construct
MPAAKRVKLDGGDKKYSIGLDIGTNSVGWAVITDEYKVPSKKFKVLGNTDRHSIKKNLIGALLFDSGETAEATRLKRTARRRYTRRKNRICYLQEIFSNEMAKVDDSFFHRLEESFLVEEDKKHERHPIFGNIVDEVAYHEKYPTIYHLRKKLVDSTDKADLRLIYLALAHMIKFRGHFLIEGDLNPDNSDVDKLFIQLVQTYNQLFEENPINASGVDAKAILSARLSKSRRLENLIAQLPGEKKNGLFGNLIALSLGLTPNFKSNFDLAEDAKLQLSKDTYDDDLDNLLAQIGDQYADLFLAAKNLSDAILLSDILRVNTEITKAPLSASMIKRYDEHHQDLTLLKALVRQQLPEKYKEIFFDQSKNGYAGYIDGGASQEEFYKFIKPILEKMDGTEELLVKLNREDLLRKQRTFDNGSIPHQIHLGELHAILRRQEDFYPFLKDNREKIEKILTFRIPYYVGPLARGNSRFAWMTRKSEETITPWNFEEVVDKGASAQSFIERMTNFDKNLPNEKVLPKHSLLYEYFTVYNELTKVKYVTEGMRKPAFLSGEQKKAIVDLLFKTNRKVTVKQLKEDYFKKIECFDSVEISGVEDRFNASLGTYHDLLKIIKDKDFLDNEENEDILEDIVLTLTLFEDREMIEERLKTYAHLFDDKVMKQLKRRRYTGWGRLSRKLINGIRDKQSGKTILDFLKSDGFANRNFMQLIHDDSLTFKEDIQKAQVSGQGDSLHEHIANLAGSPAIKKGILQTVKVVDELVKVMGRHKPENIVIEMARENQTTQKGQKNSRERMKRIEEGIKELGSQILKEHPVENTQLQNEKLYLYYLQNGRDMYVDQELDINRLSDYDVDHIVPQSFLKDDSIDNKVLTRSDKARGKSDNVPSEEVVKKMKNYWRQLLNAKLITQRKFDNLTKAERGGLSELDKAGFIKRQLVETRQITKHVAQILDSRMNTKYDENDKLIREVKVITLKSKLVSDFRKDFQFYKVREINNYHHAHDAYLNAVVGTALIKKYPKLESEFVYGDYKVYDVRKMIAKSEQEIGKATAKYFFYSNIMNFFKTEITLANGEIRKRPLIETNGETGEIVWDKGRDFATVRKVLSMPQVNIVKKTEVQTGGFSKESILPKRNSDKLIARKKDWDPKKYGGFDSPTVAYSVLVVAKVEKGKSKKLKSVKELLGITIMERSSFEKNPIDFLEAKGYKEVKKDLIIKLPKYSLFELENGRKRMLASAGELQKGNELALPSKYVNFLYLASHYEKLKGSPEDNEQKQLFVEQHKHYLDEIIEQISEFSKRVILADANLDKVLSAYNKHRDKPIREQAENIIHLFTLTNLGAPAAFKYFDTTIDRKRYTSTKEVLDATLIHQSITGLYETRIDLSQLGGDGGGSSGGTLNIEDEYRLHETSKEPDVSLGSTWLSDFPQAWAETGGMGLAVRQAPLIIPLKATSTPVSIKQYPMSQEARLGIKPHIQRLLDQGILVPCQSPWNTPLLPVKKPGTNDYRPVQDLREVNKRVEDIHPTVPNPYNLLSGLPPSHQWYTVLDLKDAFFCLRLHPTSQPLFAFEWRDPEMGISGQLTWTRLPQGFKNSPTLFNEALHRDLAGFRIQHPDLILLQYVDDLLLAATSELDCQQGTRALLQTLGDLGYRASAKKAQICQKQVKYLGYLLKEGQRWLTEARKETVMGQPIPKTPRQLREFLGTAGFCRLWIPGFAEMAAPLYPLTKPGTLFNWGPDQQKAFQEIKQALLTAPALGLPDLTKPFELFVDEKQGYAKGVLTQKLGPWRRPVAYLSKKLDPVAAGWPPCLRMVAAIAVLTKDAGKLTMGQPLVILAPHAVEALVKQPPDRWLSNARMTHYQALLLDTDRVQFGPVVALNPATLLPLPEEGLQHDCLDILAEAHGTRSDLMDQPLPDADHTWYTDGSSFLQEGQRKAGAAVTTETEVIWARALPAGTSAQRAELIALTQALKMAEGKKLNVYTDSRYAFATAHIHGEIYRRRGWLTSEGKEIKNKDEILALLKALFLPKRLSIIHCPGHQKGNSAEARGNRMADQAAREVATRETPETSTLLAGKRTADGSEFEKRTADGSEFESPKKKAKVE

SEQ ID NO: 2243 - protein, 2090 aa, synthetic construct
MPAAKRVKLDGGDKKYSIGLDIGTNSVGWAVITDEYKVPSKKFKVLGNTDRHSIKKNLIGALLFDSGETAEATRLKRTARRRYTRRKNRICYLQEIFSNEMAKVDDSFFHRLEESFLVEEDKKHERHPIFGNIVDEVAYHEKYPTIYHLRKKLVDSTDKADLRLIYLALAHMIKFRGHFLIEGDLNPDNSDVDKLFIQLVQTYNQLFEENPINASGVDAKAILSARLSKSRRLENLIAQLPGEKKNGLFGNLIALSLGLTPNFKSNFDLAEDAKLQLSKDTYDDDLDNLLAQIGDQYADLFLAAKNLSDAILLSDILRVNTEITKAPLSASMIKRYDEHHQDLTLLKALVRQQLPEKYKEIFFDQSKNGYAGYIDGGASQEEFYKFIKPILEKMDGTEELLVKLNREDLLRKQRTFDNGSIPHQIHLGELHAILRRQEDFYPFLKDNREKIEKILTFRIPYYVGPLARGNSRFAWMTRKSEETITPWNFEEVVDKGASAQSFIERMTNFDKNLPNEKVLPKHSLLYEYFTVYNELTKVKYVTEGMRKPAFLSGEQKKAIVDLLFKTNRKVTVKQLKEDYFKKIECFDSVEISGVEDRFNASLGTYHDLLKIIKDKDFLDNEENEDILEDIVLTLTLFEDREMIEERLKTYAHLFDDKVMKQLKRRRYTGWGRLSRKLINGIRDKQSGKTILDFLKSDGFANRNFMQLIHDDSLTFKEDIQKAQVSGQGDSLHEHIANLAGSPAIKKGILQTVKVVDELVKVMGRHKPENIVIEMARENQTTQKGQKNSRERMKRIEEGIKELGSQILKEHPVENTQLQNEKLYLYYLQNGRDMYVDQELDINRLSDYDVDHIVPQSFLKDDSIDNKVLTRSDKARGKSDNVPSEEVVKKMKNYWRQLLNAKLITQRKFDNLTKAERGGLSELDKAGFIKRQLVETRQITKHVAQILDSRMNTKYDENDKLIREVKVITLKSKLVSDFRKDFQFYKVREINNYHHAHDAYLNAVVGTALIKKYPKLESEFVYGDYKVYDVRKMIAKSEQEIGKATAKYFFYSNIMNFFKTEITLANGEIRKRPLIETNGETGEIVWDKGRDFATVRKVLSMPQVNIVKKTEVQTGGFSKESILPKRNSDKLIARKKDWDPKKYGGFDSPTVAYSVLVVAKVEKGKSKKLKSVKELLGITIMERSSFEKNPIDFLEAKGYKEVKKDLIIKLPKYSLFELENGRKRMLASAGELQKGNELALPSKYVNFLYLASHYEKLKGSPEDNEQKQLFVEQHKHYLDEIIEQISEFSKRVILADANLDKVLSAYNKHRDKPIREQAENIIHLFTLTNLGAPAAFKYFDTTIDRKRYTSTKEVLDATLIHQSITGLYETRIDLSQLGGDGGPAPAPGGTLNIEDEYRLHETSKEPDVSLGSTWLSDFPQAWAETGGMGLAVRQAPLIIPLKATSTPVSIKQYPMSQEARLGIKPHIQRLLDQGILVPCQSPWNTPLLPVKKPGTNDYRPVQDLREVNKRVEDIHPTVPNPYNLLSGLPPSHQWYTVLDLKDAFFCLRLHPTSQPLFAFEWRDPEMGISGQLTWTRLPQGFKNSPTLFNEALHRDLAGFRIQHPDLILLQYVDDLLLAATSELDCQQGTRALLQTLGDLGYRASAKKAQICQKQVKYLGYLLKEGQRWLTEARKETVMGQPIPKTPRQLREFLGTAGFCRLWIPGFAEMAAPLYPLTKPGTLFNWGPDQQKAFQEIKQALLTAPALGLPDLTKPFELFVDEKQGYAKGVLTQKLGPWRRPVAYLSKKLDPVAAGWPPCLRMVAAIAVLTKDAGKLTMGQPLVILAPHAVEALVKQPPDRWLSNARMTHYQALLLDTDRVQFGPVVALNPATLLPLPEEGLQHDCLDILAEAHGTRSDLMDQPLPDADHTWYTDGSSFLQEGQRKAGAAVTTETEVIWARALPAGTSAQRAELIALTQALKMAEGKKLNVYTDSRYAFATAHIHGEIYRRRGWLTSEGKEIKNKDEILALLKALFLPKRLSIIHCPGHQKGNSAEARGNRMADQAAREVATRETPETSTLLAGKRTADGSEFEKRTADGSEFESPKKKAKVE

SEQ ID NO: 2244 - protein, 2096 aa, synthetic construct
MPAAKRVKLDGGDKKYSIGLDIGTNSVGWAVITDEYKVPSKKFKVLGNTDRHSIKKNLIGALLFDSGETAEATRLKRTARRRYTRRKNRICYLQEIFSNEMAKVDDSFFHRLEESFLVEEDKKHERHPIFGNIVDEVAYHEKYPTIYHLRKKLVDSTDKADLRLIYLALAHMIKFRGHFLIEGDLNPDNSDVDKLFIQLVQTYNQLFEENPINASGVDAKAILSARLSKSRRLENLIAQLPGEKKNGLFGNLIALSLGLTPNFKSNFDLAEDAKLQLSKDTYDDDLDNLLAQIGDQYADLFLAAKNLSDAILLSDILRVNTEITKAPLSASMIKRYDEHHQDLTLLKALVRQQLPEKYKEIFFDQSKNGYAGYIDGGASQEEFYKFIKPILEKMDGTEELLVKLNREDLLRKQRTFDNGSIPHQIHLGELHAILRRQEDFYPFLKDNREKIEKILTFRIPYYVGPLARGNSRFAWMTRKSEETITPWNFEEVVDKGASAQSFIERMTNFDKNLPNEKVLPKHSLLYEYFTVYNELTKVKYVTEGMRKPAFLSGEQKKAIVDLLFKTNRKVTVKQLKEDYFKKIECFDSVEISGVEDRFNASLGTYHDLLKIIKDKDFLDNEENEDILEDIVLTLTLFEDREMIEERLKTYAHLFDDKVMKQLKRRRYTGWGRLSRKLINGIRDKQSGKTILDFLKSDGFANRNFMQLIHDDSLTFKEDIQKAQVSGQGDSLHEHIANLAGSPAIKKGILQTVKVVDELVKVMGRHKPENIVIEMARENQTTQKGQKNSRERMKRIEEGIKELGSQILKEHPVENTQLQNEKLYLYYLQNGRDMYVDQELDINRLSDYDVDHIVPQSFLKDDSIDNKVLTRSDKARGKSDNVPSEEVVKKMKNYWRQLLNAKLITQRKFDNLTKAERGGLSELDKAGFIKRQLVETRQITKHVAQILDSRMNTKYDENDKLIREVKVITLKSKLVSDFRKDFQFYKVREINNYHHAHDAYLNAVVGTALIKKYPKLESEFVYGDYKVYDVRKMIAKSEQEIGKATAKYFFYSNIMNFFKTEITLANGEIRKRPLIETNGETGEIVWDKGRDFATVRKVLSMPQVNIVKKTEVQTGGFSKESILPKRNSDKLIARKKDWDPKKYGGFDSPTVAYSVLVVAKVEKGKSKKLKSVKELLGITIMERSSFEKNPIDFLEAKGYKEVKKDLIIKLPKYSLFELENGRKRMLASAGELQKGNELALPSKYVNFLYLASHYEKLKGSPEDNEQKQLFVEQHKHYLDEIIEQISEFSKRVILADANLDKVLSAYNKHRDKPIREQAENIIHLFTLTNLGAPAAFKYFDTTIDRKRYTSTKEVLDATLIHQSITGLYETRIDLSQLGGDGGGSSEAAAKGGSGGTLNIEDEYRLHETSKEPDVSLGSTWLSDFPQAWAETGGMGLAVRQAPLIIPLKATSTPVSIKQYPMSQEARLGIKPHIQRLLDQGILVPCQSPWNTPLLPVKKPGTNDYRPVQDLREVNKRVEDIHPTVPNPYNLLSGLPPSHQWYTVLDLKDAFFCLRLHPTSQPLFAFEWRDPEMGISGQLTWTRLPQGFKNSPTLFNEALHRDLAGFRIQHPDLILLQYVDDLLLAATSELDCQQGTRALLQTLGDLGYRASAKKAQICQKQVKYLGYLLKEGQRWLTEARKETVMGQPIPKTPRQLREFLGTAGFCRLWIPGFAEMAAPLYPLTKPGTLFNWGPDQQKAFQEIKQALLTAPALGLPDLTKPFELFVDEKQGYAKGVLTQKLGPWRRPVAYLSKKLDPVAAGWPPCLRMVAAIAVLTKDAGKLTMGQPLVILAPHAVEALVKQPPDRWLSNARMTHYQALLLDTDRVQFGPVVALNPATLLPLPEEGLQHDCLDILAEAHGTRSDLMDQPLPDADHTWYTDGSSFLQEGQRKAGAAVTTETEVIWARALPAGTSAQRAELIALTQALKMAEGKKLNVYTDSRYAFATAHIHGEIYRRRGWLTSEGKEIKNKDEILALLKALFLPKRLSIIHCPGHQKGNSAEARGNRMADQAAREVATRETPETSTLLAGKRTADGSEFEKRTADGSEFESPKKKAKVE

SEQ ID NO: 2245 - protein, 2091 aa, synthetic construct
MPAAKRVKLDGGDKKYSIGLDIGTNSVGWAVITDEYKVPSKKFKVLGNTDRHSIKKNLIGALLFDSGETAEATRLKRTARRRYTRRKNRICYLQEIFSNEMAKVDDSFFHRLEESFLVEEDKKHERHPIFGNIVDEVAYHEKYPTIYHLRKKLVDSTDKADLRLIYLALAHMIKFRGHFLIEGDLNPDNSDVDKLFIQLVQTYNQLFEENPINASGVDAKAILSARLSKSRRLENLIAQLPGEKKNGLFGNLIALSLGLTPNFKSNFDLAEDAKLQLSKDTYDDDLDNLLAQIGDQYADLFLAAKNLSDAILLSDILRVNTEITKAPLSASMIKRYDEHHQDLTLLKALVRQQLPEKYKEIFFDQSKNGYAGYIDGGASQEEFYKFIKPILEKMDGTEELLVKLNREDLLRKQRTFDNGSIPHQIHLGELHAILRRQEDFYPFLKDNREKIEKILTFRIPYYVGPLARGNSRFAWMTRKSEETITPWNFEEVVDKGASAQSFIERMTNFDKNLPNEKVLPKHSLLYEYFTVYNELTKVKYVTEGMRKPAFLSGEQKKAIVDLLFKTNRKVTVKQLKEDYFKKIECFDSVEISGVEDRFNASLGTYHDLLKIIKDKDFLDNEENEDILEDIVLTLTLFEDREMIEERLKTYAHLFDDKVMKQLKRRRYTGWGRLSRKLINGIRDKQSGKTILDFLKSDGFANRNFMQLIHDDSLTFKEDIQKAQVSGQGDSLHEHIANLAGSPAIKKGILQTVKVVDELVKVMGRHKPENIVIEMARENQTTQKGQKNSRERMKRIEEGIKELGSQILKEHPVENTQLQNEKLYLYYLQNGRDMYVDQELDINRLSDYDVDHIVPQSFLKDDSIDNKVLTRSDKARGKSDNVPSEEVVKKMKNYWRQLLNAKLITQRKFDNLTKAERGGLSELDKAGFIKRQLVETRQITKHVAQILDSRMNTKYDENDKLIREVKVITLKSKLVSDFRKDFQFYKVREINNYHHAHDAYLNAVVGTALIKKYPKLESEFVYGDYKVYDVRKMIAKSEQEIGKATAKYFFYSNIMNFFKTEITLANGEIRKRPLIETNGETGEIVWDKGRDFATVRKVLSMPQVNIVKKTEVQTGGFSKESILPKRNSDKLIARKKDWDPKKYGGFDSPTVAYSVLVVAKVEKGKSKKLKSVKELLGITIMERSSFEKNPIDFLEAKGYKEVKKDLIIKLPKYSLFELENGRKRMLASAGELQKGNELALPSKYVNFLYLASHYEKLKGSPEDNEQKQLFVEQHKHYLDEIIEQISEFSKRVILADANLDKVLSAYNKHRDKPIREQAENIIHLFTLTNLGAPAAFKYFDTTIDRKRYTSTKEVLDATLIHQSITGLYETRIDLSQLGGDGGPAPGGSGGTLNIEDEYRLHETSKEPDVSLGSTWLSDFPQAWAETGGMGLAVRQAPLIIPLKATSTPVSIKQYPMSQEARLGIKPHIQRLLDQGILVPCQSPWNTPLLPVKKPGTNDYRPVQDLREVNKRVEDIHPTVPNPYNLLSGLPPSHQWYTVLDLKDAFFCLRLHPTSQPLFAFEWRDPEMGISGQLTWTRLPQGFKNSPTLFNEALHRDLAGFRIQHPDLILLQYVDDLLLAATSELDCQQGTRALLQTLGDLGYRASAKKAQICQKQVKYLGYLLKEGQRWLTEARKETVMGQPIPKTPRQLREFLGTAGFCRLWIPGFAEMAAPLYPLTKPGTLFNWGPDQQKAFQEIKQALLTAPALGLPDLTKPFELFVDEKQGYAKGVLTQKLGPWRRPVAYLSKKLDPVAAGWPPCLRMVAAIAVLTKDAGKLTMGQPLVILAPHAVEALVKQPPDRWLSNARMTHYQALLLDTDRVQFGPVVALNPATLLPLPEEGLQHDCLDILAEAHGTRSDLMDQPLPDADHTWYTDGSSFLQEGQRKAGAAVTTETEVIWARALPAGTSAQRAELIALTQALKMAEGKKLNVYTDSRYAFATAHIHGEIYRRRGWLTSEGKEIKNKDEILALLKALFLPKRLSIIHCPGHQKGNSAEARGNRMADQAAREVATRETPETSTLLAGKRTADGSEFEKRTADGSEFESPKKKAKVE

SEQ ID NO: 2246 - protein, 2096 aa, synthetic construct
MPAAKRVKLDGGDKKYSIGLDIGTNSVGWAVITDEYKVPSKKFKVLGNTDRHSIKKNLIGALLFDSGETAEATRLKRTARRRYTRRKNRICYLQEIFSNEMAKVDDSFFHRLEESFLVEEDKKHERHPIFGNIVDEVAYHEKYPTIYHLRKKLVDSTDKADLRLIYLALAHMIKFRGHFLIEGDLNPDNSDVDKLFIQLVQTYNQLFEENPINASGVDAKAILSARLSKSRRLENLIAQLPGEKKNGLFGNLIALSLGLTPNFKSNFDLAEDAKLQLSKDTYDDDLDNLLAQIGDQYADLFLAAKNLSDAILLSDILRVNTEITKAPLSASMIKRYDEHHQDLTLLKALVRQQLPEKYKEIFFDQSKNGYAGYIDGGASQEEFYKFIKPILEKMDGTEELLVKLNREDLLRKQRTFDNGSIPHQIHLGELHAILRRQEDFYPFLKDNREKIEKILTFRIPYYVGPLARGNSRFAWMTRKSEETITPWNFEEVVDKGASAQSFIERMTNFDKNLPNEKVLPKHSLLYEYFTVYNELTKVKYVTEGMRKPAFLSGEQKKAIVDLLFKTNRKVTVKQLKEDYFKKIECFDSVEISGVEDRFNASLGTYHDLLKIIKDKDFLDNEENEDILEDIVLTLTLFEDREMIEERLKTYAHLFDDKVMKQLKRRRYTGWGRLSRKLINGIRDKQSGKTILDFLKSDGFANRNFMQLIHDDSLTFKEDIQKAQVSGQGDSLHEHIANLAGSPAIKKGILQTVKVVDELVKVMGRHKPENIVIEMARENQTTQKGQKNSRERMKRIEEGIKELGSQILKEHPVENTQLQNEKLYLYYLQNGRDMYVDQELDINRLSDYDVDHIVPQSFLKDDSIDNKVLTRSDKARGKSDNVPSEEVVKKMKNYWRQLLNAKLITQRKFDNLTKAERGGLSELDKAGFIKRQLVETRQITKHVAQILDSRMNTKYDENDKLIREVKVITLKSKLVSDFRKDFQFYKVREINNYHHAHDAYLNAVVGTALIKKYPKLESEFVYGDYKVYDVRKMIAKSEQEIGKATAKYFFYSNIMNFFKTEITLANGEIRKRPLIETNGETGEIVWDKGRDFATVRKVLSMPQVNIVKKTEVQTGGFSKESILPKRNSDKLIARKKDWDPKKYGGFDSPTVAYSVLVVAKVEKGKSKKLKSVKELLGITIMERSSFEKNPIDFLEAKGYKEVKKDLIIKLPKYSLFELENGRKRMLASAGELQKGNELALPSKYVNFLYLASHYEKLKGSPEDNEQKQLFVEQHKHYLDEIIEQISEFSKRVILADANLDKVLSAYNKHRDKPIREQAENIIHLFTLTNLGAPAAFKYFDTTIDRKRYTSTKEVLDATLIHQSITGLYETRIDLSQLGGDGGGGGGGSEAAAKGGTLNIEDEYRLHETSKEPDVSLGSTWLSDFPQAWAETGGMGLAVRQAPLIIPLKATSTPVSIKQYPMSQEARLGIKPHIQRLLDQGILVPCQSPWNTPLLPVKKPGTNDYRPVQDLREVNKRVEDIHPTVPNPYNLLSGLPPSHQWYTVLDLKDAFFCLRLHPTSQPLFAFEWRDPEMGISGQLTWTRLPQGFKNSPTLFNEALHRDLAGFRIQHPDLILLQYVDDLLLAATSELDCQQGTRALLQTLGDLGYRASAKKAQICQKQVKYLGYLLKEGQRWLTEARKETVMGQPIPKTPRQLREFLGTAGFCRLWIPGFAEMAAPLYPLTKPGTLFNWGPDQQKAFQEIKQALLTAPALGLPDLTKPFELFVDEKQGYAKGVLTQKLGPWRRPVAYLSKKLDPVAAGWPPCLRMVAAIAVLTKDAGKLTMGQPLVILAPHAVEALVKQPPDRWLSNARMTHYQALLLDTDRVQFGPVVALNPATLLPLPEEGLQHDCLDILAEAHGTRSDLMDQPLPDADHTWYTDGSSFLQEGQRKAGAAVTTETEVIWARALPAGTSAQRAELIALTQALKMAEGKKLNVYTDSRYAFATAHIHGEIYRRRGWLTSEGKEIKNKDEILALLKALFLPKRLSIIHCPGHQKGNSAEARGNRMADQAAREVATRETPETSTLLAGKRTADGSEFEKRTADGSEFESPKKKAKVE

SEQ ID NO: 2247 - protein, 2096 aa, synthetic construct
MPAAKRVKLDGGDKKYSIGLDIGTNSVGWAVITDEYKVPSKKFKVLGNTDRHSIKKNLIGALLFDSGETAEATRLKRTARRRYTRRKNRICYLQEIFSNEMAKVDDSFFHRLEESFLVEEDKKHERHPIFGNIVDEVAYHEKYPTIYHLRKKLVDSTDKADLRLIYLALAHMIKFRGHFLIEGDLNPDNSDVDKLFIQLVQTYNQLFEENPINASGVDAKAILSARLSKSRRLENLIAQLPGEKKNGLFGNLIALSLGLTPNFKSNFDLAEDAKLQLSKDTYDDDLDNLLAQIGDQYADLFLAAKNLSDAILLSDILRVNTEITKAPLSASMIKRYDEHHQDLTLLKALVRQQLPEKYKEIFFDQSKNGYAGYIDGGASQEEFYKFIKPILEKMDGTEELLVKLNREDLLRKQRTFDNGSIPHQIHLGELHAILRRQEDFYPFLKDNREKIEKILTFRIPYYVGPLARGNSRFAWMTRKSEETITPWNFEEVVDKGASAQSFIERMTNFDKNLPNEKVLPKHSLLYEYFTVYNELTKVKYVTEGMRKPAFLSGEQKKAIVDLLFKTNRKVTVKQLKEDYFKKIECFDSVEISGVEDRFNASLGTYHDLLKIIKDKDFLDNEENEDILEDIVLTLTLFEDREMIEERLKTYAHLFDDKVMKQLKRRRYTGWGRLSRKLINGIRDKQSGKTILDFLKSDGFANRNFMQLIHDDSLTFKEDIQKAQVSGQGDSLHEHIANLAGSPAIKKGILQTVKVVDELVKVMGRHKPENIVIEMARENQTTQKGQKNSRERMKRIEEGIKELGSQILKEHPVENTQLQNEKLYLYYLQNGRDMYVDQELDINRLSDYDVDHIVPQSFLKDDSIDNKVLTRSDKARGKSDNVPSEEVVKKMKNYWRQLLNAKLITQRKFDNLTKAERGGLSELDKAGFIKRQLVETRQITKHVAQILDSRMNTKYDENDKLIREVKVITLKSKLVSDFRKDFQFYKVREINNYHHAHDAYLNAVVGTALIKKYPKLESEFVYGDYKVYDVRKMIAKSEQEIGKATAKYFFYSNIMNFFKTEITLANGEIRKRPLIETNGETGEIVWDKGRDFATVRKVLSMPQVNIVKKTEVQTGGFSKESILPKRNSDKLIARKKDWDPKKYGGFDSPTVAYSVLVVAKVEKGKSKKLKSVKELLGITIMERSSFEKNPIDFLEAKGYKEVKKDLIIKLPKYSLFELENGRKRMLASAGELQKGNELALPSKYVNFLYLASHYEKLKGSPEDNEQKQLFVEQHKHYLDEIIEQISEFSKRVILADANLDKVLSAYNKHRDKPIREQAENIIHLFTLTNLGAPAAFKYFDTTIDRKRYTSTKEVLDATLIHQSITGLYETRIDLSQLGGDGGPAPAPAPAPAPGGTLNIEDEYRLHETSKEPDVSLGSTWLSDFPQAWAETGGMGLAVRQAPLIIPLKATSTPVSIKQYPMSQEARLGIKPHIQRLLDQGILVPCQSPWNTPLLPVKKPGTNDYRPVQDLREVNKRVEDIHPTVPNPYNLLSGLPPSHQWYTVLDLKDAFFCLRLHPTSQPLFAFEWRDPEMGISGQLTWTRLPQGFKNSPTLFNEALHRDLAGFRIQHPDLILLQYVDDLLLAATSELDCQQGTRALLQTLGDLGYRASAKKAQICQKQVKYLGYLLKEGQRWLTEARKETVMGQPIPKTPRQLREFLGTAGFCRLWIPGFAEMAAPLYPLTKPGTLFNWGPDQQKAFQEIKQALLTAPALGLPDLTKPFELFVDEKQGYAKGVLTQKLGPWRRPVAYLSKKLDPVAAGWPPCLRMVAAIAVLTKDAGKLTMGQPLVILAPHAVEALVKQPPDRWLSNARMTHYQALLLDTDRVQFGPVVALNPATLLPLPEEGLQHDCLDILAEAHGTRSDLMDQPLPDADHTWYTDGSSFLQEGQRKAGAAVTTETEVIWARALPAGTSAQRAELIALTQALKMAEGKKLNVYTDSRYAFATAHIHGEIYRRRGWLTSEGKEIKNKDEILALLKALFLPKRLSIIHCPGHQKGNSAEARGNRMADQAAREVATRETPETSTLLAGKRTADGSEFEKRTADGSEFESPKKKAKVE

SEQ ID NO: 2248 - protein, 2096 aa, synthetic construct
MPAAKRVKLDGGDKKYSIGLDIGTNSVGWAVITDEYKVPSKKFKVLGNTDRHSIKKNLIGALLFDSGETAEATRLKRTARRRYTRRKNRICYLQEIFSNEMAKVDDSFFHRLEESFLVEEDKKHERHPIFGNIVDEVAYHEKYPTIYHLRKKLVDSTDKADLRLIYLALAHMIKFRGHFLIEGDLNPDNSDVDKLFIQLVQTYNQLFEENPINASGVDAKAILSARLSKSRRLENLIAQLPGEKKNGLFGNLIALSLGLTPNFKSNFDLAEDAKLQLSKDTYDDDLDNLLAQIGDQYADLFLAAKNLSDAILLSDILRVNTEITKAPLSASMIKRYDEHHQDLTLLKALVRQQLPEKYKEIFFDQSKNGYAGYIDGGASQEEFYKFIKPILEKMDGTEELLVKLNREDLLRKQRTFDNGSIPHQIHLGELHAILRRQEDFYPFLKDNREKIEKILTFRIPYYVGPLARGNSRFAWMTRKSEETITPWNFEEVVDKGASAQSFIERMTNFDKNLPNEKVLPKHSLLYEYFTVYNELTKVKYVTEGMRKPAFLSGEQKKAIVDLLFKTNRKVTVKQLKEDYFKKIECFDSVEISGVEDRFNASLGTYHDLLKIIKDKDFLDNEENEDILEDIVLTLTLFEDREMIEERLKTYAHLFDDKVMKQLKRRRYTGWGRLSRKLINGIRDKQSGKTILDFLKSDGFANRNFMQLIHDDSLTFKEDIQKAQVSGQGDSLHEHIANLAGSPAIKKGILQTVKVVDELVKVMGRHKPENIVIEMARENQTTQKGQKNSRERMKRIEEGIKELGSQILKEHPVENTQLQNEKLYLYYLQNGRDMYVDQELDINRLSDYDVDHIVPQSFLKDDSIDNKVLTRSDKARGKSDNVPSEEVVKKMKNYWRQLLNAKLITQRKFDNLTKAERGGLSELDKAGFIKRQLVETRQITKHVAQILDSRMNTKYDENDKLIREVKVITLKSKLVSDFRKDFQFYKVREINNYHHAHDAYLNAVVGTALIKKYPKLESEFVYGDYKVYDVRKMIAKSEQEIGKATAKYFFYSNIMNFFKTEITLANGEIRKRPLIETNGETGEIVWDKGRDFATVRKVLSMPQVNIVKKTEVQTGGFSKESILPKRNSDKLIARKKDWDPKKYGGFDSPTVAYSVLVVAKVEKGKSKKLKSVKELLGITIMERSSFEKNPIDFLEAKGYKEVKKDLIIKLPKYSLFELENGRKRMLASAGELQKGNELALPSKYVNFLYLASHYEKLKGSPEDNEQKQLFVEQHKHYLDEIIEQISEFSKRVILADANLDKVLSAYNKHRDKPIREQAENIIHLFTLTNLGAPAAFKYFDTTIDRKRYTSTKEVLDATLIHQSITGLYETRIDLSQLGGDGGPAPGGSEAAAKGGTLNIEDEYRLHETSKEPDVSLGSTWLSDFPQAWAETGGMGLAVRQAPLIIPLKATSTPVSIKQYPMSQEARLGIKPHIQRLLDQGILVPCQSPWNTPLLPVKKPGTNDYRPVQDLREVNKRVEDIHPTVPNPYNLLSGLPPSHQWYTVLDLKDAFFCLRLHPTSQPLFAFEWRDPEMGISGQLTWTRLPQGFKNSPTLFNEALHRDLAGFRIQHPDLILLQYVDDLLLAATSELDCQQGTRALLQTLGDLGYRASAKKAQICQKQVKYLGYLLKEGQRWLTEARKETVMGQPIPKTPRQLREFLGTAGFCRLWIPGFAEMAAPLYPLTKPGTLFNWGPDQQKAFQEIKQALLTAPALGLPDLTKPFELFVDEKQGYAKGVLTQKLGPWRRPVAYLSKKLDPVAAGWPPCLRMVAAIAVLTKDAGKLTMGQPLVILAPHAVEALVKQPPDRWLSNARMTHYQALLLDTDRVQFGPVVALNPATLLPLPEEGLQHDCLDILAEAHGTRSDLMDQPLPDADHTWYTDGSSFLQEGQRKAGAAVTTETEVIWARALPAGTSAQRAELIALTQALKMAEGKKLNVYTDSRYAFATAHIHGEIYRRRGWLTSEGKEIKNKDEILALLKALFLPKRLSIIHCPGHQKGNSAEARGNRMADQAAREVATRETPETSTLLAGKRTADGSEFEKRTADGSEFESPKKKAKVE

SEQ ID NO: 2249 - protein, 2115 aa, synthetic construct
MPAAKRVKLDGGDKKYSIGLDIGTNSVGWAVITDEYKVPSKKFKVLGNTDRHSIKKNLIGALLFDSGETAEATRLKRTARRRYTRRKNRICYLQEIFSNEMAKVDDSFFHRLEESFLVEEDKKHERHPIFGNIVDEVAYHEKYPTIYHLRKKLVDSTDKADLRLIYLALAHMIKFRGHFLIEGDLNPDNSDVDKLFIQLVQTYNQLFEENPINASGVDAKAILSARLSKSRRLENLIAQLPGEKKNGLFGNLIALSLGLTPNFKSNFDLAEDAKLQLSKDTYDDDLDNLLAQIGDQYADLFLAAKNLSDAILLSDILRVNTEITKAPLSASMIKRYDEHHQDLTLLKALVRQQLPEKYKEIFFDQSKNGYAGYIDGGASQEEFYKFIKPILEKMDGTEELLVKLNREDLLRKQRTFDNGSIPHQIHLGELHAILRRQEDFYPFLKDNREKIEKILTFRIPYYVGPLARGNSRFAWMTRKSEETITPWNFEEVVDKGASAQSFIERMTNFDKNLPNEKVLPKHSLLYEYFTVYNELTKVKYVTEGMRKPAFLSGEQKKAIVDLLFKTNRKVTVKQLKEDYFKKIECFDSVEISGVEDRFNASLGTYHDLLKIIKDKDFLDNEENEDILEDIVLTLTLFEDREMIEERLKTYAHLFDDKVMKQLKRRRYTGWGRLSRKLINGIRDKQSGKTILDFLKSDGFANRNFMQLIHDDSLTFKEDIQKAQVSGQGDSLHEHIANLAGSPAIKKGILQTVKVVDELVKVMGRHKPENIVIEMARENQTTQKGQKNSRERMKRIEEGIKELGSQILKEHPVENTQLQNEKLYLYYLQNGRDMYVDQELDINRLSDYDVDHIVPQSFLKDDSIDNKVLTRSDKARGKSDNVPSEEVVKKMKNYWRQLLNAKLITQRKFDNLTKAERGGLSELDKAGFIKRQLVETRQITKHVAQILDSRMNTKYDENDKLIREVKVITLKSKLVSDFRKDFQFYKVREINNYHHAHDAYLNAVVGTALIKKYPKLESEFVYGDYKVYDVRKMIAKSEQEIGKATAKYFFYSNIMNFFKTEITLANGEIRKRPLIETNGETGEIVWDKGRDFATVRKVLSMPQVNIVKKTEVQTGGFSKESILPKRNSDKLIARKKDWDPKKYGGFDSPTVAYSVLVVAKVEKGKSKKLKSVKELLGITIMERSSFEKNPIDFLEAKGYKEVKKDLIIKLPKYSLFELENGRKRMLASAGELQKGNELALPSKYVNFLYLASHYEKLKGSPEDNEQKQLFVEQHKHYLDEIIEQISEFSKRVILADANLDKVLSAYNKHRDKPIREQAENIIHLFTLTNLGAPAAFKYFDTTIDRKRYTSTKEVLDATLIHQSITGLYETRIDLSQLGGDGGEAAAKEAAAKEAAAKEAAAKEAAAKEAAAKGGTLNIEDEYRLHETSKEPDVSLGSTWLSDFPQAWAETGGMGLAVRQAPLIIPLKATSTPVSIKQYPMSQEARLGIKPHIQRLLDQGILVPCQSPWNTPLLPVKKPGTNDYRPVQDLREVNKRVEDIHPTVPNPYNLLSGLPPSHQWYTVLDLKDAFFCLRLHPTSQPLFAFEWRDPEMGISGQLTWTRLPQGFKNSPTLFNEALHRDLAGFRIQHPDLILLQYVDDLLLAATSELDCQQGTRALLQTLGDLGYRASAKKAQICQKQVKYLGYLLKEGQRWLTEARKETVMGQPIPKTPRQLREFLGTAGFCRLWIPGFAEMAAPLYPLTKPGTLFNWGPDQQKAFQEIKQALLTAPALGLPDLTKPFELFVDEKQGYAKGVLTQKLGPWRRPVAYLSKKLDPVAAGWPPCLRMVAAIAVLTKDAGKLTMGQPLVILAPHAVEALVKQPPDRWLSNARMTHYQALLLDTDRVQFGPVVALNPATLLPLPEEGLQHDCLDILAEAHGTRSDLMDQPLPDADHTWYTDGSSFLQEGQRKAGAAVTTETEVIWARALPAGTSAQRAELIALTQALKMAEGKKLNVYTDSRYAFATAHIHGEIYRRRGWLTSEGKEIKNKDEILALLKALFLPKRLSIIHCPGHQKGNSAEARGNRMADQAAREVATRETPETSTLLAGKRTADGSEFEKRTADGSEFESPKKKAKVE

SEQ ID NO: 2250 - protein, 2097 aa, synthetic construct
MPAAKRVKLDGGDKKYSIGLDIGTNSVGWAVITDEYKVPSKKFKVLGNTDRHSIKKNLIGALLFDSGETAEATRLKRTARRRYTRRKNRICYLQEIFSNEMAKVDDSFFHRLEESFLVEEDKKHERHPIFGNIVDEVAYHEKYPTIYHLRKKLVDSTDKADLRLIYLALAHMIKFRGHFLIEGDLNPDNSDVDKLFIQLVQTYNQLFEENPINASGVDAKAILSARLSKSRRLENLIAQLPGEKKNGLFGNLIALSLGLTPNFKSNFDLAEDAKLQLSKDTYDDDLDNLLAQIGDQYADLFLAAKNLSDAILLSDILRVNTEITKAPLSASMIKRYDEHHQDLTLLKALVRQQLPEKYKEIFFDQSKNGYAGYIDGGASQEEFYKFIKPILEKMDGTEELLVKLNREDLLRKQRTFDNGSIPHQIHLGELHAILRRQEDFYPFLKDNREKIEKILTFRIPYYVGPLARGNSRFAWMTRKSEETITPWNFEEVVDKGASAQSFIERMTNFDKNLPNEKVLPKHSLLYEYFTVYNELTKVKYVTEGMRKPAFLSGEQKKAIVDLLFKTNRKVTVKQLKEDYFKKIECFDSVEISGVEDRFNASLGTYHDLLKIIKDKDFLDNEENEDILEDIVLTLTLFEDREMIEERLKTYAHLFDDKVMKQLKRRRYTGWGRLSRKLINGIRDKQSGKTILDFLKSDGFANRNFMQLIHDDSLTFKEDIQKAQVSGQGDSLHEHIANLAGSPAIKKGILQTVKVVDELVKVMGRHKPENIVIEMARENQTTQKGQKNSRERMKRIEEGIKELGSQILKEHPVENTQLQNEKLYLYYLQNGRDMYVDQELDINRLSDYDVDHIVPQSFLKDDSIDNKVLTRSDKARGKSDNVPSEEVVKKMKNYWRQLLNAKLITQRKFDNLTKAERGGLSELDKAGFIKRQLVETRQITKHVAQILDSRMNTKYDENDKLIREVKVITLKSKLVSDFRKDFQFYKVREINNYHHAHDAYLNAVVGTALIKKYPKLESEFVYGDYKVYDVRKMIAKSEQEIGKATAKYFFYSNIMNFFKTEITLANGEIRKRPLIETNGETGEIVWDKGRDFATVRKVLSMPQVNIVKKTEVQTGGFSKESILPKRNSDKLIARKKDWDPKKYGGFDSPTVAYSVLVVAKVEKGKSKKLKSVKELLGITIMERSSFEKNPIDFLEAKGYKEVKKDLIIKLPKYSLFELENGRKRMLASAGELQKGNELALPSKYVNFLYLASHYEKLKGSPEDNEQKQLFVEQHKHYLDEIIEQISEFSKRVILADANLDKVLSAYNKHRDKPIREQAENIIHLFTLTNLGAPAAFKYFDTTIDRKRYTSTKEVLDATLIHQSITGLYETRIDLSQLGGDGGGGSGGSGGSGGSGGTLNIEDEYRLHETSKEPDVSLGSTWLSDFPQAWAETGGMGLAVRQAPLIIPLKATSTPVSIKQYPMSQEARLGIKPHIQRLLDQGILVPCQSPWNTPLLPVKKPGTNDYRPVQDLREVNKRVEDIHPTVPNPYNLLSGLPPSHQWYTVLDLKDAFFCLRLHPTSQPLFAFEWRDPEMGISGQLTWTRLPQGFKNSPTLFNEALHRDLAGFRIQHPDLILLQYVDDLLLAATSELDCQQGTRALLQTLGDLGYRASAKKAQICQKQVKYLGYLLKEGQRWLTEARKETVMGQPIPKTPRQLREFLGTAGFCRLWIPGFAEMAAPLYPLTKPGTLFNWGPDQQKAFQEIKQALLTAPALGLPDLTKPFELFVDEKQGYAKGVLTQKLGPWRRPVAYLSKKLDPVAAGWPPCLRMVAAIAVLTKDAGKLTMGQPLVILAPHAVEALVKQPPDRWLSNARMTHYQALLLDTDRVQFGPVVALNPATLLPLPEEGLQHDCLDILAEAHGTRSDLMDQPLPDADHTWYTDGSSFLQEGQRKAGAAVTTETEVIWARALPAGTSAQRAELIALTQALKMAEGKKLNVYTDSRYAFATAHIHGEIYRRRGWLTSEGKEIKNKDEILALLKALFLPKRLSIIHCPGHQKGNSAEARGNRMADQAAREVATRETPETSTLLAGKRTADGSEFEKRTADGSEFESPKKKAKVE

SEQ ID NO: 2251 - protein, 2096 aa, synthetic construct
MPAAKRVKLDGGDKKYSIGLDIGTNSVGWAVITDEYKVPSKKFKVLGNTDRHSIKKNLIGALLFDSGETAEATRLKRTARRRYTRRKNRICYLQEIFSNEMAKVDDSFFHRLEESFLVEEDKKHERHPIFGNIVDEVAYHEKYPTIYHLRKKLVDSTDKADLRLIYLALAHMIKFRGHFLIEGDLNPDNSDVDKLFIQLVQTYNQLFEENPINASGVDAKAILSARLSKSRRLENLIAQLPGEKKNGLFGNLIALSLGLTPNFKSNFDLAEDAKLQLSKDTYDDDLDNLLAQIGDQYADLFLAAKNLSDAILLSDILRVNTEITKAPLSASMIKRYDEHHQDLTLLKALVRQQLPEKYKEIFFDQSKNGYAGYIDGGASQEEFYKFIKPILEKMDGTEELLVKLNREDLLRKQRTFDNGSIPHQIHLGELHAILRRQEDFYPFLKDNREKIEKILTFRIPYYVGPLARGNSRFAWMTRKSEETITPWNFEEVVDKGASAQSFIERMTNFDKNLPNEKVLPKHSLLYEYFTVYNELTKVKYVTEGMRKPAFLSGEQKKAIVDLLFKTNRKVTVKQLKEDYFKKIECFDSVEISGVEDRFNASLGTYHDLLKIIKDKDFLDNEENEDILEDIVLTLTLFEDREMIEERLKTYAHLFDDKVMKQLKRRRYTGWGRLSRKLINGIRDKQSGKTILDFLKSDGFANRNFMQLIHDDSLTFKEDIQKAQVSGQGDSLHEHIANLAGSPAIKKGILQTVKVVDELVKVMGRHKPENIVIEMARENQTTQKGQKNSRERMKRIEEGIKELGSQILKEHPVENTQLQNEKLYLYYLQNGRDMYVDQELDINRLSDYDVDHIVPQSFLKDDSIDNKVLTRSDKARGKSDNVPSEEVVKKMKNYWRQLLNAKLITQRKFDNLTKAERGGLSELDKAGFIKRQLVETRQITKHVAQILDSRMNTKYDENDKLIREVKVITLKSKLVSDFRKDFQFYKVREINNYHHAHDAYLNAVVGTALIKKYPKLESEFVYGDYKVYDVRKMIAKSEQEIGKATAKYFFYSNIMNFFKTEITLANGEIRKRPLIETNGETGEIVWDKGRDFATVRKVLSMPQVNIVKKTEVQTGGFSKESILPKRNSDKLIARKKDWDPKKYGGFDSPTVAYSVLVVAKVEKGKSKKLKSVKELLGITIMERSSFEKNPIDFLEAKGYKEVKKDLIIKLPKYSLFELENGRKRMLASAGELQKGNELALPSKYVNFLYLASHYEKLKGSPEDNEQKQLFVEQHKHYLDEIIEQISEFSKRVILADANLDKVLSAYNKHRDKPIREQAENIIHLFTLTNLGAPAAFKYFDTTIDRKRYTSTKEVLDATLIHQSITGLYETRIDLSQLGGDGGGGSEAAAKPAPGGTLNIEDEYRLHETSKEPDVSLGSTWLSDFPQAWAETGGMGLAVRQAPLIIPLKATSTPVSIKQYPMSQEARLGIKPHIQRLLDQGILVPCQSPWNTPLLPVKKPGTNDYRPVQDLREVNKRVEDIHPTVPNPYNLLSGLPPSHQWYTVLDLKDAFFCLRLHPTSQPLFAFEWRDPEMGISGQLTWTRLPQGFKNSPTLFNEALHRDLAGFRIQHPDLILLQYVDDLLLAATSELDCQQGTRALLQTLGDLGYRASAKKAQICQKQVKYLGYLLKEGQRWLTEARKETVMGQPIPKTPRQLREFLGTAGFCRLWIPGFAEMAAPLYPLTKPGTLFNWGPDQQKAFQEIKQALLTAPALGLPDLTKPFELFVDEKQGYAKGVLTQKLGPWRRPVAYLSKKLDPVAAGWPPCLRMVAAIAVLTKDAGKLTMGQPLVILAPHAVEALVKQPPDRWLSNARMTHYQALLLDTDRVQFGPVVALNPATLLPLPEEGLQHDCLDILAEAHGTRSDLMDQPLPDADHTWYTDGSSFLQEGQRKAGAAVTTETEVIWARALPAGTSAQRAELIALTQALKMAEGKKLNVYTDSRYAFATAHIHGEIYRRRGWLTSEGKEIKNKDEILALLKALFLPKRLSIIHCPGHQKGNSAEARGNRMADQAAREVATRETPETSTLLAGKRTADGSEFEKRTADGSEFESPKKKAKVE

SEQ ID NO: 2252 - protein, 2100 aa, synthetic construct
MPAAKRVKLDGGDKKYSIGLDIGTNSVGWAVITDEYKVPSKKFKVLGNTDRHSIKKNLIGALLFDSGETAEATRLKRTARRRYTRRKNRICYLQEIFSNEMAKVDDSFFHRLEESFLVEEDKKHERHPIFGNIVDEVAYHEKYPTIYHLRKKLVDSTDKADLRLIYLALAHMIKFRGHFLIEGDLNPDNSDVDKLFIQLVQTYNQLFEENPINASGVDAKAILSARLSKSRRLENLIAQLPGEKKNGLFGNLIALSLGLTPNFKSNFDLAEDAKLQLSKDTYDDDLDNLLAQIGDQYADLFLAAKNLSDAILLSDILRVNTEITKAPLSASMIKRYDEHHQDLTLLKALVRQQLPEKYKEIFFDQSKNGYAGYIDGGASQEEFYKFIKPILEKMDGTEELLVKLNREDLLRKQRTFDNGSIPHQIHLGELHAILRRQEDFYPFLKDNREKIEKILTFRIPYYVGPLARGNSRFAWMTRKSEETITPWNFEEVVDKGASAQSFIERMTNFDKNLPNEKVLPKHSLLYEYFTVYNELTKVKYVTEGMRKPAFLSGEQKKAIVDLLFKTNRKVTVKQLKEDYFKKIECFDSVEISGVEDRFNASLGTYHDLLKIIKDKDFLDNEENEDILEDIVLTLTLFEDREMIEERLKTYAHLFDDKVMKQLKRRRYTGWGRLSRKLINGIRDKQSGKTILDFLKSDGFANRNFMQLIHDDSLTFKEDIQKAQVSGQGDSLHEHIANLAGSPAIKKGILQTVKVVDELVKVMGRHKPENIVIEMARENQTTQKGQKNSRERMKRIEEGIKELGSQILKEHPVENTQLQNEKLYLYYLQNGRDMYVDQELDINRLSDYDVDHIVPQSFLKDDSIDNKVLTRSDKARGKSDNVPSEEVVKKMKNYWRQLLNAKLITQRKFDNLTKAERGGLSELDKAGFIKRQLVETRQITKHVAQILDSRMNTKYDENDKLIREVKVITLKSKLVSDFRKDFQFYKVREINNYHHAHDAYLNAVVGTALIKKYPKLESEFVYGDYKVYDVRKMIAKSEQEIGKATAKYFFYSNIMNFFKTEITLANGEIRKRPLIETNGETGEIVWDKGRDFATVRKVLSMPQVNIVKKTEVQTGGFSKESILPKRNSDKLIARKKDWDPKKYGGFDSPTVAYSVLVVAKVEKGKSKKLKSVKELLGITIMERSSFEKNPIDFLEAKGYKEVKKDLIIKLPKYSLFELENGRKRMLASAGELQKGNELALPSKYVNFLYLASHYEKLKGSPEDNEQKQLFVEQHKHYLDEIIEQISEFSKRVILADANLDKVLSAYNKHRDKPIREQAENIIHLFTLTNLGAPAAFKYFDTTIDRKRYTSTKEVLDATLIHQSITGLYETRIDLSQLGGDGGEAAAKEAAAKEAAAKGGTLNIEDEYRLHETSKEPDVSLGSTWLSDFPQAWAETGGMGLAVRQAPLIIPLKATSTPVSIKQYPMSQEARLGIKPHIQRLLDQGILVPCQSPWNTPLLPVKKPGTNDYRPVQDLREVNKRVEDIHPTVPNPYNLLSGLPPSHQWYTVLDLKDAFFCLRLHPTSQPLFAFEWRDPEMGISGQLTWTRLPQGFKNSPTLFNEALHRDLAGFRIQHPDLILLQYVDDLLLAATSELDCQQGTRALLQTLGDLGYRASAKKAQICQKQVKYLGYLLKEGQRWLTEARKETVMGQPIPKTPRQLREFLGTAGFCRLWIPGFAEMAAPLYPLTKPGTLFNWGPDQQKAFQEIKQALLTAPALGLPDLTKPFELFVDEKQGYAKGVLTQKLGPWRRPVAYLSKKLDPVAAGWPPCLRMVAAIAVLTKDAGKLTMGQPLVILAPHAVEALVKQPPDRWLSNARMTHYQALLLDTDRVQFGPVVALNPATLLPLPEEGLQHDCLDILAEAHGTRSDLMDQPLPDADHTWYTDGSSFLQEGQRKAGAAVTTETEVIWARALPAGTSAQRAELIALTQALKMAEGKKLNVYTDSRYAFATAHIHGEIYRRRGWLTSEGKEIKNKDEILALLKALFLPKRLSIIHCPGHQKGNSAEARGNRMADQAAREVATRETPETSTLLAGKRTADGSEFEKRTADGSEFESPKKKAKVE

SEQ ID NO: 2253 - protein, 2096 aa, synthetic construct
MPAAKRVKLDGGDKKYSIGLDIGTNSVGWAVITDEYKVPSKKFKVLGNTDRHSIKKNLIGALLFDSGETAEATRLKRTARRRYTRRKNRICYLQEIFSNEMAKVDDSFFHRLEESFLVEEDKKHERHPIFGNIVDEVAYHEKYPTIYHLRKKLVDSTDKADLRLIYLALAHMIKFRGHFLIEGDLNPDNSDVDKLFIQLVQTYNQLFEENPINASGVDAKAILSARLSKSRRLENLIAQLPGEKKNGLFGNLIALSLGLTPNFKSNFDLAEDAKLQLSKDTYDDDLDNLLAQIGDQYADLFLAAKNLSDAILLSDILRVNTEITKAPLSASMIKRYDEHHQDLTLLKALVRQQLPEKYKEIFFDQSKNGYAGYIDGGASQEEFYKFIKPILEKMDGTEELLVKLNREDLLRKQRTFDNGSIPHQIHLGELHAILRRQEDFYPFLKDNREKIEKILTFRIPYYVGPLARGNSRFAWMTRKSEETITPWNFEEVVDKGASAQSFIERMTNFDKNLPNEKVLPKHSLLYEYFTVYNELTKVKYVTEGMRKPAFLSGEQKKAIVDLLFKTNRKVTVKQLKEDYFKKIECFDSVEISGVEDRFNASLGTYHDLLKIIKDKDFLDNEENEDILEDIVLTLTLFEDREMIEERLKTYAHLFDDKVMKQLKRRRYTGWGRLSRKLINGIRDKQSGKTILDFLKSDGFANRNFMQLIHDDSLTFKEDIQKAQVSGQGDSLHEHIANLAGSPAIKKGILQTVKVVDELVKVMGRHKPENIVIEMARENQTTQKGQKNSRERMKRIEEGIKELGSQILKEHPVENTQLQNEKLYLYYLQNGRDMYVDQELDINRLSDYDVDHIVPQSFLKDDSIDNKVLTRSDKARGKSDNVPSEEVVKKMKNYWRQLLNAKLITQRKFDNLTKAERGGLSELDKAGFIKRQLVETRQITKHVAQILDSRMNTKYDENDKLIREVKVITLKSKLVSDFRKDFQFYKVREINNYHHAHDAYLNAVVGTALIKKYPKLESEFVYGDYKVYDVRKMIAKSEQEIGKATAKYFFYSNIMNFFKTEITLANGEIRKRPLIETNGETGEIVWDKGRDFATVRKVLSMPQVNIVKKTEVQTGGFSKESILPKRNSDKLIARKKDWDPKKYGGFDSPTVAYSVLVVAKVEKGKSKKLKSVKELLGITIMERSSFEKNPIDFLEAKGYKEVKKDLIIKLPKYSLFELENGRKRMLASAGELQKGNELALPSKYVNFLYLASHYEKLKGSPEDNEQKQLFVEQHKHYLDEIIEQISEFSKRVILADANLDKVLSAYNKHRDKPIREQAENIIHLFTLTNLGAPAAFKYFDTTIDRKRYTSTKEVLDATLIHQSITGLYETRIDLSQLGGDGGPAPEAAAKGSSGGTLNIEDEYRLHETSKEPDVSLGSTWLSDFPQAWAETGGMGLAVRQAPLIIPLKATSTPVSIKQYPMSQEARLGIKPHIQRLLDQGILVPCQSPWNTPLLPVKKPGTNDYRPVQDLREVNKRVEDIHPTVPNPYNLLSGLPPSHQWYTVLDLKDAFFCLRLHPTSQPLFAFEWRDPEMGISGQLTWTRLPQGFKNSPTLFNEALHRDLAGFRIQHPDLILLQYVDDLLLAATSELDCQQGTRALLQTLGDLGYRASAKKAQICQKQVKYLGYLLKEGQRWLTEARKETVMGQPIPKTPRQLREFLGTAGFCRLWIPGFAEMAAPLYPLTKPGTLFNWGPDQQKAFQEIKQALLTAPALGLPDLTKPFELFVDEKQGYAKGVLTQKLGPWRRPVAYLSKKLDPVAAGWPPCLRMVAAIAVLTKDAGKLTMGQPLVILAPHAVEALVKQPPDRWLSNARMTHYQALLLDTDRVQFGPVVALNPATLLPLPEEGLQHDCLDILAEAHGTRSDLMDQPLPDADHTWYTDGSSFLQEGQRKAGAAVTTETEVIWARALPAGTSAQRAELIALTQALKMAEGKKLNVYTDSRYAFATAHIHGEIYRRRGWLTSEGKEIKNKDEILALLKALFLPKRLSIIHCPGHQKGNSAEARGNRMADQAAREVATRETPETSTLLAGKRTADGSEFEKRTADGSEFESPKKKAKVE

SEQ ID NO: 2254 - protein, 2090 aa, synthetic construct
MPAAKRVKLDGGDKKYSIGLDIGTNSVGWAVITDEYKVPSKKFKVLGNTDRHSIKKNLIGALLFDSGETAEATRLKRTARRRYTRRKNRICYLQEIFSNEMAKVDDSFFHRLEESFLVEEDKKHERHPIFGNIVDEVAYHEKYPTIYHLRKKLVDSTDKADLRLIYLALAHMIKFRGHFLIEGDLNPDNSDVDKLFIQLVQTYNQLFEENPINASGVDAKAILSARLSKSRRLENLIAQLPGEKKNGLFGNLIALSLGLTPNFKSNFDLAEDAKLQLSKDTYDDDLDNLLAQIGDQYADLFLAAKNLSDAILLSDILRVNTEITKAPLSASMIKRYDEHHQDLTLLKALVRQQLPEKYKEIFFDQSKNGYAGYIDGGASQEEFYKFIKPILEKMDGTEELLVKLNREDLLRKQRTFDNGSIPHQIHLGELHAILRRQEDFYPFLKDNREKIEKILTFRIPYYVGPLARGNSRFAWMTRKSEETITPWNFEEVVDKGASAQSFIERMTNFDKNLPNEKVLPKHSLLYEYFTVYNELTKVKYVTEGMRKPAFLSGEQKKAIVDLLFKTNRKVTVKQLKEDYFKKIECFDSVEISGVEDRFNASLGTYHDLLKIIKDKDFLDNEENEDILEDIVLTLTLFEDREMIEERLKTYAHLFDDKVMKQLKRRRYTGWGRLSRKLINGIRDKQSGKTILDFLKSDGFANRNFMQLIHDDSLTFKEDIQKAQVSGQGDSLHEHIANLAGSPAIKKGILQTVKVVDELVKVMGRHKPENIVIEMARENQTTQKGQKNSRERMKRIEEGIKELGSQILKEHPVENTQLQNEKLYLYYLQNGRDMYVDQELDINRLSDYDVDHIVPQSFLKDDSIDNKVLTRSDKARGKSDNVPSEEVVKKMKNYWRQLLNAKLITQRKFDNLTKAERGGLSELDKAGFIKRQLVETRQITKHVAQILDSRMNTKYDENDKLIREVKVITLKSKLVSDFRKDFQFYKVREINNYHHAHDAYLNAVVGTALIKKYPKLESEFVYGDYKVYDVRKMIAKSEQEIGKATAKYFFYSNIMNFFKTEITLANGEIRKRPLIETNGETGEIVWDKGRDFATVRKVLSMPQVNIVKKTEVQTGGFSKESILPKRNSDKLIARKKDWDPKKYGGFDSPTVAYSVLVVAKVEKGKSKKLKSVKELLGITIMERSSFEKNPIDFLEAKGYKEVKKDLIIKLPKYSLFELENGRKRMLASAGELQKGNELALPSKYVNFLYLASHYEKLKGSPEDNEQKQLFVEQHKHYLDEIIEQISEFSKRVILADANLDKVLSAYNKHRDKPIREQAENIIHLFTLTNLGAPAAFKYFDTTIDRKRYTSTKEVLDATLIHQSITGLYETRIDLSQLGGDGGGGGGGGGTLNIEDEYRLHETSKEPDVSLGSTWLSDFPQAWAETGGMGLAVRQAPLIIPLKATSTPVSIKQYPMSQEARLGIKPHIQRLLDQGILVPCQSPWNTPLLPVKKPGTNDYRPVQDLREVNKRVEDIHPTVPNPYNLLSGLPPSHQWYTVLDLKDAFFCLRLHPTSQPLFAFEWRDPEMGISGQLTWTRLPQGFKNSPTLFNEALHRDLAGFRIQHPDLILLQYVDDLLLAATSELDCQQGTRALLQTLGDLGYRASAKKAQICQKQVKYLGYLLKEGQRWLTEARKETVMGQPIPKTPRQLREFLGTAGFCRLWIPGFAEMAAPLYPLTKPGTLFNWGPDQQKAFQEIKQALLTAPALGLPDLTKPFELFVDEKQGYAKGVLTQKLGPWRRPVAYLSKKLDPVAAGWPPCLRMVAAIAVLTKDAGKLTMGQPLVILAPHAVEALVKQPPDRWLSNARMTHYQALLLDTDRVQFGPVVALNPATLLPLPEEGLQHDCLDILAEAHGTRSDLMDQPLPDADHTWYTDGSSFLQEGQRKAGAAVTTETEVIWARALPAGTSAQRAELIALTQALKMAEGKKLNVYTDSRYAFATAHIHGEIYRRRGWLTSEGKEIKNKDEILALLKALFLPKRLSIIHCPGHQKGNSAEARGNRMADQAAREVATRETPETSTLLAGKRTADGSEFEKRTADGSEFESPKKKAKVE

SEQ ID NO: 2255 - protein, 2096 aa, synthetic construct
MPAAKRVKLDGGDKKYSIGLDIGTNSVGWAVITDEYKVPSKKFKVLGNTDRHSIKKNLIGALLFDSGETAEATRLKRTARRRYTRRKNRICYLQEIFSNEMAKVDDSFFHRLEESFLVEEDKKHERHPIFGNIVDEVAYHEKYPTIYHLRKKLVDSTDKADLRLIYLALAHMIKFRGHFLIEGDLNPDNSDVDKLFIQLVQTYNQLFEENPINASGVDAKAILSARLSKSRRLENLIAQLPGEKKNGLFGNLIALSLGLTPNFKSNFDLAEDAKLQLSKDTYDDDLDNLLAQIGDQYADLFLAAKNLSDAILLSDILRVNTEITKAPLSASMIKRYDEHHQDLTLLKALVRQQLPEKYKEIFFDQSKNGYAGYIDGGASQEEFYKFIKPILEKMDGTEELLVKLNREDLLRKQRTFDNGSIPHQIHLGELHAILRRQEDFYPFLKDNREKIEKILTFRIPYYVGPLARGNSRFAWMTRKSEETITPWNFEEVVDKGASAQSFIERMTNFDKNLPNEKVLPKHSLLYEYFTVYNELTKVKYVTEGMRKPAFLSGEQKKAIVDLLFKTNRKVTVKQLKEDYFKKIECFDSVEISGVEDRFNASLGTYHDLLKIIKDKDFLDNEENEDILEDIVLTLTLFEDREMIEERLKTYAHLFDDKVMKQLKRRRYTGWGRLSRKLINGIRDKQSGKTILDFLKSDGFANRNFMQLIHDDSLTFKEDIQKAQVSGQGDSLHEHIANLAGSPAIKKGILQTVKVVDELVKVMGRHKPENIVIEMARENQTTQKGQKNSRERMKRIEEGIKELGSQILKEHPVENTQLQNEKLYLYYLQNGRDMYVDQELDINRLSDYDVDHIVPQSFLKDDSIDNKVLTRSDKARGKSDNVPSEEVVKKMKNYWRQLLNAKLITQRKFDNLTKAERGGLSELDKAGFIKRQLVETRQITKHVAQILDSRMNTKYDENDKLIREVKVITLKSKLVSDFRKDFQFYKVREINNYHHAHDAYLNAVVGTALIKKYPKLESEFVYGDYKVYDVRKMIAKSEQEIGKATAKYFFYSNIMNFFKTEITLANGEIRKRPLIETNGETGEIVWDKGRDFATVRKVLSMPQVNIVKKTEVQTGGFSKESILPKRNSDKLIARKKDWDPKKYGGFDSPTVAYSVLVVAKVEKGKSKKLKSVKELLGITIMERSSFEKNPIDFLEAKGYKEVKKDLIIKLPKYSLFELENGRKRMLASAGELQKGNELALPSKYVNFLYLASHYEKLKGSPEDNEQKQLFVEQHKHYLDEIIEQISEFSKRVILADANLDKVLSAYNKHRDKPIREQAENIIHLFTLTNLGAPAAFKYFDTTIDRKRYTSTKEVLDATLIHQSITGLYETRIDLSQLGGDGGEAAAKPAPGSSGGTLNIEDEYRLHETSKEPDVSLGSTWLSDFPQAWAETGGMGLAVRQAPLIIPLKATSTPVSIKQYPMSQEARLGIKPHIQRLLDQGILVPCQSPWNTPLLPVKKPGTNDYRPVQDLREVNKRVEDIHPTVPNPYNLLSGLPPSHQWYTVLDLKDAFFCLRLHPTSQPLFAFEWRDPEMGISGQLTWTRLPQGFKNSPTLFNEALHRDLAGFRIQHPDLILLQYVDDLLLAATSELDCQQGTRALLQTLGDLGYRASAKKAQICQKQVKYLGYLLKEGQRWLTEARKETVMGQPIPKTPRQLREFLGTAGFCRLWIPGFAEMAAPLYPLTKPGTLFNWGPDQQKAFQEIKQALLTAPALGLPDLTKPFELFVDEKQGYAKGVLTQKLGPWRRPVAYLSKKLDPVAAGWPPCLRMVAAIAVLTKDAGKLTMGQPLVILAPHAVEALVKQPPDRWLSNARMTHYQALLLDTDRVQFGPVVALNPATLLPLPEEGLQHDCLDILAEAHGTRSDLMDQPLPDADHTWYTDGSSFLQEGQRKAGAAVTTETEVIWARALPAGTSAQRAELIALTQALKMAEGKKLNVYTDSRYAFATAHIHGEIYRRRGWLTSEGKEIKNKDEILALLKALFLPKRLSIIHCPGHQKGNSAEARGNRMADQAAREVATRETPETSTLLAGKRTADGSEFEKRTADGSEFESPKKKAKVE

SEQ ID NO: 2256 - protein, 2096 aa, synthetic construct
MPAAKRVKLDGGDKKYSIGLDIGTNSVGWAVITDEYKVPSKKFKVLGNTDRHSIKKNLIGALLFDSGETAEATRLKRTARRRYTRRKNRICYLQEIFSNEMAKVDDSFFHRLEESFLVEEDKKHERHPIFGNIVDEVAYHEKYPTIYHLRKKLVDSTDKADLRLIYLALAHMIKFRGHFLIEGDLNPDNSDVDKLFIQLVQTYNQLFEENPINASGVDAKAILSARLSKSRRLENLIAQLPGEKKNGLFGNLIALSLGLTPNFKSNFDLAEDAKLQLSKDTYDDDLDNLLAQIGDQYADLFLAAKNLSDAILLSDILRVNTEITKAPLSASMIKRYDEHHQDLTLLKALVRQQLPEKYKEIFFDQSKNGYAGYIDGGASQEEFYKFIKPILEKMDGTEELLVKLNREDLLRKQRTFDNGSIPHQIHLGELHAILRRQEDFYPFLKDNREKIEKILTFRIPYYVGPLARGNSRFAWMTRKSEETITPWNFEEVVDKGASAQSFIERMTNFDKNLPNEKVLPKHSLLYEYFTVYNELTKVKYVTEGMRKPAFLSGEQKKAIVDLLFKTNRKVTVKQLKEDYFKKIECFDSVEISGVEDRFNASLGTYHDLLKIIKDKDFLDNEENEDILEDIVLTLTLFEDREMIEERLKTYAHLFDDKVMKQLKRRRYTGWGRLSRKLINGIRDKQSGKTILDFLKSDGFANRNFMQLIHDDSLTFKEDIQKAQVSGQGDSLHEHIANLAGSPAIKKGILQTVKVVDELVKVMGRHKPENIVIEMARENQTTQKGQKNSRERMKRIEEGIKELGSQILKEHPVENTQLQNEKLYLYYLQNGRDMYVDQELDINRLSDYDVDHIVPQSFLKDDSIDNKVLTRSDKARGKSDNVPSEEVVKKMKNYWRQLLNAKLITQRKFDNLTKAERGGLSELDKAGFIKRQLVETRQITKHVAQILDSRMNTKYDENDKLIREVKVITLKSKLVSDFRKDFQFYKVREINNYHHAHDAYLNAVVGTALIKKYPKLESEFVYGDYKVYDVRKMIAKSEQEIGKATAKYFFYSNIMNFFKTEITLANGEIRKRPLIETNGETGEIVWDKGRDFATVRKVLSMPQVNIVKKTEVQTGGFSKESILPKRNSDKLIARKKDWDPKKYGGFDSPTVAYSVLVVAKVEKGKSKKLKSVKELLGITIMERSSFEKNPIDFLEAKGYKEVKKDLIIKLPKYSLFELENGRKRMLASAGELQKGNELALPSKYVNFLYLASHYEKLKGSPEDNEQKQLFVEQHKHYLDEIIEQISEFSKRVILADANLDKVLSAYNKHRDKPIREQAENIIHLFTLTNLGAPAAFKYFDTTIDRKRYTSTKEVLDATLIHQSITGLYETRIDLSQLGGDGGEAAAKGGGGGSGGTLNIEDEYRLHETSKEPDVSLGSTWLSDFPQAWAETGGMGLAVRQAPLIIPLKATSTPVSIKQYPMSQEARLGIKPHIQRLLDQGILVPCQSPWNTPLLPVKKPGTNDYRPVQDLREVNKRVEDIHPTVPNPYNLLSGLPPSHQWYTVLDLKDAFFCLRLHPTSQPLFAFEWRDPEMGISGQLTWTRLPQGFKNSPTLFNEALHRDLAGFRIQHPDLILLQYVDDLLLAATSELDCQQGTRALLQTLGDLGYRASAKKAQICQKQVKYLGYLLKEGQRWLTEARKETVMGQPIPKTPRQLREFLGTAGFCRLWIPGFAEMAAPLYPLTKPGTLFNWGPDQQKAFQEIKQALLTAPALGLPDLTKPFELFVDEKQGYAKGVLTQKLGPWRRPVAYLSKKLDPVAAGWPPCLRMVAAIAVLTKDAGKLTMGQPLVILAPHAVEALVKQPPDRWLSNARMTHYQALLLDTDRVQFGPVVALNPATLLPLPEEGLQHDCLDILAEAHGTRSDLMDQPLPDADHTWYTDGSSFLQEGQRKAGAAVTTETEVIWARALPAGTSAQRAELIALTQALKMAEGKKLNVYTDSRYAFATAHIHGEIYRRRGWLTSEGKEIKNKDEILALLKALFLPKRLSIIHCPGHQKGNSAEARGNRMADQAAREVATRETPETSTLLAGKRTADGSEFEKRTADGSEFESPKKKAKVE

SEQ ID NO: 2257 - protein, 2096 aa, synthetic construct
MPAAKRVKLDGGDKKYSIGLDIGTNSVGWAVITDEYKVPSKKFKVLGNTDRHSIKKNLIGALLFDSGETAEATRLKRTARRRYTRRKNRICYLQEIFSNEMAKVDDSFFHRLEESFLVEEDKKHERHPIFGNIVDEVAYHEKYPTIYHLRKKLVDSTDKADLRLIYLALAHMIKFRGHFLIEGDLNPDNSDVDKLFIQLVQTYNQLFEENPINASGVDAKAILSARLSKSRRLENLIAQLPGEKKNGLFGNLIALSLGLTPNFKSNFDLAEDAKLQLSKDTYDDDLDNLLAQIGDQYADLFLAAKNLSDAILLSDILRVNTEITKAPLSASMIKRYDEHHQDLTLLKALVRQQLPEKYKEIFFDQSKNGYAGYIDGGASQEEFYKFIKPILEKMDGTEELLVKLNREDLLRKQRTFDNGSIPHQIHLGELHAILRRQEDFYPFLKDNREKIEKILTFRIPYYVGPLARGNSRFAWMTRKSEETITPWNFEEVVDKGASAQSFIERMTNFDKNLPNEKVLPKHSLLYEYFTVYNELTKVKYVTEGMRKPAFLSGEQKKAIVDLLFKTNRKVTVKQLKEDYFKKIECFDSVEISGVEDRFNASLGTYHDLLKIIKDKDFLDNEENEDILEDIVLTLTLFEDREMIEERLKTYAHLFDDKVMKQLKRRRYTGWGRLSRKLINGIRDKQSGKTILDFLKSDGFANRNFMQLIHDDSLTFKEDIQKAQVSGQGDSLHEHIANLAGSPAIKKGILQTVKVVDELVKVMGRHKPENIVIEMARENQTTQKGQKNSRERMKRIEEGIKELGSQILKEHPVENTQLQNEKLYLYYLQNGRDMYVDQELDINRLSDYDVDHIVPQSFLKDDSIDNKVLTRSDKARGKSDNVPSEEVVKKMKNYWRQLLNAKLITQRKFDNLTKAERGGLSELDKAGFIKRQLVETRQITKHVAQILDSRMNTKYDENDKLIREVKVITLKSKLVSDFRKDFQFYKVREINNYHHAHDAYLNAVVGTALIKKYPKLESEFVYGDYKVYDVRKMIAKSEQEIGKATAKYFFYSNIMNFFKTEITLANGEIRKRPLIETNGETGEIVWDKGRDFATVRKVLSMPQVNIVKKTEVQTGGFSKESILPKRNSDKLIARKKDWDPKKYGGFDSPTVAYSVLVVAKVEKGKSKKLKSVKELLGITIMERSSFEKNPIDFLEAKGYKEVKKDLIIKLPKYSLFELENGRKRMLASAGELQKGNELALPSKYVNFLYLASHYEKLKGSPEDNEQKQLFVEQHKHYLDEIIEQISEFSKRVILADANLDKVLSAYNKHRDKPIREQAENIIHLFTLTNLGAPAAFKYFDTTIDRKRYTSTKEVLDATLIHQSITGLYETRIDLSQLGGDGGEAAAKGGSPAPGGTLNIEDEYRLHETSKEPDVSLGSTWLSDFPQAWAETGGMGLAVRQAPLIIPLKATSTPVSIKQYPMSQEARLGIKPHIQRLLDQGILVPCQSPWNTPLLPVKKPGTNDYRPVQDLREVNKRVEDIHPTVPNPYNLLSGLPPSHQWYTVLDLKDAFFCLRLHPTSQPLFAFEWRDPEMGISGQLTWTRLPQGFKNSPTLFNEALHRDLAGFRIQHPDLILLQYVDDLLLAATSELDCQQGTRALLQTLGDLGYRASAKKAQICQKQVKYLGYLLKEGQRWLTEARKETVMGQPIPKTPRQLREFLGTAGFCRLWIPGFAEMAAPLYPLTKPGTLFNWGPDQQKAFQEIKQALLTAPALGLPDLTKPFELFVDEKQGYAKGVLTQKLGPWRRPVAYLSKKLDPVAAGWPPCLRMVAAIAVLTKDAGKLTMGQPLVILAPHAVEALVKQPPDRWLSNARMTHYQALLLDTDRVQFGPVVALNPATLLPLPEEGLQHDCLDILAEAHGTRSDLMDQPLPDADHTWYTDGSSFLQEGQRKAGAAVTTETEVIWARALPAGTSAQRAELIALTQALKMAEGKKLNVYTDSRYAFATAHIHGEIYRRRGWLTSEGKEIKNKDEILALLKALFLPKRLSIIHCPGHQKGNSAEARGNRMADQAAREVATRETPETSTLLAGKRTADGSEFEKRTADGSEFESPKKKAKVE

SEQ ID NO: 2258 - protein, 2088 aa, synthetic construct
MPAAKRVKLDGGDKKYSIGLDIGTNSVGWAVITDEYKVPSKKFKVLGNTDRHSIKKNLIGALLFDSGETAEATRLKRTARRRYTRRKNRICYLQEIFSNEMAKVDDSFFHRLEESFLVEEDKKHERHPIFGNIVDEVAYHEKYPTIYHLRKKLVDSTDKADLRLIYLALAHMIKFRGHFLIEGDLNPDNSDVDKLFIQLVQTYNQLFEENPINASGVDAKAILSARLSKSRRLENLIAQLPGEKKNGLFGNLIALSLGLTPNFKSNFDLAEDAKLQLSKDTYDDDLDNLLAQIGDQYADLFLAAKNLSDAILLSDILRVNTEITKAPLSASMIKRYDEHHQDLTLLKALVRQQLPEKYKEIFFDQSKNGYAGYIDGGASQEEFYKFIKPILEKMDGTEELLVKLNREDLLRKQRTFDNGSIPHQIHLGELHAILRRQEDFYPFLKDNREKIEKILTFRIPYYVGPLARGNSRFAWMTRKSEETITPWNFEEVVDKGASAQSFIERMTNFDKNLPNEKVLPKHSLLYEYFTVYNELTKVKYVTEGMRKPAFLSGEQKKAIVDLLFKTNRKVTVKQLKEDYFKKIECFDSVEISGVEDRFNASLGTYHDLLKIIKDKDFLDNEENEDILEDIVLTLTLFEDREMIEERLKTYAHLFDDKVMKQLKRRRYTGWGRLSRKLINGIRDKQSGKTILDFLKSDGFANRNFMQLIHDDSLTFKEDIQKAQVSGQGDSLHEHIANLAGSPAIKKGILQTVKVVDELVKVMGRHKPENIVIEMARENQTTQKGQKNSRERMKRIEEGIKELGSQILKEHPVENTQLQNEKLYLYYLQNGRDMYVDQELDINRLSDYDVDHIVPQSFLKDDSIDNKVLTRSDKARGKSDNVPSEEVVKKMKNYWRQLLNAKLITQRKFDNLTKAERGGLSELDKAGFIKRQLVETRQITKHVAQILDSRMNTKYDENDKLIREVKVITLKSKLVSDFRKDFQFYKVREINNYHHAHDAYLNAVVGTALIKKYPKLESEFVYGDYKVYDVRKMIAKSEQEIGKATAKYFFYSNIMNFFKTEITLANGEIRKRPLIETNGETGEIVWDKGRDFATVRKVLSMPQVNIVKKTEVQTGGFSKESILPKRNSDKLIARKKDWDPKKYGGFDSPTVAYSVLVVAKVEKGKSKKLKSVKELLGITIMERSSFEKNPIDFLEAKGYKEVKKDLIIKLPKYSLFELENGRKRMLASAGELQKGNELALPSKYVNFLYLASHYEKLKGSPEDNEQKQLFVEQHKHYLDEIIEQISEFSKRVILADANLDKVLSAYNKHRDKPIREQAENIIHLFTLTNLGAPAAFKYFDTTIDRKRYTSTKEVLDATLIHQSITGLYETRIDLSQLGGDGGPAPGGTLNIEDEYRLHETSKEPDVSLGSTWLSDFPQAWAETGGMGLAVRQAPLIIPLKATSTPVSIKQYPMSQEARLGIKPHIQRLLDQGILVPCQSPWNTPLLPVKKPGTNDYRPVQDLREVNKRVEDIHPTVPNPYNLLSGLPPSHQWYTVLDLKDAFFCLRLHPTSQPLFAFEWRDPEMGISGQLTWTRLPQGFKNSPTLFNEALHRDLAGFRIQHPDLILLQYVDDLLLAATSELDCQQGTRALLQTLGDLGYRASAKKAQICQKQVKYLGYLLKEGQRWLTEARKETVMGQPIPKTPRQLREFLGTAGFCRLWIPGFAEMAAPLYPLTKPGTLFNWGPDQQKAFQEIKQALLTAPALGLPDLTKPFELFVDEKQGYAKGVLTQKLGPWRRPVAYLSKKLDPVAAGWPPCLRMVAAIAVLTKDAGKLTMGQPLVILAPHAVEALVKQPPDRWLSNARMTHYQALLLDTDRVQFGPVVALNPATLLPLPEEGLQHDCLDILAEAHGTRSDLMDQPLPDADHTWYTDGSSFLQEGQRKAGAAVTTETEVIWARALPAGTSAQRAELIALTQALKMAEGKKLNVYTDSRYAFATAHIHGEIYRRRGWLTSEGKEIKNKDEILALLKALFLPKRLSIIHCPGHQKGNSAEARGNRMADQAAREVATRETPETSTLLAGKRTADGSEFEKRTADGSEFESPKKKAKVE

SEQ ID NO: 2259 - protein, 2094 aa, synthetic construct
MPAAKRVKLDGGDKKYSIGLDIGTNSVGWAVITDEYKVPSKKFKVLGNTDRHSIKKNLIGALLFDSGETAEATRLKRTARRRYTRRKNRICYLQEIFSNEMAKVDDSFFHRLEESFLVEEDKKHERHPIFGNIVDEVAYHEKYPTIYHLRKKLVDSTDKADLRLIYLALAHMIKFRGHFLIEGDLNPDNSDVDKLFIQLVQTYNQLFEENPINASGVDAKAILSARLSKSRRLENLIAQLPGEKKNGLFGNLIALSLGLTPNFKSNFDLAEDAKLQLSKDTYDDDLDNLLAQIGDQYADLFLAAKNLSDAILLSDILRVNTEITKAPLSASMIKRYDEHHQDLTLLKALVRQQLPEKYKEIFFDQSKNGYAGYIDGGASQEEFYKFIKPILEKMDGTEELLVKLNREDLLRKQRTFDNGSIPHQIHLGELHAILRRQEDFYPFLKDNREKIEKILTFRIPYYVGPLARGNSRFAWMTRKSEETITPWNFEEVVDKGASAQSFIERMTNFDKNLPNEKVLPKHSLLYEYFTVYNELTKVKYVTEGMRKPAFLSGEQKKAIVDLLFKTNRKVTVKQLKEDYFKKIECFDSVEISGVEDRFNASLGTYHDLLKIIKDKDFLDNEENEDILEDIVLTLTLFEDREMIEERLKTYAHLFDDKVMKQLKRRRYTGWGRLSRKLINGIRDKQSGKTILDFLKSDGFANRNFMQLIHDDSLTFKEDIQKAQVSGQGDSLHEHIANLAGSPAIKKGILQTVKVVDELVKVMGRHKPENIVIEMARENQTTQKGQKNSRERMKRIEEGIKELGSQILKEHPVENTQLQNEKLYLYYLQNGRDMYVDQELDINRLSDYDVDHIVPQSFLKDDSIDNKVLTRSDKARGKSDNVPSEEVVKKMKNYWRQLLNAKLITQRKFDNLTKAERGGLSELDKAGFIKRQLVETRQITKHVAQILDSRMNTKYDENDKLIREVKVITLKSKLVSDFRKDFQFYKVREINNYHHAHDAYLNAVVGTALIKKYPKLESEFVYGDYKVYDVRKMIAKSEQEIGKATAKYFFYSNIMNFFKTEITLANGEIRKRPLIETNGETGEIVWDKGRDFATVRKVLSMPQVNIVKKTEVQTGGFSKESILPKRNSDKLIARKKDWDPKKYGGFDSPTVAYSVLVVAKVEKGKSKKLKSVKELLGITIMERSSFEKNPIDFLEAKGYKEVKKDLIIKLPKYSLFELENGRKRMLASAGELQKGNELALPSKYVNFLYLASHYEKLKGSPEDNEQKQLFVEQHKHYLDEIIEQISEFSKRVILADANLDKVLSAYNKHRDKPIREQAENIIHLFTLTNLGAPAAFKYFDTTIDRKRYTSTKEVLDATLIHQSITGLYETRIDLSQLGGDGGGGSGGGPAPGGTLNIEDEYRLHETSKEPDVSLGSTWLSDFPQAWAETGGMGLAVRQAPLIIPLKATSTPVSIKQYPMSQEARLGIKPHIQRLLDQGILVPCQSPWNTPLLPVKKPGTNDYRPVQDLREVNKRVEDIHPTVPNPYNLLSGLPPSHQWYTVLDLKDAFFCLRLHPTSQPLFAFEWRDPEMGISGQLTWTRLPQGFKNSPTLFNEALHRDLAGFRIQHPDLILLQYVDDLLLAATSELDCQQGTRALLQTLGDLGYRASAKKAQICQKQVKYLGYLLKEGQRWLTEARKETVMGQPIPKTPRQLREFLGTAGFCRLWIPGFAEMAAPLYPLTKPGTLFNWGPDQQKAFQEIKQALLTAPALGLPDLTKPFELFVDEKQGYAKGVLTQKLGPWRRPVAYLSKKLDPVAAGWPPCLRMVAAIAVLTKDAGKLTMGQPLVILAPHAVEALVKQPPDRWLSNARMTHYQALLLDTDRVQFGPVVALNPATLLPLPEEGLQHDCLDILAEAHGTRSDLMDQPLPDADHTWYTDGSSFLQEGQRKAGAAVTTETEVIWARALPAGTSAQRAELIALTQALKMAEGKKLNVYTDSRYAFATAHIHGEIYRRRGWLTSEGKEIKNKDEILALLKALFLPKRLSIIHCPGHQKGNSAEARGNRMADQAAREVATRETPETSTLLAGKRTADGSEFEKRTADGSEFESPKKKAKVE

SEQ ID NO: 2260 - protein, 2094 aa, synthetic construct
MPAAKRVKLDGGDKKYSIGLDIGTNSVGWAVITDEYKVPSKKFKVLGNTDRHSIKKNLIGALLFDSGETAEATRLKRTARRRYTRRKNRICYLQEIFSNEMAKVDDSFFHRLEESFLVEEDKKHERHPIFGNIVDEVAYHEKYPTIYHLRKKLVDSTDKADLRLIYLALAHMIKFRGHFLIEGDLNPDNSDVDKLFIQLVQTYNQLFEENPINASGVDAKAILSARLSKSRRLENLIAQLPGEKKNGLFGNLIALSLGLTPNFKSNFDLAEDAKLQLSKDTYDDDLDNLLAQIGDQYADLFLAAKNLSDAILLSDILRVNTEITKAPLSASMIKRYDEHHQDLTLLKALVRQQLPEKYKEIFFDQSKNGYAGYIDGGASQEEFYKFIKPILEKMDGTEELLVKLNREDLLRKQRTFDNGSIPHQIHLGELHAILRRQEDFYPFLKDNREKIEKILTFRIPYYVGPLARGNSRFAWMTRKSEETITPWNFEEVVDKGASAQSFIERMTNFDKNLPNEKVLPKHSLLYEYFTVYNELTKVKYVTEGMRKPAFLSGEQKKAIVDLLFKTNRKVTVKQLKEDYFKKIECFDSVEISGVEDRFNASLGTYHDLLKIIKDKDFLDNEENEDILEDIVLTLTLFEDREMIEERLKTYAHLFDDKVMKQLKRRRYTGWGRLSRKLINGIRDKQSGKTILDFLKSDGFANRNFMQLIHDDSLTFKEDIQKAQVSGQGDSLHEHIANLAGSPAIKKGILQTVKVVDELVKVMGRHKPENIVIEMARENQTTQKGQKNSRERMKRIEEGIKELGSQILKEHPVENTQLQNEKLYLYYLQNGRDMYVDQELDINRLSDYDVDHIVPQSFLKDDSIDNKVLTRSDKARGKSDNVPSEEVVKKMKNYWRQLLNAKLITQRKFDNLTKAERGGLSELDKAGFIKRQLVETRQITKHVAQILDSRMNTKYDENDKLIREVKVITLKSKLVSDFRKDFQFYKVREINNYHHAHDAYLNAVVGTALIKKYPKLESEFVYGDYKVYDVRKMIAKSEQEIGKATAKYFFYSNIMNFFKTEITLANGEIRKRPLIETNGETGEIVWDKGRDFATVRKVLSMPQVNIVKKTEVQTGGFSKESILPKRNSDKLIARKKDWDPKKYGGFDSPTVAYSVLVVAKVEKGKSKKLKSVKELLGITIMERSSFEKNPIDFLEAKGYKEVKKDLIIKLPKYSLFELENGRKRMLASAGELQKGNELALPSKYVNFLYLASHYEKLKGSPEDNEQKQLFVEQHKHYLDEIIEQISEFSKRVILADANLDKVLSAYNKHRDKPIREQAENIIHLFTLTNLGAPAAFKYFDTTIDRKRYTSTKEVLDATLIHQSITGLYETRIDLSQLGGDGGGGSPAPGSSGGTLNIEDEYRLHETSKEPDVSLGSTWLSDFPQAWAETGGMGLAVRQAPLIIPLKATSTPVSIKQYPMSQEARLGIKPHIQRLLDQGILVPCQSPWNTPLLPVKKPGTNDYRPVQDLREVNKRVEDIHPTVPNPYNLLSGLPPSHQWYTVLDLKDAFFCLRLHPTSQPLFAFEWRDPEMGISGQLTWTRLPQGFKNSPTLFNEALHRDLAGFRIQHPDLILLQYVDDLLLAATSELDCQQGTRALLQTLGDLGYRASAKKAQICQKQVKYLGYLLKEGQRWLTEARKETVMGQPIPKTPRQLREFLGTAGFCRLWIPGFAEMAAPLYPLTKPGTLFNWGPDQQKAFQEIKQALLTAPALGLPDLTKPFELFVDEKQGYAKGVLTQKLGPWRRPVAYLSKKLDPVAAGWPPCLRMVAAIAVLTKDAGKLTMGQPLVILAPHAVEALVKQPPDRWLSNARMTHYQALLLDTDRVQFGPVVALNPATLLPLPEEGLQHDCLDILAEAHGTRSDLMDQPLPDADHTWYTDGSSFLQEGQRKAGAAVTTETEVIWARALPAGTSAQRAELIALTQALKMAEGKKLNVYTDSRYAFATAHIHGEIYRRRGWLTSEGKEIKNKDEILALLKALFLPKRLSIIHCPGHQKGNSAEARGNRMADQAAREVATRETPETSTLLAGKRTADGSEFEKRTADGSEFESPKKKAKVE

SEQ ID NO: 2261 - protein, 2096 aa, synthetic construct
MPAAKRVKLDGGDKKYSIGLDIGTNSVGWAVITDEYKVPSKKFKVLGNTDRHSIKKNLIGALLFDSGETAEATRLKRTARRRYTRRKNRICYLQEIFSNEMAKVDDSFFHRLEESFLVEEDKKHERHPIFGNIVDEVAYHEKYPTIYHLRKKLVDSTDKADLRLIYLALAHMIKFRGHFLIEGDLNPDNSDVDKLFIQLVQTYNQLFEENPINASGVDAKAILSARLSKSRRLENLIAQLPGEKKNGLFGNLIALSLGLTPNFKSNFDLAEDAKLQLSKDTYDDDLDNLLAQIGDQYADLFLAAKNLSDAILLSDILRVNTEITKAPLSASMIKRYDEHHQDLTLLKALVRQQLPEKYKEIFFDQSKNGYAGYIDGGASQEEFYKFIKPILEKMDGTEELLVKLNREDLLRKQRTFDNGSIPHQIHLGELHAILRRQEDFYPFLKDNREKIEKILTFRIPYYVGPLARGNSRFAWMTRKSEETITPWNFEEVVDKGASAQSFIERMTNFDKNLPNEKVLPKHSLLYEYFTVYNELTKVKYVTEGMRKPAFLSGEQKKAIVDLLFKTNRKVTVKQLKEDYFKKIECFDSVEISGVEDRFNASLGTYHDLLKIIKDKDFLDNEENEDILEDIVLTLTLFEDREMIEERLKTYAHLFDDKVMKQLKRRRYTGWGRLSRKLINGIRDKQSGKTILDFLKSDGFANRNFMQLIHDDSLTFKEDIQKAQVSGQGDSLHEHIANLAGSPAIKKGILQTVKVVDELVKVMGRHKPENIVIEMARENQTTQKGQKNSRERMKRIEEGIKELGSQILKEHPVENTQLQNEKLYLYYLQNGRDMYVDQELDINRLSDYDVDHIVPQSFLKDDSIDNKVLTRSDKARGKSDNVPSEEVVKKMKNYWRQLLNAKLITQRKFDNLTKAERGGLSELDKAGFIKRQLVETRQITKHVAQILDSRMNTKYDENDKLIREVKVITLKSKLVSDFRKDFQFYKVREINNYHHAHDAYLNAVVGTALIKKYPKLESEFVYGDYKVYDVRKMIAKSEQEIGKATAKYFFYSNIMNFFKTEITLANGEIRKRPLIETNGETGEIVWDKGRDFATVRKVLSMPQVNIVKKTEVQTGGFSKESILPKRNSDKLIARKKDWDPKKYGGFDSPTVAYSVLVVAKVEKGKSKKLKSVKELLGITIMERSSFEKNPIDFLEAKGYKEVKKDLIIKLPKYSLFELENGRKRMLASAGELQKGNELALPSKYVNFLYLASHYEKLKGSPEDNEQKQLFVEQHKHYLDEIIEQISEFSKRVILADANLDKVLSAYNKHRDKPIREQAENIIHLFTLTNLGAPAAFKYFDTTIDRKRYTSTKEVLDATLIHQSITGLYETRIDLSQLGGDGGEAAAKGGGGSSGGTLNIEDEYRLHETSKEPDVSLGSTWLSDFPQAWAETGGMGLAVRQAPLIIPLKATSTPVSIKQYPMSQEARLGIKPHIQRLLDQGILVPCQSPWNTPLLPVKKPGTNDYRPVQDLREVNKRVEDIHPTVPNPYNLLSGLPPSHQWYTVLDLKDAFFCLRLHPTSQPLFAFEWRDPEMGISGQLTWTRLPQGFKNSPTLFNEALHRDLAGFRIQHPDLILLQYVDDLLLAATSELDCQQGTRALLQTLGDLGYRASAKKAQICQKQVKYLGYLLKEGQRWLTEARKETVMGQPIPKTPRQLREFLGTAGFCRLWIPGFAEMAAPLYPLTKPGTLFNWGPDQQKAFQEIKQALLTAPALGLPDLTKPFELFVDEKQGYAKGVLTQKLGPWRRPVAYLSKKLDPVAAGWPPCLRMVAAIAVLTKDAGKLTMGQPLVILAPHAVEALVKQPPDRWLSNARMTHYQALLLDTDRVQFGPVVALNPATLLPLPEEGLQHDCLDILAEAHGTRSDLMDQPLPDADHTWYTDGSSFLQEGQRKAGAAVTTETEVIWARALPAGTSAQRAELIALTQALKMAEGKKLNVYTDSRYAFATAHIHGEIYRRRGWLTSEGKEIKNKDEILALLKALFLPKRLSIIHCPGHQKGNSAEARGNRMADQAAREVATRETPETSTLLAGKRTADGSEFEKRTADGSEFESPKKKAKVE

SEQ ID NO: 2262 - protein, 2094 aa, synthetic construct
MPAAKRVKLDGGDKKYSIGLDIGTNSVGWAVITDEYKVPSKKFKVLGNTDRHSIKKNLIGALLFDSGETAEATRLKRTARRRYTRRKNRICYLQEIFSNEMAKVDDSFFHRLEESFLVEEDKKHERHPIFGNIVDEVAYHEKYPTIYHLRKKLVDSTDKADLRLIYLALAHMIKFRGHFLIEGDLNPDNSDVDKLFIQLVQTYNQLFEENPINASGVDAKAILSARLSKSRRLENLIAQLPGEKKNGLFGNLIALSLGLTPNFKSNFDLAEDAKLQLSKDTYDDDLDNLLAQIGDQYADLFLAAKNLSDAILLSDILRVNTEITKAPLSASMIKRYDEHHQDLTLLKALVRQQLPEKYKEIFFDQSKNGYAGYIDGGASQEEFYKFIKPILEKMDGTEELLVKLNREDLLRKQRTFDNGSIPHQIHLGELHAILRRQEDFYPFLKDNREKIEKILTFRIPYYVGPLARGNSRFAWMTRKSEETITPWNFEEVVDKGASAQSFIERMTNFDKNLPNEKVLPKHSLLYEYFTVYNELTKVKYVTEGMRKPAFLSGEQKKAIVDLLFKTNRKVTVKQLKEDYFKKIECFDSVEISGVEDRFNASLGTYHDLLKIIKDKDFLDNEENEDILEDIVLTLTLFEDREMIEERLKTYAHLFDDKVMKQLKRRRYTGWGRLSRKLINGIRDKQSGKTILDFLKSDGFANRNFMQLIHDDSLTFKEDIQKAQVSGQGDSLHEHIANLAGSPAIKKGILQTVKVVDELVKVMGRHKPENIVIEMARENQTTQKGQKNSRERMKRIEEGIKELGSQILKEHPVENTQLQNEKLYLYYLQNGRDMYVDQELDINRLSDYDVDHIVPQSFLKDDSIDNKVLTRSDKARGKSDNVPSEEVVKKMKNYWRQLLNAKLITQRKFDNLTKAERGGLSELDKAGFIKRQLVETRQITKHVAQILDSRMNTKYDENDKLIREVKVITLKSKLVSDFRKDFQFYKVREINNYHHAHDAYLNAVVGTALIKKYPKLESEFVYGDYKVYDVRKMIAKSEQEIGKATAKYFFYSNIMNFFKTEITLANGEIRKRPLIETNGETGEIVWDKGRDFATVRKVLSMPQVNIVKKTEVQTGGFSKESILPKRNSDKLIARKKDWDPKKYGGFDSPTVAYSVLVVAKVEKGKSKKLKSVKELLGITIMERSSFEKNPIDFLEAKGYKEVKKDLIIKLPKYSLFELENGRKRMLASAGELQKGNELALPSKYVNFLYLASHYEKLKGSPEDNEQKQLFVEQHKHYLDEIIEQISEFSKRVILADANLDKVLSAYNKHRDKPIREQAENIIHLFTLTNLGAPAAFKYFDTTIDRKRYTSTKEVLDATLIHQSITGLYETRIDLSQLGGDGGPAPGSSGGGGGTLNIEDEYRLHETSKEPDVSLGSTWLSDFPQAWAETGGMGLAVRQAPLIIPLKATSTPVSIKQYPMSQEARLGIKPHIQRLLDQGILVPCQSPWNTPLLPVKKPGTNDYRPVQDLREVNKRVEDIHPTVPNPYNLLSGLPPSHQWYTVLDLKDAFFCLRLHPTSQPLFAFEWRDPEMGISGQLTWTRLPQGFKNSPTLFNEALHRDLAGFRIQHPDLILLQYVDDLLLAATSELDCQQGTRALLQTLGDLGYRASAKKAQICQKQVKYLGYLLKEGQRWLTEARKETVMGQPIPKTPRQLREFLGTAGFCRLWIPGFAEMAAPLYPLTKPGTLFNWGPDQQKAFQEIKQALLTAPALGLPDLTKPFELFVDEKQGYAKGVLTQKLGPWRRPVAYLSKKLDPVAAGWPPCLRMVAAIAVLTKDAGKLTMGQPLVILAPHAVEALVKQPPDRWLSNARMTHYQALLLDTDRVQFGPVVALNPATLLPLPEEGLQHDCLDILAEAHGTRSDLMDQPLPDADHTWYTDGSSFLQEGQRKAGAAVTTETEVIWARALPAGTSAQRAELIALTQALKMAEGKKLNVYTDSRYAFATAHIHGEIYRRRGWLTSEGKEIKNKDEILALLKALFLPKRLSIIHCPGHQKGNSAEARGNRMADQAAREVATRETPETSTLLAGKRTADGSEFEKRTADGSEFESPKKKAKVE

SEQ ID NO: 2263 - protein, 2096 aa, synthetic construct
MPAAKRVKLDGGDKKYSIGLDIGTNSVGWAVITDEYKVPSKKFKVLGNTDRHSIKKNLIGALLFDSGETAEATRLKRTARRRYTRRKNRICYLQEIFSNEMAKVDDSFFHRLEESFLVEEDKKHERHPIFGNIVDEVAYHEKYPTIYHLRKKLVDSTDKADLRLIYLALAHMIKFRGHFLIEGDLNPDNSDVDKLFIQLVQTYNQLFEENPINASGVDAKAILSARLSKSRRLENLIAQLPGEKKNGLFGNLIALSLGLTPNFKSNFDLAEDAKLQLSKDTYDDDLDNLLAQIGDQYADLFLAAKNLSDAILLSDILRVNTEITKAPLSASMIKRYDEHHQDLTLLKALVRQQLPEKYKEIFFDQSKNGYAGYIDGGASQEEFYKFIKPILEKMDGTEELLVKLNREDLLRKQRTFDNGSIPHQIHLGELHAILRRQEDFYPFLKDNREKIEKILTFRIPYYVGPLARGNSRFAWMTRKSEETITPWNFEEVVDKGASAQSFIERMTNFDKNLPNEKVLPKHSLLYEYFTVYNELTKVKYVTEGMRKPAFLSGEQKKAIVDLLFKTNRKVTVKQLKEDYFKKIECFDSVEISGVEDRFNASLGTYHDLLKIIKDKDFLDNEENEDILEDIVLTLTLFEDREMIEERLKTYAHLFDDKVMKQLKRRRYTGWGRLSRKLINGIRDKQSGKTILDFLKSDGFANRNFMQLIHDDSLTFKEDIQKAQVSGQGDSLHEHIANLAGSPAIKKGILQTVKVVDELVKVMGRHKPENIVIEMARENQTTQKGQKNSRERMKRIEEGIKELGSQILKEHPVENTQLQNEKLYLYYLQNGRDMYVDQELDINRLSDYDVDHIVPQSFLKDDSIDNKVLTRSDKARGKSDNVPSEEVVKKMKNYWRQLLNAKLITQRKFDNLTKAERGGLSELDKAGFIKRQLVETRQITKHVAQILDSRMNTKYDENDKLIREVKVITLKSKLVSDFRKDFQFYKVREINNYHHAHDAYLNAVVGTALIKKYPKLESEFVYGDYKVYDVRKMIAKSEQEIGKATAKYFFYSNIMNFFKTEITLANGEIRKRPLIETNGETGEIVWDKGRDFATVRKVLSMPQVNIVKKTEVQTGGFSKESILPKRNSDKLIARKKDWDPKKYGGFDSPTVAYSVLVVAKVEKGKSKKLKSVKELLGITIMERSSFEKNPIDFLEAKGYKEVKKDLIIKLPKYSLFELENGRKRMLASAGELQKGNELALPSKYVNFLYLASHYEKLKGSPEDNEQKQLFVEQHKHYLDEIIEQISEFSKRVILADANLDKVLSAYNKHRDKPIREQAENIIHLFTLTNLGAPAAFKYFDTTIDRKRYTSTKEVLDATLIHQSITGLYETRIDLSQLGGDGGGGSGSSEAAAKGGTLNIEDEYRLHETSKEPDVSLGSTWLSDFPQAWAETGGMGLAVRQAPLIIPLKATSTPVSIKQYPMSQEARLGIKPHIQRLLDQGILVPCQSPWNTPLLPVKKPGTNDYRPVQDLREVNKRVEDIHPTVPNPYNLLSGLPPSHQWYTVLDLKDAFFCLRLHPTSQPLFAFEWRDPEMGISGQLTWTRLPQGFKNSPTLFNEALHRDLAGFRIQHPDLILLQYVDDLLLAATSELDCQQGTRALLQTLGDLGYRASAKKAQICQKQVKYLGYLLKEGQRWLTEARKETVMGQPIPKTPRQLREFLGTAGFCRLWIPGFAEMAAPLYPLTKPGTLFNWGPDQQKAFQEIKQALLTAPALGLPDLTKPFELFVDEKQGYAKGVLTQKLGPWRRPVAYLSKKLDPVAAGWPPCLRMVAAIAVLTKDAGKLTMGQPLVILAPHAVEALVKQPPDRWLSNARMTHYQALLLDTDRVQFGPVVALNPATLLPLPEEGLQHDCLDILAEAHGTRSDLMDQPLPDADHTWYTDGSSFLQEGQRKAGAAVTTETEVIWARALPAGTSAQRAELIALTQALKMAEGKKLNVYTDSRYAFATAHIHGEIYRRRGWLTSEGKEIKNKDEILALLKALFLPKRLSIIHCPGHQKGNSAEARGNRMADQAAREVATRETPETSTLLAGKRTADGSEFEKRTADGSEFESPKKKAKVE

SEQ ID NO: 2264 - protein, 2091 aa, synthetic construct
MPAAKRVKLDGGDKKYSIGLDIGTNSVGWAVITDEYKVPSKKFKVLGNTDRHSIKKNLIGALLFDSGETAEATRLKRTARRRYTRRKNRICYLQEIFSNEMAKVDDSFFHRLEESFLVEEDKKHERHPIFGNIVDEVAYHEKYPTIYHLRKKLVDSTDKADLRLIYLALAHMIKFRGHFLIEGDLNPDNSDVDKLFIQLVQTYNQLFEENPINASGVDAKAILSARLSKSRRLENLIAQLPGEKKNGLFGNLIALSLGLTPNFKSNFDLAEDAKLQLSKDTYDDDLDNLLAQIGDQYADLFLAAKNLSDAILLSDILRVNTEITKAPLSASMIKRYDEHHQDLTLLKALVRQQLPEKYKEIFFDQSKNGYAGYIDGGASQEEFYKFIKPILEKMDGTEELLVKLNREDLLRKQRTFDNGSIPHQIHLGELHAILRRQEDFYPFLKDNREKIEKILTFRIPYYVGPLARGNSRFAWMTRKSEETITPWNFEEVVDKGASAQSFIERMTNFDKNLPNEKVLPKHSLLYEYFTVYNELTKVKYVTEGMRKPAFLSGEQKKAIVDLLFKTNRKVTVKQLKEDYFKKIECFDSVEISGVEDRFNASLGTYHDLLKIIKDKDFLDNEENEDILEDIVLTLTLFEDREMIEERLKTYAHLFDDKVMKQLKRRRYTGWGRLSRKLINGIRDKQSGKTILDFLKSDGFANRNFMQLIHDDSLTFKEDIQKAQVSGQGDSLHEHIANLAGSPAIKKGILQTVKVVDELVKVMGRHKPENIVIEMARENQTTQKGQKNSRERMKRIEEGIKELGSQILKEHPVENTQLQNEKLYLYYLQNGRDMYVDQELDINRLSDYDVDHIVPQSFLKDDSIDNKVLTRSDKARGKSDNVPSEEVVKKMKNYWRQLLNAKLITQRKFDNLTKAERGGLSELDKAGFIKRQLVETRQITKHVAQILDSRMNTKYDENDKLIREVKVITLKSKLVSDFRKDFQFYKVREINNYHHAHDAYLNAVVGTALIKKYPKLESEFVYGDYKVYDVRKMIAKSEQEIGKATAKYFFYSNIMNFFKTEITLANGEIRKRPLIETNGETGEIVWDKGRDFATVRKVLSMPQVNIVKKTEVQTGGFSKESILPKRNSDKLIARKKDWDPKKYGGFDSPTVAYSVLVVAKVEKGKSKKLKSVKELLGITIMERSSFEKNPIDFLEAKGYKEVKKDLIIKLPKYSLFELENGRKRMLASAGELQKGNELALPSKYVNFLYLASHYEKLKGSPEDNEQKQLFVEQHKHYLDEIIEQISEFSKRVILADANLDKVLSAYNKHRDKPIREQAENIIHLFTLTNLGAPAAFKYFDTTIDRKRYTSTKEVLDATLIHQSITGLYETRIDLSQLGGDGGGSSGGGGGTLNIEDEYRLHETSKEPDVSLGSTWLSDFPQAWAETGGMGLAVRQAPLIIPLKATSTPVSIKQYPMSQEARLGIKPHIQRLLDQGILVPCQSPWNTPLLPVKKPGTNDYRPVQDLREVNKRVEDIHPTVPNPYNLLSGLPPSHQWYTVLDLKDAFFCLRLHPTSQPLFAFEWRDPEMGISGQLTWTRLPQGFKNSPTLFNEALHRDLAGFRIQHPDLILLQYVDDLLLAATSELDCQQGTRALLQTLGDLGYRASAKKAQICQKQVKYLGYLLKEGQRWLTEARKETVMGQPIPKTPRQLREFLGTAGFCRLWIPGFAEMAAPLYPLTKPGTLFNWGPDQQKAFQEIKQALLTAPALGLPDLTKPFELFVDEKQGYAKGVLTQKLGPWRRPVAYLSKKLDPVAAGWPPCLRMVAAIAVLTKDAGKLTMGQPLVILAPHAVEALVKQPPDRWLSNARMTHYQALLLDTDRVQFGPVVALNPATLLPLPEEGLQHDCLDILAEAHGTRSDLMDQPLPDADHTWYTDGSSFLQEGQRKAGAAVTTETEVIWARALPAGTSAQRAELIALTQALKMAEGKKLNVYTDSRYAFATAHIHGEIYRRRGWLTSEGKEIKNKDEILALLKALFLPKRLSIIHCPGHQKGNSAEARGNRMADQAAREVATRETPETSTLLAGKRTADGSEFEKRTADGSEFESPKKKAKVE

SEQ ID NO: 2265 - protein, 2094 aa, synthetic construct
MPAAKRVKLDGGDKKYSIGLDIGTNSVGWAVITDEYKVPSKKFKVLGNTDRHSIKKNLIGALLFDSGETAEATRLKRTARRRYTRRKNRICYLQEIFSNEMAKVDDSFFHRLEESFLVEEDKKHERHPIFGNIVDEVAYHEKYPTIYHLRKKLVDSTDKADLRLIYLALAHMIKFRGHFLIEGDLNPDNSDVDKLFIQLVQTYNQLFEENPINASGVDAKAILSARLSKSRRLENLIAQLPGEKKNGLFGNLIALSLGLTPNFKSNFDLAEDAKLQLSKDTYDDDLDNLLAQIGDQYADLFLAAKNLSDAILLSDILRVNTEITKAPLSASMIKRYDEHHQDLTLLKALVRQQLPEKYKEIFFDQSKNGYAGYIDGGASQEEFYKFIKPILEKMDGTEELLVKLNREDLLRKQRTFDNGSIPHQIHLGELHAILRRQEDFYPFLKDNREKIEKILTFRIPYYVGPLARGNSRFAWMTRKSEETITPWNFEEVVDKGASAQSFIERMTNFDKNLPNEKVLPKHSLLYEYFTVYNELTKVKYVTEGMRKPAFLSGEQKKAIVDLLFKTNRKVTVKQLKEDYFKKIECFDSVEISGVEDRFNASLGTYHDLLKIIKDKDFLDNEENEDILEDIVLTLTLFEDREMIEERLKTYAHLFDDKVMKQLKRRRYTGWGRLSRKLINGIRDKQSGKTILDFLKSDGFANRNFMQLIHDDSLTFKEDIQKAQVSGQGDSLHEHIANLAGSPAIKKGILQTVKVVDELVKVMGRHKPENIVIEMARENQTTQKGQKNSRERMKRIEEGIKELGSQILKEHPVENTQLQNEKLYLYYLQNGRDMYVDQELDINRLSDYDVDHIVPQSFLKDDSIDNKVLTRSDKARGKSDNVPSEEVVKKMKNYWRQLLNAKLITQRKFDNLTKAERGGLSELDKAGFIKRQLVETRQITKHVAQILDSRMNTKYDENDKLIREVKVITLKSKLVSDFRKDFQFYKVREINNYHHAHDAYLNAVVGTALIKKYPKLESEFVYGDYKVYDVRKMIAKSEQEIGKATAKYFFYSNIMNFFKTEITLANGEIRKRPLIETNGETGEIVWDKGRDFATVRKVLSMPQVNIVKKTEVQTGGFSKESILPKRNSDKLIARKKDWDPKKYGGFDSPTVAYSVLVVAKVEKGKSKKLKSVKELLGITIMERSSFEKNPIDFLEAKGYKEVKKDLIIKLPKYSLFELENGRKRMLASAGELQKGNELALPSKYVNFLYLASHYEKLKGSPEDNEQKQLFVEQHKHYLDEIIEQISEFSKRVILADANLDKVLSAYNKHRDKPIREQAENIIHLFTLTNLGAPAAFKYFDTTIDRKRYTSTKEVLDATLIHQSITGLYETRIDLSQLGGDGGGGSGSSPAPGGTLNIEDEYRLHETSKEPDVSLGSTWLSDFPQAWAETGGMGLAVRQAPLIIPLKATSTPVSIKQYPMSQEARLGIKPHIQRLLDQGILVPCQSPWNTPLLPVKKPGTNDYRPVQDLREVNKRVEDIHPTVPNPYNLLSGLPPSHQWYTVLDLKDAFFCLRLHPTSQPLFAFEWRDPEMGISGQLTWTRLPQGFKNSPTLFNEALHRDLAGFRIQHPDLILLQYVDDLLLAATSELDCQQGTRALLQTLGDLGYRASAKKAQICQKQVKYLGYLLKEGQRWLTEARKETVMGQPIPKTPRQLREFLGTAGFCRLWIPGFAEMAAPLYPLTKPGTLFNWGPDQQKAFQEIKQALLTAPALGLPDLTKPFELFVDEKQGYAKGVLTQKLGPWRRPVAYLSKKLDPVAAGWPPCLRMVAAIAVLTKDAGKLTMGQPLVILAPHAVEALVKQPPDRWLSNARMTHYQALLLDTDRVQFGPVVALNPATLLPLPEEGLQHDCLDILAEAHGTRSDLMDQPLPDADHTWYTDGSSFLQEGQRKAGAAVTTETEVIWARALPAGTSAQRAELIALTQALKMAEGKKLNVYTDSRYAFATAHIHGEIYRRRGWLTSEGKEIKNKDEILALLKALFLPKRLSIIHCPGHQKGNSAEARGNRMADQAAREVATRETPETSTLLAGKRTADGSEFEKRTADGSEFESPKKKAKVE

SEQ ID NO: 2266 - protein, 2096 aa, synthetic construct
MPAAKRVKLDGGDKKYSIGLDIGTNSVGWAVITDEYKVPSKKFKVLGNTDRHSIKKNLIGALLFDSGETAEATRLKRTARRRYTRRKNRICYLQEIFSNEMAKVDDSFFHRLEESFLVEEDKKHERHPIFGNIVDEVAYHEKYPTIYHLRKKLVDSTDKADLRLIYLALAHMIKFRGHFLIEGDLNPDNSDVDKLFIQLVQTYNQLFEENPINASGVDAKAILSARLSKSRRLENLIAQLPGEKKNGLFGNLIALSLGLTPNFKSNFDLAEDAKLQLSKDTYDDDLDNLLAQIGDQYADLFLAAKNLSDAILLSDILRVNTEITKAPLSASMIKRYDEHHQDLTLLKALVRQQLPEKYKEIFFDQSKNGYAGYIDGGASQEEFYKFIKPILEKMDGTEELLVKLNREDLLRKQRTFDNGSIPHQIHLGELHAILRRQEDFYPFLKDNREKIEKILTFRIPYYVGPLARGNSRFAWMTRKSEETITPWNFEEVVDKGASAQSFIERMTNFDKNLPNEKVLPKHSLLYEYFTVYNELTKVKYVTEGMRKPAFLSGEQKKAIVDLLFKTNRKVTVKQLKEDYFKKIECFDSVEISGVEDRFNASLGTYHDLLKIIKDKDFLDNEENEDILEDIVLTLTLFEDREMIEERLKTYAHLFDDKVMKQLKRRRYTGWGRLSRKLINGIRDKQSGKTILDFLKSDGFANRNFMQLIHDDSLTFKEDIQKAQVSGQGDSLHEHIANLAGSPAIKKGILQTVKVVDELVKVMGRHKPENIVIEMARENQTTQKGQKNSRERMKRIEEGIKELGSQILKEHPVENTQLQNEKLYLYYLQNGRDMYVDQELDINRLSDYDVDHIVPQSFLKDDSIDNKVLTRSDKARGKSDNVPSEEVVKKMKNYWRQLLNAKLITQRKFDNLTKAERGGLSELDKAGFIKRQLVETRQITKHVAQILDSRMNTKYDENDKLIREVKVITLKSKLVSDFRKDFQFYKVREINNYHHAHDAYLNAVVGTALIKKYPKLESEFVYGDYKVYDVRKMIAKSEQEIGKATAKYFFYSNIMNFFKTEITLANGEIRKRPLIETNGETGEIVWDKGRDFATVRKVLSMPQVNIVKKTEVQTGGFSKESILPKRNSDKLIARKKDWDPKKYGGFDSPTVAYSVLVVAKVEKGKSKKLKSVKELLGITIMERSSFEKNPIDFLEAKGYKEVKKDLIIKLPKYSLFELENGRKRMLASAGELQKGNELALPSKYVNFLYLASHYEKLKGSPEDNEQKQLFVEQHKHYLDEIIEQISEFSKRVILADANLDKVLSAYNKHRDKPIREQAENIIHLFTLTNLGAPAAFKYFDTTIDRKRYTSTKEVLDATLIHQSITGLYETRIDLSQLGGDGGGGSGGGEAAAKGGTLNIEDEYRLHETSKEPDVSLGSTWLSDFPQAWAETGGMGLAVRQAPLIIPLKATSTPVSIKQYPMSQEARLGIKPHIQRLLDQGILVPCQSPWNTPLLPVKKPGTNDYRPVQDLREVNKRVEDIHPTVPNPYNLLSGLPPSHQWYTVLDLKDAFFCLRLHPTSQPLFAFEWRDPEMGISGQLTWTRLPQGFKNSPTLFNEALHRDLAGFRIQHPDLILLQYVDDLLLAATSELDCQQGTRALLQTLGDLGYRASAKKAQICQKQVKYLGYLLKEGQRWLTEARKETVMGQPIPKTPRQLREFLGTAGFCRLWIPGFAEMAAPLYPLTKPGTLFNWGPDQQKAFQEIKQALLTAPALGLPDLTKPFELFVDEKQGYAKGVLTQKLGPWRRPVAYLSKKLDPVAAGWPPCLRMVAAIAVLTKDAGKLTMGQPLVILAPHAVEALVKQPPDRWLSNARMTHYQALLLDTDRVQFGPVVALNPATLLPLPEEGLQHDCLDILAEAHGTRSDLMDQPLPDADHTWYTDGSSFLQEGQRKAGAAVTTETEVIWARALPAGTSAQRAELIALTQALKMAEGKKLNVYTDSRYAFATAHIHGEIYRRRGWLTSEGKEIKNKDEILALLKALFLPKRLSIIHCPGHQKGNSAEARGNRMADQAAREVATRETPETSTLLAGKRTADGSEFEKRTADGSEFESPKKKAKVE

SEQ ID NO: 2267 - protein, 2092 aa, synthetic construct
MPAAKRVKLDGGDKKYSIGLDIGTNSVGWAVITDEYKVPSKKFKVLGNTDRHSIKKNLIGALLFDSGETAEATRLKRTARRRYTRRKNRICYLQEIFSNEMAKVDDSFFHRLEESFLVEEDKKHERHPIFGNIVDEVAYHEKYPTIYHLRKKLVDSTDKADLRLIYLALAHMIKFRGHFLIEGDLNPDNSDVDKLFIQLVQTYNQLFEENPINASGVDAKAILSARLSKSRRLENLIAQLPGEKKNGLFGNLIALSLGLTPNFKSNFDLAEDAKLQLSKDTYDDDLDNLLAQIGDQYADLFLAAKNLSDAILLSDILRVNTEITKAPLSASMIKRYDEHHQDLTLLKALVRQQLPEKYKEIFFDQSKNGYAGYIDGGASQEEFYKFIKPILEKMDGTEELLVKLNREDLLRKQRTFDNGSIPHQIHLGELHAILRRQEDFYPFLKDNREKIEKILTFRIPYYVGPLARGNSRFAWMTRKSEETITPWNFEEVVDKGASAQSFIERMTNFDKNLPNEKVLPKHSLLYEYFTVYNELTKVKYVTEGMRKPAFLSGEQKKAIVDLLFKTNRKVTVKQLKEDYFKKIECFDSVEISGVEDRFNASLGTYHDLLKIIKDKDFLDNEENEDILEDIVLTLTLFEDREMIEERLKTYAHLFDDKVMKQLKRRRYTGWGRLSRKLINGIRDKQSGKTILDFLKSDGFANRNFMQLIHDDSLTFKEDIQKAQVSGQGDSLHEHIANLAGSPAIKKGILQTVKVVDELVKVMGRHKPENIVIEMARENQTTQKGQKNSRERMKRIEEGIKELGSQILKEHPVENTQLQNEKLYLYYLQNGRDMYVDQELDINRLSDYDVDHIVPQSFLKDDSIDNKVLTRSDKARGKSDNVPSEEVVKKMKNYWRQLLNAKLITQRKFDNLTKAERGGLSELDKAGFIKRQLVETRQITKHVAQILDSRMNTKYDENDKLIREVKVITLKSKLVSDFRKDFQFYKVREINNYHHAHDAYLNAVVGTALIKKYPKLESEFVYGDYKVYDVRKMIAKSEQEIGKATAKYFFYSNIMNFFKTEITLANGEIRKRPLIETNGETGEIVWDKGRDFATVRKVLSMPQVNIVKKTEVQTGGFSKESILPKRNSDKLIARKKDWDPKKYGGFDSPTVAYSVLVVAKVEKGKSKKLKSVKELLGITIMERSSFEKNPIDFLEAKGYKEVKKDLIIKLPKYSLFELENGRKRMLASAGELQKGNELALPSKYVNFLYLASHYEKLKGSPEDNEQKQLFVEQHKHYLDEIIEQISEFSKRVILADANLDKVLSAYNKHRDKPIREQAENIIHLFTLTNLGAPAAFKYFDTTIDRKRYTSTKEVLDATLIHQSITGLYETRIDLSQLGGDGGGGGGGGGGGTLNIEDEYRLHETSKEPDVSLGSTWLSDFPQAWAETGGMGLAVRQAPLIIPLKATSTPVSIKQYPMSQEARLGIKPHIQRLLDQGILVPCQSPWNTPLLPVKKPGTNDYRPVQDLREVNKRVEDIHPTVPNPYNLLSGLPPSHQWYTVLDLKDAFFCLRLHPTSQPLFAFEWRDPEMGISGQLTWTRLPQGFKNSPTLFNEALHRDLAGFRIQHPDLILLQYVDDLLLAATSELDCQQGTRALLQTLGDLGYRASAKKAQICQKQVKYLGYLLKEGQRWLTEARKETVMGQPIPKTPRQLREFLGTAGFCRLWIPGFAEMAAPLYPLTKPGTLFNWGPDQQKAFQEIKQALLTAPALGLPDLTKPFELFVDEKQGYAKGVLTQKLGPWRRPVAYLSKKLDPVAAGWPPCLRMVAAIAVLTKDAGKLTMGQPLVILAPHAVEALVKQPPDRWLSNARMTHYQALLLDTDRVQFGPVVALNPATLLPLPEEGLQHDCLDILAEAHGTRSDLMDQPLPDADHTWYTDGSSFLQEGQRKAGAAVTTETEVIWARALPAGTSAQRAELIALTQALKMAEGKKLNVYTDSRYAFATAHIHGEIYRRRGWLTSEGKEIKNKDEILALLKALFLPKRLSIIHCPGHQKGNSAEARGNRMADQAAREVATRETPETSTLLAGKRTADGSEFEKRTADGSEFESPKKKAKVE

SEQ ID NO: 2268 - protein, 2089 aa, synthetic construct
MPAAKRVKLDGGDKKYSIGLDIGTNSVGWAVITDEYKVPSKKFKVLGNTDRHSIKKNLIGALLFDSGETAEATRLKRTARRRYTRRKNRICYLQEIFSNEMAKVDDSFFHRLEESFLVEEDKKHERHPIFGNIVDEVAYHEKYPTIYHLRKKLVDSTDKADLRLIYLALAHMIKFRGHFLIEGDLNPDNSDVDKLFIQLVQTYNQLFEENPINASGVDAKAILSARLSKSRRLENLIAQLPGEKKNGLFGNLIALSLGLTPNFKSNFDLAEDAKLQLSKDTYDDDLDNLLAQIGDQYADLFLAAKNLSDAILLSDILRVNTEITKAPLSASMIKRYDEHHQDLTLLKALVRQQLPEKYKEIFFDQSKNGYAGYIDGGASQEEFYKFIKPILEKMDGTEELLVKLNREDLLRKQRTFDNGSIPHQIHLGELHAILRRQEDFYPFLKDNREKIEKILTFRIPYYVGPLARGNSRFAWMTRKSEETITPWNFEEVVDKGASAQSFIERMTNFDKNLPNEKVLPKHSLLYEYFTVYNELTKVKYVTEGMRKPAFLSGEQKKAIVDLLFKTNRKVTVKQLKEDYFKKIECFDSVEISGVEDRFNASLGTYHDLLKIIKDKDFLDNEENEDILEDIVLTLTLFEDREMIEERLKTYAHLFDDKVMKQLKRRRYTGWGRLSRKLINGIRDKQSGKTILDFLKSDGFANRNFMQLIHDDSLTFKEDIQKAQVSGQGDSLHEHIANLAGSPAIKKGILQTVKVVDELVKVMGRHKPENIVIEMARENQTTQKGQKNSRERMKRIEEGIKELGSQILKEHPVENTQLQNEKLYLYYLQNGRDMYVDQELDINRLSDYDVDHIVPQSFLKDDSIDNKVLTRSDKARGKSDNVPSEEVVKKMKNYWRQLLNAKLITQRKFDNLTKAERGGLSELDKAGFIKRQLVETRQITKHVAQILDSRMNTKYDENDKLIREVKVITLKSKLVSDFRKDFQFYKVREINNYHHAHDAYLNAVVGTALIKKYPKLESEFVYGDYKVYDVRKMIAKSEQEIGKATAKYFFYSNIMNFFKTEITLANGEIRKRPLIETNGETGEIVWDKGRDFATVRKVLSMPQVNIVKKTEVQTGGFSKESILPKRNSDKLIARKKDWDPKKYGGFDSPTVAYSVLVVAKVEKGKSKKLKSVKELLGITIMERSSFEKNPIDFLEAKGYKEVKKDLIIKLPKYSLFELENGRKRMLASAGELQKGNELALPSKYVNFLYLASHYEKLKGSPEDNEQKQLFVEQHKHYLDEIIEQISEFSKRVILADANLDKVLSAYNKHRDKPIREQAENIIHLFTLTNLGAPAAFKYFDTTIDRKRYTSTKEVLDATLIHQSITGLYETRIDLSQLGGDGGGGGGGGTLNIEDEYRLHETSKEPDVSLGSTWLSDFPQAWAETGGMGLAVRQAPLIIPLKATSTPVSIKQYPMSQEARLGIKPHIQRLLDQGILVPCQSPWNTPLLPVKKPGTNDYRPVQDLREVNKRVEDIHPTVPNPYNLLSGLPPSHQWYTVLDLKDAFFCLRLHPTSQPLFAFEWRDPEMGISGQLTWTRLPQGFKNSPTLFNEALHRDLAGFRIQHPDLILLQYVDDLLLAATSELDCQQGTRALLQTLGDLGYRASAKKAQICQKQVKYLGYLLKEGQRWLTEARKETVMGQPIPKTPRQLREFLGTAGFCRLWIPGFAEMAAPLYPLTKPGTLFNWGPDQQKAFQEIKQALLTAPALGLPDLTKPFELFVDEKQGYAKGVLTQKLGPWRRPVAYLSKKLDPVAAGWPPCLRMVAAIAVLTKDAGKLTMGQPLVILAPHAVEALVKQPPDRWLSNARMTHYQALLLDTDRVQFGPVVALNPATLLPLPEEGLQHDCLDILAEAHGTRSDLMDQPLPDADHTWYTDGSSFLQEGQRKAGAAVTTETEVIWARALPAGTSAQRAELIALTQALKMAEGKKLNVYTDSRYAFATAHIHGEIYRRRGWLTSEGKEIKNKDEILALLKALFLPKRLSIIHCPGHQKGNSAEARGNRMADQAAREVATRETPETSTLLAGKRTADGSEFEKRTADGSEFESPKKKAKVE

SEQ ID NO: 2269 - protein, 2096 aa, synthetic construct
MPAAKRVKLDGGDKKYSIGLDIGTNSVGWAVITDEYKVPSKKFKVLGNTDRHSIKKNLIGALLFDSGETAEATRLKRTARRRYTRRKNRICYLQEIFSNEMAKVDDSFFHRLEESFLVEEDKKHERHPIFGNIVDEVAYHEKYPTIYHLRKKLVDSTDKADLRLIYLALAHMIKFRGHFLIEGDLNPDNSDVDKLFIQLVQTYNQLFEENPINASGVDAKAILSARLSKSRRLENLIAQLPGEKKNGLFGNLIALSLGLTPNFKSNFDLAEDAKLQLSKDTYDDDLDNLLAQIGDQYADLFLAAKNLSDAILLSDILRVNTEITKAPLSASMIKRYDEHHQDLTLLKALVRQQLPEKYKEIFFDQSKNGYAGYIDGGASQEEFYKFIKPILEKMDGTEELLVKLNREDLLRKQRTFDNGSIPHQIHLGELHAILRRQEDFYPFLKDNREKIEKILTFRIPYYVGPLARGNSRFAWMTRKSEETITPWNFEEVVDKGASAQSFIERMTNFDKNLPNEKVLPKHSLLYEYFTVYNELTKVKYVTEGMRKPAFLSGEQKKAIVDLLFKTNRKVTVKQLKEDYFKKIECFDSVEISGVEDRFNASLGTYHDLLKIIKDKDFLDNEENEDILEDIVLTLTLFEDREMIEERLKTYAHLFDDKVMKQLKRRRYTGWGRLSRKLINGIRDKQSGKTILDFLKSDGFANRNFMQLIHDDSLTFKEDIQKAQVSGQGDSLHEHIANLAGSPAIKKGILQTVKVVDELVKVMGRHKPENIVIEMARENQTTQKGQKNSRERMKRIEEGIKELGSQILKEHPVENTQLQNEKLYLYYLQNGRDMYVDQELDINRLSDYDVDHIVPQSFLKDDSIDNKVLTRSDKARGKSDNVPSEEVVKKMKNYWRQLLNAKLITQRKFDNLTKAERGGLSELDKAGFIKRQLVETRQITKHVAQILDSRMNTKYDENDKLIREVKVITLKSKLVSDFRKDFQFYKVREINNYHHAHDAYLNAVVGTALIKKYPKLESEFVYGDYKVYDVRKMIAKSEQEIGKATAKYFFYSNIMNFFKTEITLANGEIRKRPLIETNGETGEIVWDKGRDFATVRKVLSMPQVNIVKKTEVQTGGFSKESILPKRNSDKLIARKKDWDPKKYGGFDSPTVAYSVLVVAKVEKGKSKKLKSVKELLGITIMERSSFEKNPIDFLEAKGYKEVKKDLIIKLPKYSLFELENGRKRMLASAGELQKGNELALPSKYVNFLYLASHYEKLKGSPEDNEQKQLFVEQHKHYLDEIIEQISEFSKRVILADANLDKVLSAYNKHRDKPIREQAENIIHLFTLTNLGAPAAFKYFDTTIDRKRYTSTKEVLDATLIHQSITGLYETRIDLSQLGGDGGPAPEAAAKGGGGGTLNIEDEYRLHETSKEPDVSLGSTWLSDFPQAWAETGGMGLAVRQAPLIIPLKATSTPVSIKQYPMSQEARLGIKPHIQRLLDQGILVPCQSPWNTPLLPVKKPGTNDYRPVQDLREVNKRVEDIHPTVPNPYNLLSGLPPSHQWYTVLDLKDAFFCLRLHPTSQPLFAFEWRDPEMGISGQLTWTRLPQGFKNSPTLFNEALHRDLAGFRIQHPDLILLQYVDDLLLAATSELDCQQGTRALLQTLGDLGYRASAKKAQICQKQVKYLGYLLKEGQRWLTEARKETVMGQPIPKTPRQLREFLGTAGFCRLWIPGFAEMAAPLYPLTKPGTLFNWGPDQQKAFQEIKQALLTAPALGLPDLTKPFELFVDEKQGYAKGVLTQKLGPWRRPVAYLSKKLDPVAAGWPPCLRMVAAIAVLTKDAGKLTMGQPLVILAPHAVEALVKQPPDRWLSNARMTHYQALLLDTDRVQFGPVVALNPATLLPLPEEGLQHDCLDILAEAHGTRSDLMDQPLPDADHTWYTDGSSFLQEGQRKAGAAVTTETEVIWARALPAGTSAQRAELIALTQALKMAEGKKLNVYTDSRYAFATAHIHGEIYRRRGWLTSEGKEIKNKDEILALLKALFLPKRLSIIHCPGHQKGNSAEARGNRMADQAAREVATRETPETSTLLAGKRTADGSEFEKRTADGSEFESPKKKAKVE

SEQ ID NO: 2270 - protein, 2091 aa, synthetic construct
MPAAKRVKLDGGDKKYSIGLDIGTNSVGWAVITDEYKVPSKKFKVLGNTDRHSIKKNLIGALLFDSGETAEATRLKRTARRRYTRRKNRICYLQEIFSNEMAKVDDSFFHRLEESFLVEEDKKHERHPIFGNIVDEVAYHEKYPTIYHLRKKLVDSTDKADLRLIYLALAHMIKFRGHFLIEGDLNPDNSDVDKLFIQLVQTYNQLFEENPINASGVDAKAILSARLSKSRRLENLIAQLPGEKKNGLFGNLIALSLGLTPNFKSNFDLAEDAKLQLSKDTYDDDLDNLLAQIGDQYADLFLAAKNLSDAILLSDILRVNTEITKAPLSASMIKRYDEHHQDLTLLKALVRQQLPEKYKEIFFDQSKNGYAGYIDGGASQEEFYKFIKPILEKMDGTEELLVKLNREDLLRKQRTFDNGSIPHQIHLGELHAILRRQEDFYPFLKDNREKIEKILTFRIPYYVGPLARGNSRFAWMTRKSEETITPWNFEEVVDKGASAQSFIERMTNFDKNLPNEKVLPKHSLLYEYFTVYNELTKVKYVTEGMRKPAFLSGEQKKAIVDLLFKTNRKVTVKQLKEDYFKKIECFDSVEISGVEDRFNASLGTYHDLLKIIKDKDFLDNEENEDILEDIVLTLTLFEDREMIEERLKTYAHLFDDKVMKQLKRRRYTGWGRLSRKLINGIRDKQSGKTILDFLKSDGFANRNFMQLIHDDSLTFKEDIQKAQVSGQGDSLHEHIANLAGSPAIKKGILQTVKVVDELVKVMGRHKPENIVIEMARENQTTQKGQKNSRERMKRIEEGIKELGSQILKEHPVENTQLQNEKLYLYYLQNGRDMYVDQELDINRLSDYDVDHIVPQSFLKDDSIDNKVLTRSDKARGKSDNVPSEEVVKKMKNYWRQLLNAKLITQRKFDNLTKAERGGLSELDKAGFIKRQLVETRQITKHVAQILDSRMNTKYDENDKLIREVKVITLKSKLVSDFRKDFQFYKVREINNYHHAHDAYLNAVVGTALIKKYPKLESEFVYGDYKVYDVRKMIAKSEQEIGKATAKYFFYSNIMNFFKTEITLANGEIRKRPLIETNGETGEIVWDKGRDFATVRKVLSMPQVNIVKKTEVQTGGFSKESILPKRNSDKLIARKKDWDPKKYGGFDSPTVAYSVLVVAKVEKGKSKKLKSVKELLGITIMERSSFEKNPIDFLEAKGYKEVKKDLIIKLPKYSLFELENGRKRMLASAGELQKGNELALPSKYVNFLYLASHYEKLKGSPEDNEQKQLFVEQHKHYLDEIIEQISEFSKRVILADANLDKVLSAYNKHRDKPIREQAENIIHLFTLTNLGAPAAFKYFDTTIDRKRYTSTKEVLDATLIHQSITGLYETRIDLSQLGGDGGGGSGSSGGTLNIEDEYRLHETSKEPDVSLGSTWLSDFPQAWAETGGMGLAVRQAPLIIPLKATSTPVSIKQYPMSQEARLGIKPHIQRLLDQGILVPCQSPWNTPLLPVKKPGTNDYRPVQDLREVNKRVEDIHPTVPNPYNLLSGLPPSHQWYTVLDLKDAFFCLRLHPTSQPLFAFEWRDPEMGISGQLTWTRLPQGFKNSPTLFNEALHRDLAGFRIQHPDLILLQYVDDLLLAATSELDCQQGTRALLQTLGDLGYRASAKKAQICQKQVKYLGYLLKEGQRWLTEARKETVMGQPIPKTPRQLREFLGTAGFCRLWIPGFAEMAAPLYPLTKPGTLFNWGPDQQKAFQEIKQALLTAPALGLPDLTKPFELFVDEKQGYAKGVLTQKLGPWRRPVAYLSKKLDPVAAGWPPCLRMVAAIAVLTKDAGKLTMGQPLVILAPHAVEALVKQPPDRWLSNARMTHYQALLLDTDRVQFGPVVALNPATLLPLPEEGLQHDCLDILAEAHGTRSDLMDQPLPDADHTWYTDGSSFLQEGQRKAGAAVTTETEVIWARALPAGTSAQRAELIALTQALKMAEGKKLNVYTDSRYAFATAHIHGEIYRRRGWLTSEGKEIKNKDEILALLKALFLPKRLSIIHCPGHQKGNSAEARGNRMADQAAREVATRETPETSTLLAGKRTADGSEFEKRTADGSEFESPKKKAKVE

SEQ ID NO: 2271 - protein, 2091 aa, synthetic construct
MPAAKRVKLDGGDKKYSIGLDIGTNSVGWAVITDEYKVPSKKFKVLGNTDRHSIKKNLIGALLFDSGETAEATRLKRTARRRYTRRKNRICYLQEIFSNEMAKVDDSFFHRLEESFLVEEDKKHERHPIFGNIVDEVAYHEKYPTIYHLRKKLVDSTDKADLRLIYLALAHMIKFRGHFLIEGDLNPDNSDVDKLFIQLVQTYNQLFEENPINASGVDAKAILSARLSKSRRLENLIAQLPGEKKNGLFGNLIALSLGLTPNFKSNFDLAEDAKLQLSKDTYDDDLDNLLAQIGDQYADLFLAAKNLSDAILLSDILRVNTEITKAPLSASMIKRYDEHHQDLTLLKALVRQQLPEKYKEIFFDQSKNGYAGYIDGGASQEEFYKFIKPILEKMDGTEELLVKLNREDLLRKQRTFDNGSIPHQIHLGELHAILRRQEDFYPFLKDNREKIEKILTFRIPYYVGPLARGNSRFAWMTRKSEETITPWNFEEVVDKGASAQSFIERMTNFDKNLPNEKVLPKHSLLYEYFTVYNELTKVKYVTEGMRKPAFLSGEQKKAIVDLLFKTNRKVTVKQLKEDYFKKIECFDSVEISGVEDRFNASLGTYHDLLKIIKDKDFLDNEENEDILEDIVLTLTLFEDREMIEERLKTYAHLFDDKVMKQLKRRRYTGWGRLSRKLINGIRDKQSGKTILDFLKSDGFANRNFMQLIHDDSLTFKEDIQKAQVSGQGDSLHEHIANLAGSPAIKKGILQTVKVVDELVKVMGRHKPENIVIEMARENQTTQKGQKNSRERMKRIEEGIKELGSQILKEHPVENTQLQNEKLYLYYLQNGRDMYVDQELDINRLSDYDVDHIVPQSFLKDDSIDNKVLTRSDKARGKSDNVPSEEVVKKMKNYWRQLLNAKLITQRKFDNLTKAERGGLSELDKAGFIKRQLVETRQITKHVAQILDSRMNTKYDENDKLIREVKVITLKSKLVSDFRKDFQFYKVREINNYHHAHDAYLNAVVGTALIKKYPKLESEFVYGDYKVYDVRKMIAKSEQEIGKATAKYFFYSNIMNFFKTEITLANGEIRKRPLIETNGETGEIVWDKGRDFATVRKVLSMPQVNIVKKTEVQTGGFSKESILPKRNSDKLIARKKDWDPKKYGGFDSPTVAYSVLVVAKVEKGKSKKLKSVKELLGITIMERSSFEKNPIDFLEAKGYKEVKKDLIIKLPKYSLFELENGRKRMLASAGELQKGNELALPSKYVNFLYLASHYEKLKGSPEDNEQKQLFVEQHKHYLDEIIEQISEFSKRVILADANLDKVLSAYNKHRDKPIREQAENIIHLFTLTNLGAPAAFKYFDTTIDRKRYTSTKEVLDATLIHQSITGLYETRIDLSQLGGDGGPAPGSSGGTLNIEDEYRLHETSKEPDVSLGSTWLSDFPQAWAETGGMGLAVRQAPLIIPLKATSTPVSIKQYPMSQEARLGIKPHIQRLLDQGILVPCQSPWNTPLLPVKKPGTNDYRPVQDLREVNKRVEDIHPTVPNPYNLLSGLPPSHQWYTVLDLKDAFFCLRLHPTSQPLFAFEWRDPEMGISGQLTWTRLPQGFKNSPTLFNEALHRDLAGFRIQHPDLILLQYVDDLLLAATSELDCQQGTRALLQTLGDLGYRASAKKAQICQKQVKYLGYLLKEGQRWLTEARKETVMGQPIPKTPRQLREFLGTAGFCRLWIPGFAEMAAPLYPLTKPGTLFNWGPDQQKAFQEIKQALLTAPALGLPDLTKPFELFVDEKQGYAKGVLTQKLGPWRRPVAYLSKKLDPVAAGWPPCLRMVAAIAVLTKDAGKLTMGQPLVILAPHAVEALVKQPPDRWLSNARMTHYQALLLDTDRVQFGPVVALNPATLLPLPEEGLQHDCLDILAEAHGTRSDLMDQPLPDADHTWYTDGSSFLQEGQRKAGAAVTTETEVIWARALPAGTSAQRAELIALTQALKMAEGKKLNVYTDSRYAFATAHIHGEIYRRRGWLTSEGKEIKNKDEILALLKALFLPKRLSIIHCPGHQKGNSAEARGNRMADQAAREVATRETPETSTLLAGKRTADGSEFEKRTADGSEFESPKKKAKVE

SEQ ID NO: 2272 - protein, 2094 aa, synthetic construct
MPAAKRVKLDGGDKKYSIGLDIGTNSVGWAVITDEYKVPSKKFKVLGNTDRHSIKKNLIGALLFDSGETAEATRLKRTARRRYTRRKNRICYLQEIFSNEMAKVDDSFFHRLEESFLVEEDKKHERHPIFGNIVDEVAYHEKYPTIYHLRKKLVDSTDKADLRLIYLALAHMIKFRGHFLIEGDLNPDNSDVDKLFIQLVQTYNQLFEENPINASGVDAKAILSARLSKSRRLENLIAQLPGEKKNGLFGNLIALSLGLTPNFKSNFDLAEDAKLQLSKDTYDDDLDNLLAQIGDQYADLFLAAKNLSDAILLSDILRVNTEITKAPLSASMIKRYDEHHQDLTLLKALVRQQLPEKYKEIFFDQSKNGYAGYIDGGASQEEFYKFIKPILEKMDGTEELLVKLNREDLLRKQRTFDNGSIPHQIHLGELHAILRRQEDFYPFLKDNREKIEKILTFRIPYYVGPLARGNSRFAWMTRKSEETITPWNFEEVVDKGASAQSFIERMTNFDKNLPNEKVLPKHSLLYEYFTVYNELTKVKYVTEGMRKPAFLSGEQKKAIVDLLFKTNRKVTVKQLKEDYFKKIECFDSVEISGVEDRFNASLGTYHDLLKIIKDKDFLDNEENEDILEDIVLTLTLFEDREMIEERLKTYAHLFDDKVMKQLKRRRYTGWGRLSRKLINGIRDKQSGKTILDFLKSDGFANRNFMQLIHDDSLTFKEDIQKAQVSGQGDSLHEHIANLAGSPAIKKGILQTVKVVDELVKVMGRHKPENIVIEMARENQTTQKGQKNSRERMKRIEEGIKELGSQILKEHPVENTQLQNEKLYLYYLQNGRDMYVDQELDINRLSDYDVDHIVPQSFLKDDSIDNKVLTRSDKARGKSDNVPSEEVVKKMKNYWRQLLNAKLITQRKFDNLTKAERGGLSELDKAGFIKRQLVETRQITKHVAQILDSRMNTKYDENDKLIREVKVITLKSKLVSDFRKDFQFYKVREINNYHHAHDAYLNAVVGTALIKKYPKLESEFVYGDYKVYDVRKMIAKSEQEIGKATAKYFFYSNIMNFFKTEITLANGEIRKRPLIETNGETGEIVWDKGRDFATVRKVLSMPQVNIVKKTEVQTGGFSKESILPKRNSDKLIARKKDWDPKKYGGFDSPTVAYSVLVVAKVEKGKSKKLKSVKELLGITIMERSSFEKNPIDFLEAKGYKEVKKDLIIKLPKYSLFELENGRKRMLASAGELQKGNELALPSKYVNFLYLASHYEKLKGSPEDNEQKQLFVEQHKHYLDEIIEQISEFSKRVILADANLDKVLSAYNKHRDKPIREQAENIIHLFTLTNLGAPAAFKYFDTTIDRKRYTSTKEVLDATLIHQSITGLYETRIDLSQLGGDGGGGSPAPGGGGGTLNIEDEYRLHETSKEPDVSLGSTWLSDFPQAWAETGGMGLAVRQAPLIIPLKATSTPVSIKQYPMSQEARLGIKPHIQRLLDQGILVPCQSPWNTPLLPVKKPGTNDYRPVQDLREVNKRVEDIHPTVPNPYNLLSGLPPSHQWYTVLDLKDAFFCLRLHPTSQPLFAFEWRDPEMGISGQLTWTRLPQGFKNSPTLFNEALHRDLAGFRIQHPDLILLQYVDDLLLAATSELDCQQGTRALLQTLGDLGYRASAKKAQICQKQVKYLGYLLKEGQRWLTEARKETVMGQPIPKTPRQLREFLGTAGFCRLWIPGFAEMAAPLYPLTKPGTLFNWGPDQQKAFQEIKQALLTAPALGLPDLTKPFELFVDEKQGYAKGVLTQKLGPWRRPVAYLSKKLDPVAAGWPPCLRMVAAIAVLTKDAGKLTMGQPLVILAPHAVEALVKQPPDRWLSNARMTHYQALLLDTDRVQFGPVVALNPATLLPLPEEGLQHDCLDILAEAHGTRSDLMDQPLPDADHTWYTDGSSFLQEGQRKAGAAVTTETEVIWARALPAGTSAQRAELIALTQALKMAEGKKLNVYTDSRYAFATAHIHGEIYRRRGWLTSEGKEIKNKDEILALLKALFLPKRLSIIHCPGHQKGNSAEARGNRMADQAAREVATRETPETSTLLAGKRTADGSEFEKRTADGSEFESPKKKAKVE

SEQ ID NO: 2273 - protein, 2096 aa, synthetic construct
MPAAKRVKLDGGDKKYSIGLDIGTNSVGWAVITDEYKVPSKKFKVLGNTDRHSIKKNLIGALLFDSGETAEATRLKRTARRRYTRRKNRICYLQEIFSNEMAKVDDSFFHRLEESFLVEEDKKHERHPIFGNIVDEVAYHEKYPTIYHLRKKLVDSTDKADLRLIYLALAHMIKFRGHFLIEGDLNPDNSDVDKLFIQLVQTYNQLFEENPINASGVDAKAILSARLSKSRRLENLIAQLPGEKKNGLFGNLIALSLGLTPNFKSNFDLAEDAKLQLSKDTYDDDLDNLLAQIGDQYADLFLAAKNLSDAILLSDILRVNTEITKAPLSASMIKRYDEHHQDLTLLKALVRQQLPEKYKEIFFDQSKNGYAGYIDGGASQEEFYKFIKPILEKMDGTEELLVKLNREDLLRKQRTFDNGSIPHQIHLGELHAILRRQEDFYPFLKDNREKIEKILTFRIPYYVGPLARGNSRFAWMTRKSEETITPWNFEEVVDKGASAQSFIERMTNFDKNLPNEKVLPKHSLLYEYFTVYNELTKVKYVTEGMRKPAFLSGEQKKAIVDLLFKTNRKVTVKQLKEDYFKKIECFDSVEISGVEDRFNASLGTYHDLLKIIKDKDFLDNEENEDILEDIVLTLTLFEDREMIEERLKTYAHLFDDKVMKQLKRRRYTGWGRLSRKLINGIRDKQSGKTILDFLKSDGFANRNFMQLIHDDSLTFKEDIQKAQVSGQGDSLHEHIANLAGSPAIKKGILQTVKVVDELVKVMGRHKPENIVIEMARENQTTQKGQKNSRERMKRIEEGIKELGSQILKEHPVENTQLQNEKLYLYYLQNGRDMYVDQELDINRLSDYDVDHIVPQSFLKDDSIDNKVLTRSDKARGKSDNVPSEEVVKKMKNYWRQLLNAKLITQRKFDNLTKAERGGLSELDKAGFIKRQLVETRQITKHVAQILDSRMNTKYDENDKLIREVKVITLKSKLVSDFRKDFQFYKVREINNYHHAHDAYLNAVVGTALIKKYPKLESEFVYGDYKVYDVRKMIAKSEQEIGKATAKYFFYSNIMNFFKTEITLANGEIRKRPLIETNGETGEIVWDKGRDFATVRKVLSMPQVNIVKKTEVQTGGFSKESILPKRNSDKLIARKKDWDPKKYGGFDSPTVAYSVLVVAKVEKGKSKKLKSVKELLGITIMERSSFEKNPIDFLEAKGYKEVKKDLIIKLPKYSLFELENGRKRMLASAGELQKGNELALPSKYVNFLYLASHYEKLKGSPEDNEQKQLFVEQHKHYLDEIIEQISEFSKRVILADANLDKVLSAYNKHRDKPIREQAENIIHLFTLTNLGAPAAFKYFDTTIDRKRYTSTKEVLDATLIHQSITGLYETRIDLSQLGGDGGGSSGGSEAAAKGGTLNIEDEYRLHETSKEPDVSLGSTWLSDFPQAWAETGGMGLAVRQAPLIIPLKATSTPVSIKQYPMSQEARLGIKPHIQRLLDQGILVPCQSPWNTPLLPVKKPGTNDYRPVQDLREVNKRVEDIHPTVPNPYNLLSGLPPSHQWYTVLDLKDAFFCLRLHPTSQPLFAFEWRDPEMGISGQLTWTRLPQGFKNSPTLFNEALHRDLAGFRIQHPDLILLQYVDDLLLAATSELDCQQGTRALLQTLGDLGYRASAKKAQICQKQVKYLGYLLKEGQRWLTEARKETVMGQPIPKTPRQLREFLGTAGFCRLWIPGFAEMAAPLYPLTKPGTLFNWGPDQQKAFQEIKQALLTAPALGLPDLTKPFELFVDEKQGYAKGVLTQKLGPWRRPVAYLSKKLDPVAAGWPPCLRMVAAIAVLTKDAGKLTMGQPLVILAPHAVEALVKQPPDRWLSNARMTHYQALLLDTDRVQFGPVVALNPATLLPLPEEGLQHDCLDILAEAHGTRSDLMDQPLPDADHTWYTDGSSFLQEGQRKAGAAVTTETEVIWARALPAGTSAQRAELIALTQALKMAEGKKLNVYTDSRYAFATAHIHGEIYRRRGWLTSEGKEIKNKDEILALLKALFLPKRLSIIHCPGHQKGNSAEARGNRMADQAAREVATRETPETSTLLAGKRTADGSEFEKRTADGSEFESPKKKAKVE

SEQ ID NO: 2274 - protein, 2094 aa, synthetic construct
MPAAKRVKLDGGDKKYSIGLDIGTNSVGWAVITDEYKVPSKKFKVLGNTDRHSIKKNLIGALLFDSGETAEATRLKRTARRRYTRRKNRICYLQEIFSNEMAKVDDSFFHRLEESFLVEEDKKHERHPIFGNIVDEVAYHEKYPTIYHLRKKLVDSTDKADLRLIYLALAHMIKFRGHFLIEGDLNPDNSDVDKLFIQLVQTYNQLFEENPINASGVDAKAILSARLSKSRRLENLIAQLPGEKKNGLFGNLIALSLGLTPNFKSNFDLAEDAKLQLSKDTYDDDLDNLLAQIGDQYADLFLAAKNLSDAILLSDILRVNTEITKAPLSASMIKRYDEHHQDLTLLKALVRQQLPEKYKEIFFDQSKNGYAGYIDGGASQEEFYKFIKPILEKMDGTEELLVKLNREDLLRKQRTFDNGSIPHQIHLGELHAILRRQEDFYPFLKDNREKIEKILTFRIPYYVGPLARGNSRFAWMTRKSEETITPWNFEEVVDKGASAQSFIERMTNFDKNLPNEKVLPKHSLLYEYFTVYNELTKVKYVTEGMRKPAFLSGEQKKAIVDLLFKTNRKVTVKQLKEDYFKKIECFDSVEISGVEDRFNASLGTYHDLLKIIKDKDFLDNEENEDILEDIVLTLTLFEDREMIEERLKTYAHLFDDKVMKQLKRRRYTGWGRLSRKLINGIRDKQSGKTILDFLKSDGFANRNFMQLIHDDSLTFKEDIQKAQVSGQGDSLHEHIANLAGSPAIKKGILQTVKVVDELVKVMGRHKPENIVIEMARENQTTQKGQKNSRERMKRIEEGIKELGSQILKEHPVENTQLQNEKLYLYYLQNGRDMYVDQELDINRLSDYDVDHIVPQSFLKDDSIDNKVLTRSDKARGKSDNVPSEEVVKKMKNYWRQLLNAKLITQRKFDNLTKAERGGLSELDKAGFIKRQLVETRQITKHVAQILDSRMNTKYDENDKLIREVKVITLKSKLVSDFRKDFQFYKVREINNYHHAHDAYLNAVVGTALIKKYPKLESEFVYGDYKVYDVRKMIAKSEQEIGKATAKYFFYSNIMNFFKTEITLANGEIRKRPLIETNGETGEIVWDKGRDFATVRKVLSMPQVNIVKKTEVQTGGFSKESILPKRNSDKLIARKKDWDPKKYGGFDSPTVAYSVLVVAKVEKGKSKKLKSVKELLGITIMERSSFEKNPIDFLEAKGYKEVKKDLIIKLPKYSLFELENGRKRMLASAGELQKGNELALPSKYVNFLYLASHYEKLKGSPEDNEQKQLFVEQHKHYLDEIIEQISEFSKRVILADANLDKVLSAYNKHRDKPIREQAENIIHLFTLTNLGAPAAFKYFDTTIDRKRYTSTKEVLDATLIHQSITGLYETRIDLSQLGGDGGGGSGGSGGSGGTLNIEDEYRLHETSKEPDVSLGSTWLSDFPQAWAETGGMGLAVRQAPLIIPLKATSTPVSIKQYPMSQEARLGIKPHIQRLLDQGILVPCQSPWNTPLLPVKKPGTNDYRPVQDLREVNKRVEDIHPTVPNPYNLLSGLPPSHQWYTVLDLKDAFFCLRLHPTSQPLFAFEWRDPEMGISGQLTWTRLPQGFKNSPTLFNEALHRDLAGFRIQHPDLILLQYVDDLLLAATSELDCQQGTRALLQTLGDLGYRASAKKAQICQKQVKYLGYLLKEGQRWLTEARKETVMGQPIPKTPRQLREFLGTAGFCRLWIPGFAEMAAPLYPLTKPGTLFNWGPDQQKAFQEIKQALLTAPALGLPDLTKPFELFVDEKQGYAKGVLTQKLGPWRRPVAYLSKKLDPVAAGWPPCLRMVAAIAVLTKDAGKLTMGQPLVILAPHAVEALVKQPPDRWLSNARMTHYQALLLDTDRVQFGPVVALNPATLLPLPEEGLQHDCLDILAEAHGTRSDLMDQPLPDADHTWYTDGSSFLQEGQRKAGAAVTTETEVIWARALPAGTSAQRAELIALTQALKMAEGKKLNVYTDSRYAFATAHIHGEIYRRRGWLTSEGKEIKNKDEILALLKALFLPKRLSIIHCPGHQKGNSAEARGNRMADQAAREVATRETPETSTLLAGKRTADGSEFEKRTADGSEFESPKKKAKVE

SEQ ID NO: 2275 - protein, 2096 aa, synthetic construct
MPAAKRVKLDGGDKKYSIGLDIGTNSVGWAVITDEYKVPSKKFKVLGNTDRHSIKKNLIGALLFDSGETAEATRLKRTARRRYTRRKNRICYLQEIFSNEMAKVDDSFFHRLEESFLVEEDKKHERHPIFGNIVDEVAYHEKYPTIYHLRKKLVDSTDKADLRLIYLALAHMIKFRGHFLIEGDLNPDNSDVDKLFIQLVQTYNQLFEENPINASGVDAKAILSARLSKSRRLENLIAQLPGEKKNGLFGNLIALSLGLTPNFKSNFDLAEDAKLQLSKDTYDDDLDNLLAQIGDQYADLFLAAKNLSDAILLSDILRVNTEITKAPLSASMIKRYDEHHQDLTLLKALVRQQLPEKYKEIFFDQSKNGYAGYIDGGASQEEFYKFIKPILEKMDGTEELLVKLNREDLLRKQRTFDNGSIPHQIHLGELHAILRRQEDFYPFLKDNREKIEKILTFRIPYYVGPLARGNSRFAWMTRKSEETITPWNFEEVVDKGASAQSFIERMTNFDKNLPNEKVLPKHSLLYEYFTVYNELTKVKYVTEGMRKPAFLSGEQKKAIVDLLFKTNRKVTVKQLKEDYFKKIECFDSVEISGVEDRFNASLGTYHDLLKIIKDKDFLDNEENEDILEDIVLTLTLFEDREMIEERLKTYAHLFDDKVMKQLKRRRYTGWGRLSRKLINGIRDKQSGKTILDFLKSDGFANRNFMQLIHDDSLTFKEDIQKAQVSGQGDSLHEHIANLAGSPAIKKGILQTVKVVDELVKVMGRHKPENIVIEMARENQTTQKGQKNSRERMKRIEEGIKELGSQILKEHPVENTQLQNEKLYLYYLQNGRDMYVDQELDINRLSDYDVDHIVPQSFLKDDSIDNKVLTRSDKARGKSDNVPSEEVVKKMKNYWRQLLNAKLITQRKFDNLTKAERGGLSELDKAGFIKRQLVETRQITKHVAQILDSRMNTKYDENDKLIREVKVITLKSKLVSDFRKDFQFYKVREINNYHHAHDAYLNAVVGTALIKKYPKLESEFVYGDYKVYDVRKMIAKSEQEIGKATAKYFFYSNIMNFFKTEITLANGEIRKRPLIETNGETGEIVWDKGRDFATVRKVLSMPQVNIVKKTEVQTGGFSKESILPKRNSDKLIARKKDWDPKKYGGFDSPTVAYSVLVVAKVEKGKSKKLKSVKELLGITIMERSSFEKNPIDFLEAKGYKEVKKDLIIKLPKYSLFELENGRKRMLASAGELQKGNELALPSKYVNFLYLASHYEKLKGSPEDNEQKQLFVEQHKHYLDEIIEQISEFSKRVILADANLDKVLSAYNKHRDKPIREQAENIIHLFTLTNLGAPAAFKYFDTTIDRKRYTSTKEVLDATLIHQSITGLYETRIDLSQLGGDGGGGGEAAAKGGSGGTLNIEDEYRLHETSKEPDVSLGSTWLSDFPQAWAETGGMGLAVRQAPLIIPLKATSTPVSIKQYPMSQEARLGIKPHIQRLLDQGILVPCQSPWNTPLLPVKKPGTNDYRPVQDLREVNKRVEDIHPTVPNPYNLLSGLPPSHQWYTVLDLKDAFFCLRLHPTSQPLFAFEWRDPEMGISGQLTWTRLPQGFKNSPTLFNEALHRDLAGFRIQHPDLILLQYVDDLLLAATSELDCQQGTRALLQTLGDLGYRASAKKAQICQKQVKYLGYLLKEGQRWLTEARKETVMGQPIPKTPRQLREFLGTAGFCRLWIPGFAEMAAPLYPLTKPGTLFNWGPDQQKAFQEIKQALLTAPALGLPDLTKPFELFVDEKQGYAKGVLTQKLGPWRRPVAYLSKKLDPVAAGWPPCLRMVAAIAVLTKDAGKLTMGQPLVILAPHAVEALVKQPPDRWLSNARMTHYQALLLDTDRVQFGPVVALNPATLLPLPEEGLQHDCLDILAEAHGTRSDLMDQPLPDADHTWYTDGSSFLQEGQRKAGAAVTTETEVIWARALPAGTSAQRAELIALTQALKMAEGKKLNVYTDSRYAFATAHIHGEIYRRRGWLTSEGKEIKNKDEILALLKALFLPKRLSIIHCPGHQKGNSAEARGNRMADQAAREVATRETPETSTLLAGKRTADGSEFEKRTADGSEFESPKKKAKVE

SEQ ID NO: 2276 - protein, 2095 aa, synthetic construct
MPAAKRVKLDGGDKKYSIGLDIGTNSVGWAVITDEYKVPSKKFKVLGNTDRHSIKKNLIGALLFDSGETAEATRLKRTARRRYTRRKNRICYLQEIFSNEMAKVDDSFFHRLEESFLVEEDKKHERHPIFGNIVDEVAYHEKYPTIYHLRKKLVDSTDKADLRLIYLALAHMIKFRGHFLIEGDLNPDNSDVDKLFIQLVQTYNQLFEENPINASGVDAKAILSARLSKSRRLENLIAQLPGEKKNGLFGNLIALSLGLTPNFKSNFDLAEDAKLQLSKDTYDDDLDNLLAQIGDQYADLFLAAKNLSDAILLSDILRVNTEITKAPLSASMIKRYDEHHQDLTLLKALVRQQLPEKYKEIFFDQSKNGYAGYIDGGASQEEFYKFIKPILEKMDGTEELLVKLNREDLLRKQRTFDNGSIPHQIHLGELHAILRRQEDFYPFLKDNREKIEKILTFRIPYYVGPLARGNSRFAWMTRKSEETITPWNFEEVVDKGASAQSFIERMTNFDKNLPNEKVLPKHSLLYEYFTVYNELTKVKYVTEGMRKPAFLSGEQKKAIVDLLFKTNRKVTVKQLKEDYFKKIECFDSVEISGVEDRFNASLGTYHDLLKIIKDKDFLDNEENEDILEDIVLTLTLFEDREMIEERLKTYAHLFDDKVMKQLKRRRYTGWGRLSRKLINGIRDKQSGKTILDFLKSDGFANRNFMQLIHDDSLTFKEDIQKAQVSGQGDSLHEHIANLAGSPAIKKGILQTVKVVDELVKVMGRHKPENIVIEMARENQTTQKGQKNSRERMKRIEEGIKELGSQILKEHPVENTQLQNEKLYLYYLQNGRDMYVDQELDINRLSDYDVDHIVPQSFLKDDSIDNKVLTRSDKARGKSDNVPSEEVVKKMKNYWRQLLNAKLITQRKFDNLTKAERGGLSELDKAGFIKRQLVETRQITKHVAQILDSRMNTKYDENDKLIREVKVITLKSKLVSDFRKDFQFYKVREINNYHHAHDAYLNAVVGTALIKKYPKLESEFVYGDYKVYDVRKMIAKSEQEIGKATAKYFFYSNIMNFFKTEITLANGEIRKRPLIETNGETGEIVWDKGRDFATVRKVLSMPQVNIVKKTEVQTGGFSKESILPKRNSDKLIARKKDWDPKKYGGFDSPTVAYSVLVVAKVEKGKSKKLKSVKELLGITIMERSSFEKNPIDFLEAKGYKEVKKDLIIKLPKYSLFELENGRKRMLASAGELQKGNELALPSKYVNFLYLASHYEKLKGSPEDNEQKQLFVEQHKHYLDEIIEQISEFSKRVILADANLDKVLSAYNKHRDKPIREQAENIIHLFTLTNLGAPAAFKYFDTTIDRKRYTSTKEVLDATLIHQSITGLYETRIDLSQLGGDGGGGGGSGGGGSGGTLNIEDEYRLHETSKEPDVSLGSTWLSDFPQAWAETGGMGLAVRQAPLIIPLKATSTPVSIKQYPMSQEARLGIKPHIQRLLDQGILVPCQSPWNTPLLPVKKPGTNDYRPVQDLREVNKRVEDIHPTVPNPYNLLSGLPPSHQWYTVLDLKDAFFCLRLHPTSQPLFAFEWRDPEMGISGQLTWTRLPQGFKNSPTLFNEALHRDLAGFRIQHPDLILLQYVDDLLLAATSELDCQQGTRALLQTLGDLGYRASAKKAQICQKQVKYLGYLLKEGQRWLTEARKETVMGQPIPKTPRQLREFLGTAGFCRLWIPGFAEMAAPLYPLTKPGTLFNWGPDQQKAFQEIKQALLTAPALGLPDLTKPFELFVDEKQGYAKGVLTQKLGPWRRPVAYLSKKLDPVAAGWPPCLRMVAAIAVLTKDAGKLTMGQPLVILAPHAVEALVKQPPDRWLSNARMTHYQALLLDTDRVQFGPVVALNPATLLPLPEEGLQHDCLDILAEAHGTRSDLMDQPLPDADHTWYTDGSSFLQEGQRKAGAAVTTETEVIWARALPAGTSAQRAELIALTQALKMAEGKKLNVYTDSRYAFATAHIHGEIYRRRGWLTSEGKEIKNKDEILALLKALFLPKRLSIIHCPGHQKGNSAEARGNRMADQAAREVATRETPETSTLLAGKRTADGSEFEKRTADGSEFESPKKKAKVE

SEQ ID NO: 2277 - protein, 2096 aa, synthetic construct
MPAAKRVKLDGGDKKYSIGLDIGTNSVGWAVITDEYKVPSKKFKVLGNTDRHSIKKNLIGALLFDSGETAEATRLKRTARRRYTRRKNRICYLQEIFSNEMAKVDDSFFHRLEESFLVEEDKKHERHPIFGNIVDEVAYHEKYPTIYHLRKKLVDSTDKADLRLIYLALAHMIKFRGHFLIEGDLNPDNSDVDKLFIQLVQTYNQLFEENPINASGVDAKAILSARLSKSRRLENLIAQLPGEKKNGLFGNLIALSLGLTPNFKSNFDLAEDAKLQLSKDTYDDDLDNLLAQIGDQYADLFLAAKNLSDAILLSDILRVNTEITKAPLSASMIKRYDEHHQDLTLLKALVRQQLPEKYKEIFFDQSKNGYAGYIDGGASQEEFYKFIKPILEKMDGTEELLVKLNREDLLRKQRTFDNGSIPHQIHLGELHAILRRQEDFYPFLKDNREKIEKILTFRIPYYVGPLARGNSRFAWMTRKSEETITPWNFEEVVDKGASAQSFIERMTNFDKNLPNEKVLPKHSLLYEYFTVYNELTKVKYVTEGMRKPAFLSGEQKKAIVDLLFKTNRKVTVKQLKEDYFKKIECFDSVEISGVEDRFNASLGTYHDLLKIIKDKDFLDNEENEDILEDIVLTLTLFEDREMIEERLKTYAHLFDDKVMKQLKRRRYTGWGRLSRKLINGIRDKQSGKTILDFLKSDGFANRNFMQLIHDDSLTFKEDIQKAQVSGQGDSLHEHIANLAGSPAIKKGILQTVKVVDELVKVMGRHKPENIVIEMARENQTTQKGQKNSRERMKRIEEGIKELGSQILKEHPVENTQLQNEKLYLYYLQNGRDMYVDQELDINRLSDYDVDHIVPQSFLKDDSIDNKVLTRSDKARGKSDNVPSEEVVKKMKNYWRQLLNAKLITQRKFDNLTKAERGGLSELDKAGFIKRQLVETRQITKHVAQILDSRMNTKYDENDKLIREVKVITLKSKLVSDFRKDFQFYKVREINNYHHAHDAYLNAVVGTALIKKYPKLESEFVYGDYKVYDVRKMIAKSEQEIGKATAKYFFYSNIMNFFKTEITLANGEIRKRPLIETNGETGEIVWDKGRDFATVRKVLSMPQVNIVKKTEVQTGGFSKESILPKRNSDKLIARKKDWDPKKYGGFDSPTVAYSVLVVAKVEKGKSKKLKSVKELLGITIMERSSFEKNPIDFLEAKGYKEVKKDLIIKLPKYSLFELENGRKRMLASAGELQKGNELALPSKYVNFLYLASHYEKLKGSPEDNEQKQLFVEQHKHYLDEIIEQISEFSKRVILADANLDKVLSAYNKHRDKPIREQAENIIHLFTLTNLGAPAAFKYFDTTIDRKRYTSTKEVLDATLIHQSITGLYETRIDLSQLGGDGGEAAAKPAPGGSGGTLNIEDEYRLHETSKEPDVSLGSTWLSDFPQAWAETGGMGLAVRQAPLIIPLKATSTPVSIKQYPMSQEARLGIKPHIQRLLDQGILVPCQSPWNTPLLPVKKPGTNDYRPVQDLREVNKRVEDIHPTVPNPYNLLSGLPPSHQWYTVLDLKDAFFCLRLHPTSQPLFAFEWRDPEMGISGQLTWTRLPQGFKNSPTLFNEALHRDLAGFRIQHPDLILLQYVDDLLLAATSELDCQQGTRALLQTLGDLGYRASAKKAQICQKQVKYLGYLLKEGQRWLTEARKETVMGQPIPKTPRQLREFLGTAGFCRLWIPGFAEMAAPLYPLTKPGTLFNWGPDQQKAFQEIKQALLTAPALGLPDLTKPFELFVDEKQGYAKGVLTQKLGPWRRPVAYLSKKLDPVAAGWPPCLRMVAAIAVLTKDAGKLTMGQPLVILAPHAVEALVKQPPDRWLSNARMTHYQALLLDTDRVQFGPVVALNPATLLPLPEEGLQHDCLDILAEAHGTRSDLMDQPLPDADHTWYTDGSSFLQEGQRKAGAAVTTETEVIWARALPAGTSAQRAELIALTQALKMAEGKKLNVYTDSRYAFATAHIHGEIYRRRGWLTSEGKEIKNKDEILALLKALFLPKRLSIIHCPGHQKGNSAEARGNRMADQAAREVATRETPETSTLLAGKRTADGSEFEKRTADGSEFESPKKKAKVE

SEQ ID NO: 2278 - protein, 2096 aa, synthetic construct
MPAAKRVKLDGGDKKYSIGLDIGTNSVGWAVITDEYKVPSKKFKVLGNTDRHSIKKNLIGALLFDSGETAEATRLKRTARRRYTRRKNRICYLQEIFSNEMAKVDDSFFHRLEESFLVEEDKKHERHPIFGNIVDEVAYHEKYPTIYHLRKKLVDSTDKADLRLIYLALAHMIKFRGHFLIEGDLNPDNSDVDKLFIQLVQTYNQLFEENPINASGVDAKAILSARLSKSRRLENLIAQLPGEKKNGLFGNLIALSLGLTPNFKSNFDLAEDAKLQLSKDTYDDDLDNLLAQIGDQYADLFLAAKNLSDAILLSDILRVNTEITKAPLSASMIKRYDEHHQDLTLLKALVRQQLPEKYKEIFFDQSKNGYAGYIDGGASQEEFYKFIKPILEKMDGTEELLVKLNREDLLRKQRTFDNGSIPHQIHLGELHAILRRQEDFYPFLKDNREKIEKILTFRIPYYVGPLARGNSRFAWMTRKSEETITPWNFEEVVDKGASAQSFIERMTNFDKNLPNEKVLPKHSLLYEYFTVYNELTKVKYVTEGMRKPAFLSGEQKKAIVDLLFKTNRKVTVKQLKEDYFKKIECFDSVEISGVEDRFNASLGTYHDLLKIIKDKDFLDNEENEDILEDIVLTLTLFEDREMIEERLKTYAHLFDDKVMKQLKRRRYTGWGRLSRKLINGIRDKQSGKTILDFLKSDGFANRNFMQLIHDDSLTFKEDIQKAQVSGQGDSLHEHIANLAGSPAIKKGILQTVKVVDELVKVMGRHKPENIVIEMARENQTTQKGQKNSRERMKRIEEGIKELGSQILKEHPVENTQLQNEKLYLYYLQNGRDMYVDQELDINRLSDYDVDHIVPQSFLKDDSIDNKVLTRSDKARGKSDNVPSEEVVKKMKNYWRQLLNAKLITQRKFDNLTKAERGGLSELDKAGFIKRQLVETRQITKHVAQILDSRMNTKYDENDKLIREVKVITLKSKLVSDFRKDFQFYKVREINNYHHAHDAYLNAVVGTALIKKYPKLESEFVYGDYKVYDVRKMIAKSEQEIGKATAKYFFYSNIMNFFKTEITLANGEIRKRPLIETNGETGEIVWDKGRDFATVRKVLSMPQVNIVKKTEVQTGGFSKESILPKRNSDKLIARKKDWDPKKYGGFDSPTVAYSVLVVAKVEKGKSKKLKSVKELLGITIMERSSFEKNPIDFLEAKGYKEVKKDLIIKLPKYSLFELENGRKRMLASAGELQKGNELALPSKYVNFLYLASHYEKLKGSPEDNEQKQLFVEQHKHYLDEIIEQISEFSKRVILADANLDKVLSAYNKHRDKPIREQAENIIHLFTLTNLGAPAAFKYFDTTIDRKRYTSTKEVLDATLIHQSITGLYETRIDLSQLGGDGGEAAAKGGGPAPGGTLNIEDEYRLHETSKEPDVSLGSTWLSDFPQAWAETGGMGLAVRQAPLIIPLKATSTPVSIKQYPMSQEARLGIKPHIQRLLDQGILVPCQSPWNTPLLPVKKPGTNDYRPVQDLREVNKRVEDIHPTVPNPYNLLSGLPPSHQWYTVLDLKDAFFCLRLHPTSQPLFAFEWRDPEMGISGQLTWTRLPQGFKNSPTLFNEALHRDLAGFRIQHPDLILLQYVDDLLLAATSELDCQQGTRALLQTLGDLGYRASAKKAQICQKQVKYLGYLLKEGQRWLTEARKETVMGQPIPKTPRQLREFLGTAGFCRLWIPGFAEMAAPLYPLTKPGTLFNWGPDQQKAFQEIKQALLTAPALGLPDLTKPFELFVDEKQGYAKGVLTQKLGPWRRPVAYLSKKLDPVAAGWPPCLRMVAAIAVLTKDAGKLTMGQPLVILAPHAVEALVKQPPDRWLSNARMTHYQALLLDTDRVQFGPVVALNPATLLPLPEEGLQHDCLDILAEAHGTRSDLMDQPLPDADHTWYTDGSSFLQEGQRKAGAAVTTETEVIWARALPAGTSAQRAELIALTQALKMAEGKKLNVYTDSRYAFATAHIHGEIYRRRGWLTSEGKEIKNKDEILALLKALFLPKRLSIIHCPGHQKGNSAEARGNRMADQAAREVATRETPETSTLLAGKRTADGSEFEKRTADGSEFESPKKKAKVE

SEQ ID NO: 2279 - protein, 2096 aa, synthetic construct
MPAAKRVKLDGGDKKYSIGLDIGTNSVGWAVITDEYKVPSKKFKVLGNTDRHSIKKNLIGALLFDSGETAEATRLKRTARRRYTRRKNRICYLQEIFSNEMAKVDDSFFHRLEESFLVEEDKKHERHPIFGNIVDEVAYHEKYPTIYHLRKKLVDSTDKADLRLIYLALAHMIKFRGHFLIEGDLNPDNSDVDKLFIQLVQTYNQLFEENPINASGVDAKAILSARLSKSRRLENLIAQLPGEKKNGLFGNLIALSLGLTPNFKSNFDLAEDAKLQLSKDTYDDDLDNLLAQIGDQYADLFLAAKNLSDAILLSDILRVNTEITKAPLSASMIKRYDEHHQDLTLLKALVRQQLPEKYKEIFFDQSKNGYAGYIDGGASQEEFYKFIKPILEKMDGTEELLVKLNREDLLRKQRTFDNGSIPHQIHLGELHAILRRQEDFYPFLKDNREKIEKILTFRIPYYVGPLARGNSRFAWMTRKSEETITPWNFEEVVDKGASAQSFIERMTNFDKNLPNEKVLPKHSLLYEYFTVYNELTKVKYVTEGMRKPAFLSGEQKKAIVDLLFKTNRKVTVKQLKEDYFKKIECFDSVEISGVEDRFNASLGTYHDLLKIIKDKDFLDNEENEDILEDIVLTLTLFEDREMIEERLKTYAHLFDDKVMKQLKRRRYTGWGRLSRKLINGIRDKQSGKTILDFLKSDGFANRNFMQLIHDDSLTFKEDIQKAQVSGQGDSLHEHIANLAGSPAIKKGILQTVKVVDELVKVMGRHKPENIVIEMARENQTTQKGQKNSRERMKRIEEGIKELGSQILKEHPVENTQLQNEKLYLYYLQNGRDMYVDQELDINRLSDYDVDHIVPQSFLKDDSIDNKVLTRSDKARGKSDNVPSEEVVKKMKNYWRQLLNAKLITQRKFDNLTKAERGGLSELDKAGFIKRQLVETRQITKHVAQILDSRMNTKYDENDKLIREVKVITLKSKLVSDFRKDFQFYKVREINNYHHAHDAYLNAVVGTALIKKYPKLESEFVYGDYKVYDVRKMIAKSEQEIGKATAKYFFYSNIMNFFKTEITLANGEIRKRPLIETNGETGEIVWDKGRDFATVRKVLSMPQVNIVKKTEVQTGGFSKESILPKRNSDKLIARKKDWDPKKYGGFDSPTVAYSVLVVAKVEKGKSKKLKSVKELLGITIMERSSFEKNPIDFLEAKGYKEVKKDLIIKLPKYSLFELENGRKRMLASAGELQKGNELALPSKYVNFLYLASHYEKLKGSPEDNEQKQLFVEQHKHYLDEIIEQISEFSKRVILADANLDKVLSAYNKHRDKPIREQAENIIHLFTLTNLGAPAAFKYFDTTIDRKRYTSTKEVLDATLIHQSITGLYETRIDLSQLGGDGGGGGEAAAKPAPGGTLNIEDEYRLHETSKEPDVSLGSTWLSDFPQAWAETGGMGLAVRQAPLIIPLKATSTPVSIKQYPMSQEARLGIKPHIQRLLDQGILVPCQSPWNTPLLPVKKPGTNDYRPVQDLREVNKRVEDIHPTVPNPYNLLSGLPPSHQWYTVLDLKDAFFCLRLHPTSQPLFAFEWRDPEMGISGQLTWTRLPQGFKNSPTLFNEALHRDLAGFRIQHPDLILLQYVDDLLLAATSELDCQQGTRALLQTLGDLGYRASAKKAQICQKQVKYLGYLLKEGQRWLTEARKETVMGQPIPKTPRQLREFLGTAGFCRLWIPGFAEMAAPLYPLTKPGTLFNWGPDQQKAFQEIKQALLTAPALGLPDLTKPFELFVDEKQGYAKGVLTQKLGPWRRPVAYLSKKLDPVAAGWPPCLRMVAAIAVLTKDAGKLTMGQPLVILAPHAVEALVKQPPDRWLSNARMTHYQALLLDTDRVQFGPVVALNPATLLPLPEEGLQHDCLDILAEAHGTRSDLMDQPLPDADHTWYTDGSSFLQEGQRKAGAAVTTETEVIWARALPAGTSAQRAELIALTQALKMAEGKKLNVYTDSRYAFATAHIHGEIYRRRGWLTSEGKEIKNKDEILALLKALFLPKRLSIIHCPGHQKGNSAEARGNRMADQAAREVATRETPETSTLLAGKRTADGSEFEKRTADGSEFESPKKKAKVE

SEQ ID NO: 2280 - protein, 2100 aa, synthetic construct
MPAAKRVKLDGGDKKYSIGLDIGTNSVGWAVITDEYKVPSKKFKVLGNTDRHSIKKNLIGALLFDSGETAEATRLKRTARRRYTRRKNRICYLQEIFSNEMAKVDDSFFHRLEESFLVEEDKKHERHPIFGNIVDEVAYHEKYPTIYHLRKKLVDSTDKADLRLIYLALAHMIKFRGHFLIEGDLNPDNSDVDKLFIQLVQTYNQLFEENPINASGVDAKAILSARLSKSRRLENLIAQLPGEKKNGLFGNLIALSLGLTPNFKSNFDLAEDAKLQLSKDTYDDDLDNLLAQIGDQYADLFLAAKNLSDAILLSDILRVNTEITKAPLSASMIKRYDEHHQDLTLLKALVRQQLPEKYKEIFFDQSKNGYAGYIDGGASQEEFYKFIKPILEKMDGTEELLVKLNREDLLRKQRTFDNGSIPHQIHLGELHAILRRQEDFYPFLKDNREKIEKILTFRIPYYVGPLARGNSRFAWMTRKSEETITPWNFEEVVDKGASAQSFIERMTNFDKNLPNEKVLPKHSLLYEYFTVYNELTKVKYVTEGMRKPAFLSGEQKKAIVDLLFKTNRKVTVKQLKEDYFKKIECFDSVEISGVEDRFNASLGTYHDLLKIIKDKDFLDNEENEDILEDIVLTLTLFEDREMIEERLKTYAHLFDDKVMKQLKRRRYTGWGRLSRKLINGIRDKQSGKTILDFLKSDGFANRNFMQLIHDDSLTFKEDIQKAQVSGQGDSLHEHIANLAGSPAIKKGILQTVKVVDELVKVMGRHKPENIVIEMARENQTTQKGQKNSRERMKRIEEGIKELGSQILKEHPVENTQLQNEKLYLYYLQNGRDMYVDQELDINRLSDYDVDHIVPQSFLKDDSIDNKVLTRSDKARGKSDNVPSEEVVKKMKNYWRQLLNAKLITQRKFDNLTKAERGGLSELDKAGFIKRQLVETRQITKHVAQILDSRMNTKYDENDKLIREVKVITLKSKLVSDFRKDFQFYKVREINNYHHAHDAYLNAVVGTALIKKYPKLESEFVYGDYKVYDVRKMIAKSEQEIGKATAKYFFYSNIMNFFKTEITLANGEIRKRPLIETNGETGEIVWDKGRDFATVRKVLSMPQVNIVKKTEVQTGGFSKESILPKRNSDKLIARKKDWDPKKYGGFDSPTVAYSVLVVAKVEKGKSKKLKSVKELLGITIMERSSFEKNPIDFLEAKGYKEVKKDLIIKLPKYSLFELENGRKRMLASAGELQKGNELALPSKYVNFLYLASHYEKLKGSPEDNEQKQLFVEQHKHYLDEIIEQISEFSKRVILADANLDKVLSAYNKHRDKPIREQAENIIHLFTLTNLGAPAAFKYFDTTIDRKRYTSTKEVLDATLIHQSITGLYETRIDLSQLGGDGGGSSGSSGSSGSSGSSGGTLNIEDEYRLHETSKEPDVSLGSTWLSDFPQAWAETGGMGLAVRQAPLIIPLKATSTPVSIKQYPMSQEARLGIKPHIQRLLDQGILVPCQSPWNTPLLPVKKPGTNDYRPVQDLREVNKRVEDIHPTVPNPYNLLSGLPPSHQWYTVLDLKDAFFCLRLHPTSQPLFAFEWRDPEMGISGQLTWTRLPQGFKNSPTLFNEALHRDLAGFRIQHPDLILLQYVDDLLLAATSELDCQQGTRALLQTLGDLGYRASAKKAQICQKQVKYLGYLLKEGQRWLTEARKETVMGQPIPKTPRQLREFLGTAGFCRLWIPGFAEMAAPLYPLTKPGTLFNWGPDQQKAFQEIKQALLTAPALGLPDLTKPFELFVDEKQGYAKGVLTQKLGPWRRPVAYLSKKLDPVAAGWPPCLRMVAAIAVLTKDAGKLTMGQPLVILAPHAVEALVKQPPDRWLSNARMTHYQALLLDTDRVQFGPVVALNPATLLPLPEEGLQHDCLDILAEAHGTRSDLMDQPLPDADHTWYTDGSSFLQEGQRKAGAAVTTETEVIWARALPAGTSAQRAELIALTQALKMAEGKKLNVYTDSRYAFATAHIHGEIYRRRGWLTSEGKEIKNKDEILALLKALFLPKRLSIIHCPGHQKGNSAEARGNRMADQAAREVATRETPETSTLLAGKRTADGSEFEKRTADGSEFESPKKKAKVE

SEQ ID NO: 2281 - protein, 2093 aa, synthetic construct
MPAAKRVKLDGGDKKYSIGLDIGTNSVGWAVITDEYKVPSKKFKVLGNTDRHSIKKNLIGALLFDSGETAEATRLKRTARRRYTRRKNRICYLQEIFSNEMAKVDDSFFHRLEESFLVEEDKKHERHPIFGNIVDEVAYHEKYPTIYHLRKKLVDSTDKADLRLIYLALAHMIKFRGHFLIEGDLNPDNSDVDKLFIQLVQTYNQLFEENPINASGVDAKAILSARLSKSRRLENLIAQLPGEKKNGLFGNLIALSLGLTPNFKSNFDLAEDAKLQLSKDTYDDDLDNLLAQIGDQYADLFLAAKNLSDAILLSDILRVNTEITKAPLSASMIKRYDEHHQDLTLLKALVRQQLPEKYKEIFFDQSKNGYAGYIDGGASQEEFYKFIKPILEKMDGTEELLVKLNREDLLRKQRTFDNGSIPHQIHLGELHAILRRQEDFYPFLKDNREKIEKILTFRIPYYVGPLARGNSRFAWMTRKSEETITPWNFEEVVDKGASAQSFIERMTNFDKNLPNEKVLPKHSLLYEYFTVYNELTKVKYVTEGMRKPAFLSGEQKKAIVDLLFKTNRKVTVKQLKEDYFKKIECFDSVEISGVEDRFNASLGTYHDLLKIIKDKDFLDNEENEDILEDIVLTLTLFEDREMIEERLKTYAHLFDDKVMKQLKRRRYTGWGRLSRKLINGIRDKQSGKTILDFLKSDGFANRNFMQLIHDDSLTFKEDIQKAQVSGQGDSLHEHIANLAGSPAIKKGILQTVKVVDELVKVMGRHKPENIVIEMARENQTTQKGQKNSRERMKRIEEGIKELGSQILKEHPVENTQLQNEKLYLYYLQNGRDMYVDQELDINRLSDYDVDHIVPQSFLKDDSIDNKVLTRSDKARGKSDNVPSEEVVKKMKNYWRQLLNAKLITQRKFDNLTKAERGGLSELDKAGFIKRQLVETRQITKHVAQILDSRMNTKYDENDKLIREVKVITLKSKLVSDFRKDFQFYKVREINNYHHAHDAYLNAVVGTALIKKYPKLESEFVYGDYKVYDVRKMIAKSEQEIGKATAKYFFYSNIMNFFKTEITLANGEIRKRPLIETNGETGEIVWDKGRDFATVRKVLSMPQVNIVKKTEVQTGGFSKESILPKRNSDKLIARKKDWDPKKYGGFDSPTVAYSVLVVAKVEKGKSKKLKSVKELLGITIMERSSFEKNPIDFLEAKGYKEVKKDLIIKLPKYSLFELENGRKRMLASAGELQKGNELALPSKYVNFLYLASHYEKLKGSPEDNEQKQLFVEQHKHYLDEIIEQISEFSKRVILADANLDKVLSAYNKHRDKPIREQAENIIHLFTLTNLGAPAAFKYFDTTIDRKRYTSTKEVLDATLIHQSITGLYETRIDLSQLGGDGGEAAAKGGGGGTLNIEDEYRLHETSKEPDVSLGSTWLSDFPQAWAETGGMGLAVRQAPLIIPLKATSTPVSIKQYPMSQEARLGIKPHIQRLLDQGILVPCQSPWNTPLLPVKKPGTNDYRPVQDLREVNKRVEDIHPTVPNPYNLLSGLPPSHQWYTVLDLKDAFFCLRLHPTSQPLFAFEWRDPEMGISGQLTWTRLPQGFKNSPTLFNEALHRDLAGFRIQHPDLILLQYVDDLLLAATSELDCQQGTRALLQTLGDLGYRASAKKAQICQKQVKYLGYLLKEGQRWLTEARKETVMGQPIPKTPRQLREFLGTAGFCRLWIPGFAEMAAPLYPLTKPGTLFNWGPDQQKAFQEIKQALLTAPALGLPDLTKPFELFVDEKQGYAKGVLTQKLGPWRRPVAYLSKKLDPVAAGWPPCLRMVAAIAVLTKDAGKLTMGQPLVILAPHAVEALVKQPPDRWLSNARMTHYQALLLDTDRVQFGPVVALNPATLLPLPEEGLQHDCLDILAEAHGTRSDLMDQPLPDADHTWYTDGSSFLQEGQRKAGAAVTTETEVIWARALPAGTSAQRAELIALTQALKMAEGKKLNVYTDSRYAFATAHIHGEIYRRRGWLTSEGKEIKNKDEILALLKALFLPKRLSIIHCPGHQKGNSAEARGNRMADQAAREVATRETPETSTLLAGKRTADGSEFEKRTADGSEFESPKKKAKVE

SEQ ID NO: 2282 - protein, 2096 aa, synthetic construct
MPAAKRVKLDGGDKKYSIGLDIGTNSVGWAVITDEYKVPSKKFKVLGNTDRHSIKKNLIGALLFDSGETAEATRLKRTARRRYTRRKNRICYLQEIFSNEMAKVDDSFFHRLEESFLVEEDKKHERHPIFGNIVDEVAYHEKYPTIYHLRKKLVDSTDKADLRLIYLALAHMIKFRGHFLIEGDLNPDNSDVDKLFIQLVQTYNQLFEENPINASGVDAKAILSARLSKSRRLENLIAQLPGEKKNGLFGNLIALSLGLTPNFKSNFDLAEDAKLQLSKDTYDDDLDNLLAQIGDQYADLFLAAKNLSDAILLSDILRVNTEITKAPLSASMIKRYDEHHQDLTLLKALVRQQLPEKYKEIFFDQSKNGYAGYIDGGASQEEFYKFIKPILEKMDGTEELLVKLNREDLLRKQRTFDNGSIPHQIHLGELHAILRRQEDFYPFLKDNREKIEKILTFRIPYYVGPLARGNSRFAWMTRKSEETITPWNFEEVVDKGASAQSFIERMTNFDKNLPNEKVLPKHSLLYEYFTVYNELTKVKYVTEGMRKPAFLSGEQKKAIVDLLFKTNRKVTVKQLKEDYFKKIECFDSVEISGVEDRFNASLGTYHDLLKIIKDKDFLDNEENEDILEDIVLTLTLFEDREMIEERLKTYAHLFDDKVMKQLKRRRYTGWGRLSRKLINGIRDKQSGKTILDFLKSDGFANRNFMQLIHDDSLTFKEDIQKAQVSGQGDSLHEHIANLAGSPAIKKGILQTVKVVDELVKVMGRHKPENIVIEMARENQTTQKGQKNSRERMKRIEEGIKELGSQILKEHPVENTQLQNEKLYLYYLQNGRDMYVDQELDINRLSDYDVDHIVPQSFLKDDSIDNKVLTRSDKARGKSDNVPSEEVVKKMKNYWRQLLNAKLITQRKFDNLTKAERGGLSELDKAGFIKRQLVETRQITKHVAQILDSRMNTKYDENDKLIREVKVITLKSKLVSDFRKDFQFYKVREINNYHHAHDAYLNAVVGTALIKKYPKLESEFVYGDYKVYDVRKMIAKSEQEIGKATAKYFFYSNIMNFFKTEITLANGEIRKRPLIETNGETGEIVWDKGRDFATVRKVLSMPQVNIVKKTEVQTGGFSKESILPKRNSDKLIARKKDWDPKKYGGFDSPTVAYSVLVVAKVEKGKSKKLKSVKELLGITIMERSSFEKNPIDFLEAKGYKEVKKDLIIKLPKYSLFELENGRKRMLASAGELQKGNELALPSKYVNFLYLASHYEKLKGSPEDNEQKQLFVEQHKHYLDEIIEQISEFSKRVILADANLDKVLSAYNKHRDKPIREQAENIIHLFTLTNLGAPAAFKYFDTTIDRKRYTSTKEVLDATLIHQSITGLYETRIDLSQLGGDGGGSSPAPEAAAKGGTLNIEDEYRLHETSKEPDVSLGSTWLSDFPQAWAETGGMGLAVRQAPLIIPLKATSTPVSIKQYPMSQEARLGIKPHIQRLLDQGILVPCQSPWNTPLLPVKKPGTNDYRPVQDLREVNKRVEDIHPTVPNPYNLLSGLPPSHQWYTVLDLKDAFFCLRLHPTSQPLFAFEWRDPEMGISGQLTWTRLPQGFKNSPTLFNEALHRDLAGFRIQHPDLILLQYVDDLLLAATSELDCQQGTRALLQTLGDLGYRASAKKAQICQKQVKYLGYLLKEGQRWLTEARKETVMGQPIPKTPRQLREFLGTAGFCRLWIPGFAEMAAPLYPLTKPGTLFNWGPDQQKAFQEIKQALLTAPALGLPDLTKPFELFVDEKQGYAKGVLTQKLGPWRRPVAYLSKKLDPVAAGWPPCLRMVAAIAVLTKDAGKLTMGQPLVILAPHAVEALVKQPPDRWLSNARMTHYQALLLDTDRVQFGPVVALNPATLLPLPEEGLQHDCLDILAEAHGTRSDLMDQPLPDADHTWYTDGSSFLQEGQRKAGAAVTTETEVIWARALPAGTSAQRAELIALTQALKMAEGKKLNVYTDSRYAFATAHIHGEIYRRRGWLTSEGKEIKNKDEILALLKALFLPKRLSIIHCPGHQKGNSAEARGNRMADQAAREVATRETPETSTLLAGKRTADGSEFEKRTADGSEFESPKKKAKVE

SEQ ID NO: 2283 - protein, 2094 aa, synthetic construct
MPAAKRVKLDGGDKKYSIGLDIGTNSVGWAVITDEYKVPSKKFKVLGNTDRHSIKKNLIGALLFDSGETAEATRLKRTARRRYTRRKNRICYLQEIFSNEMAKVDDSFFHRLEESFLVEEDKKHERHPIFGNIVDEVAYHEKYPTIYHLRKKLVDSTDKADLRLIYLALAHMIKFRGHFLIEGDLNPDNSDVDKLFIQLVQTYNQLFEENPINASGVDAKAILSARLSKSRRLENLIAQLPGEKKNGLFGNLIALSLGLTPNFKSNFDLAEDAKLQLSKDTYDDDLDNLLAQIGDQYADLFLAAKNLSDAILLSDILRVNTEITKAPLSASMIKRYDEHHQDLTLLKALVRQQLPEKYKEIFFDQSKNGYAGYIDGGASQEEFYKFIKPILEKMDGTEELLVKLNREDLLRKQRTFDNGSIPHQIHLGELHAILRRQEDFYPFLKDNREKIEKILTFRIPYYVGPLARGNSRFAWMTRKSEETITPWNFEEVVDKGASAQSFIERMTNFDKNLPNEKVLPKHSLLYEYFTVYNELTKVKYVTEGMRKPAFLSGEQKKAIVDLLFKTNRKVTVKQLKEDYFKKIECFDSVEISGVEDRFNASLGTYHDLLKIIKDKDFLDNEENEDILEDIVLTLTLFEDREMIEERLKTYAHLFDDKVMKQLKRRRYTGWGRLSRKLINGIRDKQSGKTILDFLKSDGFANRNFMQLIHDDSLTFKEDIQKAQVSGQGDSLHEHIANLAGSPAIKKGILQTVKVVDELVKVMGRHKPENIVIEMARENQTTQKGQKNSRERMKRIEEGIKELGSQILKEHPVENTQLQNEKLYLYYLQNGRDMYVDQELDINRLSDYDVDHIVPQSFLKDDSIDNKVLTRSDKARGKSDNVPSEEVVKKMKNYWRQLLNAKLITQRKFDNLTKAERGGLSELDKAGFIKRQLVETRQITKHVAQILDSRMNTKYDENDKLIREVKVITLKSKLVSDFRKDFQFYKVREINNYHHAHDAYLNAVVGTALIKKYPKLESEFVYGDYKVYDVRKMIAKSEQEIGKATAKYFFYSNIMNFFKTEITLANGEIRKRPLIETNGETGEIVWDKGRDFATVRKVLSMPQVNIVKKTEVQTGGFSKESILPKRNSDKLIARKKDWDPKKYGGFDSPTVAYSVLVVAKVEKGKSKKLKSVKELLGITIMERSSFEKNPIDFLEAKGYKEVKKDLIIKLPKYSLFELENGRKRMLASAGELQKGNELALPSKYVNFLYLASHYEKLKGSPEDNEQKQLFVEQHKHYLDEIIEQISEFSKRVILADANLDKVLSAYNKHRDKPIREQAENIIHLFTLTNLGAPAAFKYFDTTIDRKRYTSTKEVLDATLIHQSITGLYETRIDLSQLGGDGGGSSPAPGGGGGTLNIEDEYRLHETSKEPDVSLGSTWLSDFPQAWAETGGMGLAVRQAPLIIPLKATSTPVSIKQYPMSQEARLGIKPHIQRLLDQGILVPCQSPWNTPLLPVKKPGTNDYRPVQDLREVNKRVEDIHPTVPNPYNLLSGLPPSHQWYTVLDLKDAFFCLRLHPTSQPLFAFEWRDPEMGISGQLTWTRLPQGFKNSPTLFNEALHRDLAGFRIQHPDLILLQYVDDLLLAATSELDCQQGTRALLQTLGDLGYRASAKKAQICQKQVKYLGYLLKEGQRWLTEARKETVMGQPIPKTPRQLREFLGTAGFCRLWIPGFAEMAAPLYPLTKPGTLFNWGPDQQKAFQEIKQALLTAPALGLPDLTKPFELFVDEKQGYAKGVLTQKLGPWRRPVAYLSKKLDPVAAGWPPCLRMVAAIAVLTKDAGKLTMGQPLVILAPHAVEALVKQPPDRWLSNARMTHYQALLLDTDRVQFGPVVALNPATLLPLPEEGLQHDCLDILAEAHGTRSDLMDQPLPDADHTWYTDGSSFLQEGQRKAGAAVTTETEVIWARALPAGTSAQRAELIALTQALKMAEGKKLNVYTDSRYAFATAHIHGEIYRRRGWLTSEGKEIKNKDEILALLKALFLPKRLSIIHCPGHQKGNSAEARGNRMADQAAREVATRETPETSTLLAGKRTADGSEFEKRTADGSEFESPKKKAKVE

SEQ ID NO: 2284 - protein, 2090 aa, synthetic construct
MPAAKRVKLDGGDKKYSIGLDIGTNSVGWAVITDEYKVPSKKFKVLGNTDRHSIKKNLIGALLFDSGETAEATRLKRTARRRYTRRKNRICYLQEIFSNEMAKVDDSFFHRLEESFLVEEDKKHERHPIFGNIVDEVAYHEKYPTIYHLRKKLVDSTDKADLRLIYLALAHMIKFRGHFLIEGDLNPDNSDVDKLFIQLVQTYNQLFEENPINASGVDAKAILSARLSKSRRLENLIAQLPGEKKNGLFGNLIALSLGLTPNFKSNFDLAEDAKLQLSKDTYDDDLDNLLAQIGDQYADLFLAAKNLSDAILLSDILRVNTEITKAPLSASMIKRYDEHHQDLTLLKALVRQQLPEKYKEIFFDQSKNGYAGYIDGGASQEEFYKFIKPILEKMDGTEELLVKLNREDLLRKQRTFDNGSIPHQIHLGELHAILRRQEDFYPFLKDNREKIEKILTFRIPYYVGPLARGNSRFAWMTRKSEETITPWNFEEVVDKGASAQSFIERMTNFDKNLPNEKVLPKHSLLYEYFTVYNELTKVKYVTEGMRKPAFLSGEQKKAIVDLLFKTNRKVTVKQLKEDYFKKIECFDSVEISGVEDRFNASLGTYHDLLKIIKDKDFLDNEENEDILEDIVLTLTLFEDREMIEERLKTYAHLFDDKVMKQLKRRRYTGWGRLSRKLINGIRDKQSGKTILDFLKSDGFANRNFMQLIHDDSLTFKEDIQKAQVSGQGDSLHEHIANLAGSPAIKKGILQTVKVVDELVKVMGRHKPENIVIEMARENQTTQKGQKNSRERMKRIEEGIKELGSQILKEHPVENTQLQNEKLYLYYLQNGRDMYVDQELDINRLSDYDVDHIVPQSFLKDDSIDNKVLTRSDKARGKSDNVPSEEVVKKMKNYWRQLLNAKLITQRKFDNLTKAERGGLSELDKAGFIKRQLVETRQITKHVAQILDSRMNTKYDENDKLIREVKVITLKSKLVSDFRKDFQFYKVREINNYHHAHDAYLNAVVGTALIKKYPKLESEFVYGDYKVYDVRKMIAKSEQEIGKATAKYFFYSNIMNFFKTEITLANGEIRKRPLIETNGETGEIVWDKGRDFATVRKVLSMPQVNIVKKTEVQTGGFSKESILPKRNSDKLIARKKDWDPKKYGGFDSPTVAYSVLVVAKVEKGKSKKLKSVKELLGITIMERSSFEKNPIDFLEAKGYKEVKKDLIIKLPKYSLFELENGRKRMLASAGELQKGNELALPSKYVNFLYLASHYEKLKGSPEDNEQKQLFVEQHKHYLDEIIEQISEFSKRVILADANLDKVLSAYNKHRDKPIREQAENIIHLFTLTNLGAPAAFKYFDTTIDRKRYTSTKEVLDATLIHQSITGLYETRIDLSQLGGDGGEAAAKGGTLNIEDEYRLHETSKEPDVSLGSTWLSDFPQAWAETGGMGLAVRQAPLIIPLKATSTPVSIKQYPMSQEARLGIKPHIQRLLDQGILVPCQSPWNTPLLPVKKPGTNDYRPVQDLREVNKRVEDIHPTVPNPYNLLSGLPPSHQWYTVLDLKDAFFCLRLHPTSQPLFAFEWRDPEMGISGQLTWTRLPQGFKNSPTLFNEALHRDLAGFRIQHPDLILLQYVDDLLLAATSELDCQQGTRALLQTLGDLGYRASAKKAQICQKQVKYLGYLLKEGQRWLTEARKETVMGQPIPKTPRQLREFLGTAGFCRLWIPGFAEMAAPLYPLTKPGTLFNWGPDQQKAFQEIKQALLTAPALGLPDLTKPFELFVDEKQGYAKGVLTQKLGPWRRPVAYLSKKLDPVAAGWPPCLRMVAAIAVLTKDAGKLTMGQPLVILAPHAVEALVKQPPDRWLSNARMTHYQALLLDTDRVQFGPVVALNPATLLPLPEEGLQHDCLDILAEAHGTRSDLMDQPLPDADHTWYTDGSSFLQEGQRKAGAAVTTETEVIWARALPAGTSAQRAELIALTQALKMAEGKKLNVYTDSRYAFATAHIHGEIYRRRGWLTSEGKEIKNKDEILALLKALFLPKRLSIIHCPGHQKGNSAEARGNRMADQAAREVATRETPETSTLLAGKRTADGSEFEKRTADGSEFESPKKKAKVE

SEQ ID NO: 2285 - protein, 2091 aa, synthetic construct
MPAAKRVKLDGGDKKYSIGLDIGTNSVGWAVITDEYKVPSKKFKVLGNTDRHSIKKNLIGALLFDSGETAEATRLKRTARRRYTRRKNRICYLQEIFSNEMAKVDDSFFHRLEESFLVEEDKKHERHPIFGNIVDEVAYHEKYPTIYHLRKKLVDSTDKADLRLIYLALAHMIKFRGHFLIEGDLNPDNSDVDKLFIQLVQTYNQLFEENPINASGVDAKAILSARLSKSRRLENLIAQLPGEKKNGLFGNLIALSLGLTPNFKSNFDLAEDAKLQLSKDTYDDDLDNLLAQIGDQYADLFLAAKNLSDAILLSDILRVNTEITKAPLSASMIKRYDEHHQDLTLLKALVRQQLPEKYKEIFFDQSKNGYAGYIDGGASQEEFYKFIKPILEKMDGTEELLVKLNREDLLRKQRTFDNGSIPHQIHLGELHAILRRQEDFYPFLKDNREKIEKILTFRIPYYVGPLARGNSRFAWMTRKSEETITPWNFEEVVDKGASAQSFIERMTNFDKNLPNEKVLPKHSLLYEYFTVYNELTKVKYVTEGMRKPAFLSGEQKKAIVDLLFKTNRKVTVKQLKEDYFKKIECFDSVEISGVEDRFNASLGTYHDLLKIIKDKDFLDNEENEDILEDIVLTLTLFEDREMIEERLKTYAHLFDDKVMKQLKRRRYTGWGRLSRKLINGIRDKQSGKTILDFLKSDGFANRNFMQLIHDDSLTFKEDIQKAQVSGQGDSLHEHIANLAGSPAIKKGILQTVKVVDELVKVMGRHKPENIVIEMARENQTTQKGQKNSRERMKRIEEGIKELGSQILKEHPVENTQLQNEKLYLYYLQNGRDMYVDQELDINRLSDYDVDHIVPQSFLKDDSIDNKVLTRSDKARGKSDNVPSEEVVKKMKNYWRQLLNAKLITQRKFDNLTKAERGGLSELDKAGFIKRQLVETRQITKHVAQILDSRMNTKYDENDKLIREVKVITLKSKLVSDFRKDFQFYKVREINNYHHAHDAYLNAVVGTALIKKYPKLESEFVYGDYKVYDVRKMIAKSEQEIGKATAKYFFYSNIMNFFKTEITLANGEIRKRPLIETNGETGEIVWDKGRDFATVRKVLSMPQVNIVKKTEVQTGGFSKESILPKRNSDKLIARKKDWDPKKYGGFDSPTVAYSVLVVAKVEKGKSKKLKSVKELLGITIMERSSFEKNPIDFLEAKGYKEVKKDLIIKLPKYSLFELENGRKRMLASAGELQKGNELALPSKYVNFLYLASHYEKLKGSPEDNEQKQLFVEQHKHYLDEIIEQISEFSKRVILADANLDKVLSAYNKHRDKPIREQAENIIHLFTLTNLGAPAAFKYFDTTIDRKRYTSTKEVLDATLIHQSITGLYETRIDLSQLGGDGGGSSPAPGGTLNIEDEYRLHETSKEPDVSLGSTWLSDFPQAWAETGGMGLAVRQAPLIIPLKATSTPVSIKQYPMSQEARLGIKPHIQRLLDQGILVPCQSPWNTPLLPVKKPGTNDYRPVQDLREVNKRVEDIHPTVPNPYNLLSGLPPSHQWYTVLDLKDAFFCLRLHPTSQPLFAFEWRDPEMGISGQLTWTRLPQGFKNSPTLFNEALHRDLAGFRIQHPDLILLQYVDDLLLAATSELDCQQGTRALLQTLGDLGYRASAKKAQICQKQVKYLGYLLKEGQRWLTEARKETVMGQPIPKTPRQLREFLGTAGFCRLWIPGFAEMAAPLYPLTKPGTLFNWGPDQQKAFQEIKQALLTAPALGLPDLTKPFELFVDEKQGYAKGVLTQKLGPWRRPVAYLSKKLDPVAAGWPPCLRMVAAIAVLTKDAGKLTMGQPLVILAPHAVEALVKQPPDRWLSNARMTHYQALLLDTDRVQFGPVVALNPATLLPLPEEGLQHDCLDILAEAHGTRSDLMDQPLPDADHTWYTDGSSFLQEGQRKAGAAVTTETEVIWARALPAGTSAQRAELIALTQALKMAEGKKLNVYTDSRYAFATAHIHGEIYRRRGWLTSEGKEIKNKDEILALLKALFLPKRLSIIHCPGHQKGNSAEARGNRMADQAAREVATRETPETSTLLAGKRTADGSEFEKRTADGSEFESPKKKAKVE

SEQ ID NO: 2286 - protein, 2096 aa, synthetic construct
MPAAKRVKLDGGDKKYSIGLDIGTNSVGWAVITDEYKVPSKKFKVLGNTDRHSIKKNLIGALLFDSGETAEATRLKRTARRRYTRRKNRICYLQEIFSNEMAKVDDSFFHRLEESFLVEEDKKHERHPIFGNIVDEVAYHEKYPTIYHLRKKLVDSTDKADLRLIYLALAHMIKFRGHFLIEGDLNPDNSDVDKLFIQLVQTYNQLFEENPINASGVDAKAILSARLSKSRRLENLIAQLPGEKKNGLFGNLIALSLGLTPNFKSNFDLAEDAKLQLSKDTYDDDLDNLLAQIGDQYADLFLAAKNLSDAILLSDILRVNTEITKAPLSASMIKRYDEHHQDLTLLKALVRQQLPEKYKEIFFDQSKNGYAGYIDGGASQEEFYKFIKPILEKMDGTEELLVKLNREDLLRKQRTFDNGSIPHQIHLGELHAILRRQEDFYPFLKDNREKIEKILTFRIPYYVGPLARGNSRFAWMTRKSEETITPWNFEEVVDKGASAQSFIERMTNFDKNLPNEKVLPKHSLLYEYFTVYNELTKVKYVTEGMRKPAFLSGEQKKAIVDLLFKTNRKVTVKQLKEDYFKKIECFDSVEISGVEDRFNASLGTYHDLLKIIKDKDFLDNEENEDILEDIVLTLTLFEDREMIEERLKTYAHLFDDKVMKQLKRRRYTGWGRLSRKLINGIRDKQSGKTILDFLKSDGFANRNFMQLIHDDSLTFKEDIQKAQVSGQGDSLHEHIANLAGSPAIKKGILQTVKVVDELVKVMGRHKPENIVIEMARENQTTQKGQKNSRERMKRIEEGIKELGSQILKEHPVENTQLQNEKLYLYYLQNGRDMYVDQELDINRLSDYDVDHIVPQSFLKDDSIDNKVLTRSDKARGKSDNVPSEEVVKKMKNYWRQLLNAKLITQRKFDNLTKAERGGLSELDKAGFIKRQLVETRQITKHVAQILDSRMNTKYDENDKLIREVKVITLKSKLVSDFRKDFQFYKVREINNYHHAHDAYLNAVVGTALIKKYPKLESEFVYGDYKVYDVRKMIAKSEQEIGKATAKYFFYSNIMNFFKTEITLANGEIRKRPLIETNGETGEIVWDKGRDFATVRKVLSMPQVNIVKKTEVQTGGFSKESILPKRNSDKLIARKKDWDPKKYGGFDSPTVAYSVLVVAKVEKGKSKKLKSVKELLGITIMERSSFEKNPIDFLEAKGYKEVKKDLIIKLPKYSLFELENGRKRMLASAGELQKGNELALPSKYVNFLYLASHYEKLKGSPEDNEQKQLFVEQHKHYLDEIIEQISEFSKRVILADANLDKVLSAYNKHRDKPIREQAENIIHLFTLTNLGAPAAFKYFDTTIDRKRYTSTKEVLDATLIHQSITGLYETRIDLSQLGGDGGGGSPAPEAAAKGGTLNIEDEYRLHETSKEPDVSLGSTWLSDFPQAWAETGGMGLAVRQAPLIIPLKATSTPVSIKQYPMSQEARLGIKPHIQRLLDQGILVPCQSPWNTPLLPVKKPGTNDYRPVQDLREVNKRVEDIHPTVPNPYNLLSGLPPSHQWYTVLDLKDAFFCLRLHPTSQPLFAFEWRDPEMGISGQLTWTRLPQGFKNSPTLFNEALHRDLAGFRIQHPDLILLQYVDDLLLAATSELDCQQGTRALLQTLGDLGYRASAKKAQICQKQVKYLGYLLKEGQRWLTEARKETVMGQPIPKTPRQLREFLGTAGFCRLWIPGFAEMAAPLYPLTKPGTLFNWGPDQQKAFQEIKQALLTAPALGLPDLTKPFELFVDEKQGYAKGVLTQKLGPWRRPVAYLSKKLDPVAAGWPPCLRMVAAIAVLTKDAGKLTMGQPLVILAPHAVEALVKQPPDRWLSNARMTHYQALLLDTDRVQFGPVVALNPATLLPLPEEGLQHDCLDILAEAHGTRSDLMDQPLPDADHTWYTDGSSFLQEGQRKAGAAVTTETEVIWARALPAGTSAQRAELIALTQALKMAEGKKLNVYTDSRYAFATAHIHGEIYRRRGWLTSEGKEIKNKDEILALLKALFLPKRLSIIHCPGHQKGNSAEARGNRMADQAAREVATRETPETSTLLAGKRTADGSEFEKRTADGSEFESPKKKAKVE

SEQ ID NO: 2287 - protein, 2096 aa, synthetic construct
MPAAKRVKLDGGDKKYSIGLDIGTNSVGWAVITDEYKVPSKKFKVLGNTDRHSIKKNLIGALLFDSGETAEATRLKRTARRRYTRRKNRICYLQEIFSNEMAKVDDSFFHRLEESFLVEEDKKHERHPIFGNIVDEVAYHEKYPTIYHLRKKLVDSTDKADLRLIYLALAHMIKFRGHFLIEGDLNPDNSDVDKLFIQLVQTYNQLFEENPINASGVDAKAILSARLSKSRRLENLIAQLPGEKKNGLFGNLIALSLGLTPNFKSNFDLAEDAKLQLSKDTYDDDLDNLLAQIGDQYADLFLAAKNLSDAILLSDILRVNTEITKAPLSASMIKRYDEHHQDLTLLKALVRQQLPEKYKEIFFDQSKNGYAGYIDGGASQEEFYKFIKPILEKMDGTEELLVKLNREDLLRKQRTFDNGSIPHQIHLGELHAILRRQEDFYPFLKDNREKIEKILTFRIPYYVGPLARGNSRFAWMTRKSEETITPWNFEEVVDKGASAQSFIERMTNFDKNLPNEKVLPKHSLLYEYFTVYNELTKVKYVTEGMRKPAFLSGEQKKAIVDLLFKTNRKVTVKQLKEDYFKKIECFDSVEISGVEDRFNASLGTYHDLLKIIKDKDFLDNEENEDILEDIVLTLTLFEDREMIEERLKTYAHLFDDKVMKQLKRRRYTGWGRLSRKLINGIRDKQSGKTILDFLKSDGFANRNFMQLIHDDSLTFKEDIQKAQVSGQGDSLHEHIANLAGSPAIKKGILQTVKVVDELVKVMGRHKPENIVIEMARENQTTQKGQKNSRERMKRIEEGIKELGSQILKEHPVENTQLQNEKLYLYYLQNGRDMYVDQELDINRLSDYDVDHIVPQSFLKDDSIDNKVLTRSDKARGKSDNVPSEEVVKKMKNYWRQLLNAKLITQRKFDNLTKAERGGLSELDKAGFIKRQLVETRQITKHVAQILDSRMNTKYDENDKLIREVKVITLKSKLVSDFRKDFQFYKVREINNYHHAHDAYLNAVVGTALIKKYPKLESEFVYGDYKVYDVRKMIAKSEQEIGKATAKYFFYSNIMNFFKTEITLANGEIRKRPLIETNGETGEIVWDKGRDFATVRKVLSMPQVNIVKKTEVQTGGFSKESILPKRNSDKLIARKKDWDPKKYGGFDSPTVAYSVLVVAKVEKGKSKKLKSVKELLGITIMERSSFEKNPIDFLEAKGYKEVKKDLIIKLPKYSLFELENGRKRMLASAGELQKGNELALPSKYVNFLYLASHYEKLKGSPEDNEQKQLFVEQHKHYLDEIIEQISEFSKRVILADANLDKVLSAYNKHRDKPIREQAENIIHLFTLTNLGAPAAFKYFDTTIDRKRYTSTKEVLDATLIHQSITGLYETRIDLSQLGGDGGGGSEAAAKGGGGGTLNIEDEYRLHETSKEPDVSLGSTWLSDFPQAWAETGGMGLAVRQAPLIIPLKATSTPVSIKQYPMSQEARLGIKPHIQRLLDQGILVPCQSPWNTPLLPVKKPGTNDYRPVQDLREVNKRVEDIHPTVPNPYNLLSGLPPSHQWYTVLDLKDAFFCLRLHPTSQPLFAFEWRDPEMGISGQLTWTRLPQGFKNSPTLFNEALHRDLAGFRIQHPDLILLQYVDDLLLAATSELDCQQGTRALLQTLGDLGYRASAKKAQICQKQVKYLGYLLKEGQRWLTEARKETVMGQPIPKTPRQLREFLGTAGFCRLWIPGFAEMAAPLYPLTKPGTLFNWGPDQQKAFQEIKQALLTAPALGLPDLTKPFELFVDEKQGYAKGVLTQKLGPWRRPVAYLSKKLDPVAAGWPPCLRMVAAIAVLTKDAGKLTMGQPLVILAPHAVEALVKQPPDRWLSNARMTHYQALLLDTDRVQFGPVVALNPATLLPLPEEGLQHDCLDILAEAHGTRSDLMDQPLPDADHTWYTDGSSFLQEGQRKAGAAVTTETEVIWARALPAGTSAQRAELIALTQALKMAEGKKLNVYTDSRYAFATAHIHGEIYRRRGWLTSEGKEIKNKDEILALLKALFLPKRLSIIHCPGHQKGNSAEARGNRMADQAAREVATRETPETSTLLAGKRTADGSEFEKRTADGSEFESPKKKAKVE

SEQ ID NO: 2288 - protein, 2094 aa, synthetic construct
MPAAKRVKLDGGDKKYSIGLDIGTNSVGWAVITDEYKVPSKKFKVLGNTDRHSIKKNLIGALLFDSGETAEATRLKRTARRRYTRRKNRICYLQEIFSNEMAKVDDSFFHRLEESFLVEEDKKHERHPIFGNIVDEVAYHEKYPTIYHLRKKLVDSTDKADLRLIYLALAHMIKFRGHFLIEGDLNPDNSDVDKLFIQLVQTYNQLFEENPINASGVDAKAILSARLSKSRRLENLIAQLPGEKKNGLFGNLIALSLGLTPNFKSNFDLAEDAKLQLSKDTYDDDLDNLLAQIGDQYADLFLAAKNLSDAILLSDILRVNTEITKAPLSASMIKRYDEHHQDLTLLKALVRQQLPEKYKEIFFDQSKNGYAGYIDGGASQEEFYKFIKPILEKMDGTEELLVKLNREDLLRKQRTFDNGSIPHQIHLGELHAILRRQEDFYPFLKDNREKIEKILTFRIPYYVGPLARGNSRFAWMTRKSEETITPWNFEEVVDKGASAQSFIERMTNFDKNLPNEKVLPKHSLLYEYFTVYNELTKVKYVTEGMRKPAFLSGEQKKAIVDLLFKTNRKVTVKQLKEDYFKKIECFDSVEISGVEDRFNASLGTYHDLLKIIKDKDFLDNEENEDILEDIVLTLTLFEDREMIEERLKTYAHLFDDKVMKQLKRRRYTGWGRLSRKLINGIRDKQSGKTILDFLKSDGFANRNFMQLIHDDSLTFKEDIQKAQVSGQGDSLHEHIANLAGSPAIKKGILQTVKVVDELVKVMGRHKPENIVIEMARENQTTQKGQKNSRERMKRIEEGIKELGSQILKEHPVENTQLQNEKLYLYYLQNGRDMYVDQELDINRLSDYDVDHIVPQSFLKDDSIDNKVLTRSDKARGKSDNVPSEEVVKKMKNYWRQLLNAKLITQRKFDNLTKAERGGLSELDKAGFIKRQLVETRQITKHVAQILDSRMNTKYDENDKLIREVKVITLKSKLVSDFRKDFQFYKVREINNYHHAHDAYLNAVVGTALIKKYPKLESEFVYGDYKVYDVRKMIAKSEQEIGKATAKYFFYSNIMNFFKTEITLANGEIRKRPLIETNGETGEIVWDKGRDFATVRKVLSMPQVNIVKKTEVQTGGFSKESILPKRNSDKLIARKKDWDPKKYGGFDSPTVAYSVLVVAKVEKGKSKKLKSVKELLGITIMERSSFEKNPIDFLEAKGYKEVKKDLIIKLPKYSLFELENGRKRMLASAGELQKGNELALPSKYVNFLYLASHYEKLKGSPEDNEQKQLFVEQHKHYLDEIIEQISEFSKRVILADANLDKVLSAYNKHRDKPIREQAENIIHLFTLTNLGAPAAFKYFDTTIDRKRYTSTKEVLDATLIHQSITGLYETRIDLSQLGGDGGGSSPAPGGSGGTLNIEDEYRLHETSKEPDVSLGSTWLSDFPQAWAETGGMGLAVRQAPLIIPLKATSTPVSIKQYPMSQEARLGIKPHIQRLLDQGILVPCQSPWNTPLLPVKKPGTNDYRPVQDLREVNKRVEDIHPTVPNPYNLLSGLPPSHQWYTVLDLKDAFFCLRLHPTSQPLFAFEWRDPEMGISGQLTWTRLPQGFKNSPTLFNEALHRDLAGFRIQHPDLILLQYVDDLLLAATSELDCQQGTRALLQTLGDLGYRASAKKAQICQKQVKYLGYLLKEGQRWLTEARKETVMGQPIPKTPRQLREFLGTAGFCRLWIPGFAEMAAPLYPLTKPGTLFNWGPDQQKAFQEIKQALLTAPALGLPDLTKPFELFVDEKQGYAKGVLTQKLGPWRRPVAYLSKKLDPVAAGWPPCLRMVAAIAVLTKDAGKLTMGQPLVILAPHAVEALVKQPPDRWLSNARMTHYQALLLDTDRVQFGPVVALNPATLLPLPEEGLQHDCLDILAEAHGTRSDLMDQPLPDADHTWYTDGSSFLQEGQRKAGAAVTTETEVIWARALPAGTSAQRAELIALTQALKMAEGKKLNVYTDSRYAFATAHIHGEIYRRRGWLTSEGKEIKNKDEILALLKALFLPKRLSIIHCPGHQKGNSAEARGNRMADQAAREVATRETPETSTLLAGKRTADGSEFEKRTADGSEFESPKKKAKVE

SEQ ID NO: 2289 - protein, 2096 aa, synthetic construct
MPAAKRVKLDGGDKKYSIGLDIGTNSVGWAVITDEYKVPSKKFKVLGNTDRHSIKKNLIGALLFDSGETAEATRLKRTARRRYTRRKNRICYLQEIFSNEMAKVDDSFFHRLEESFLVEEDKKHERHPIFGNIVDEVAYHEKYPTIYHLRKKLVDSTDKADLRLIYLALAHMIKFRGHFLIEGDLNPDNSDVDKLFIQLVQTYNQLFEENPINASGVDAKAILSARLSKSRRLENLIAQLPGEKKNGLFGNLIALSLGLTPNFKSNFDLAEDAKLQLSKDTYDDDLDNLLAQIGDQYADLFLAAKNLSDAILLSDILRVNTEITKAPLSASMIKRYDEHHQDLTLLKALVRQQLPEKYKEIFFDQSKNGYAGYIDGGASQEEFYKFIKPILEKMDGTEELLVKLNREDLLRKQRTFDNGSIPHQIHLGELHAILRRQEDFYPFLKDNREKIEKILTFRIPYYVGPLARGNSRFAWMTRKSEETITPWNFEEVVDKGASAQSFIERMTNFDKNLPNEKVLPKHSLLYEYFTVYNELTKVKYVTEGMRKPAFLSGEQKKAIVDLLFKTNRKVTVKQLKEDYFKKIECFDSVEISGVEDRFNASLGTYHDLLKIIKDKDFLDNEENEDILEDIVLTLTLFEDREMIEERLKTYAHLFDDKVMKQLKRRRYTGWGRLSRKLINGIRDKQSGKTILDFLKSDGFANRNFMQLIHDDSLTFKEDIQKAQVSGQGDSLHEHIANLAGSPAIKKGILQTVKVVDELVKVMGRHKPENIVIEMARENQTTQKGQKNSRERMKRIEEGIKELGSQILKEHPVENTQLQNEKLYLYYLQNGRDMYVDQELDINRLSDYDVDHIVPQSFLKDDSIDNKVLTRSDKARGKSDNVPSEEVVKKMKNYWRQLLNAKLITQRKFDNLTKAERGGLSELDKAGFIKRQLVETRQITKHVAQILDSRMNTKYDENDKLIREVKVITLKSKLVSDFRKDFQFYKVREINNYHHAHDAYLNAVVGTALIKKYPKLESEFVYGDYKVYDVRKMIAKSEQEIGKATAKYFFYSNIMNFFKTEITLANGEIRKRPLIETNGETGEIVWDKGRDFATVRKVLSMPQVNIVKKTEVQTGGFSKESILPKRNSDKLIARKKDWDPKKYGGFDSPTVAYSVLVVAKVEKGKSKKLKSVKELLGITIMERSSFEKNPIDFLEAKGYKEVKKDLIIKLPKYSLFELENGRKRMLASAGELQKGNELALPSKYVNFLYLASHYEKLKGSPEDNEQKQLFVEQHKHYLDEIIEQISEFSKRVILADANLDKVLSAYNKHRDKPIREQAENIIHLFTLTNLGAPAAFKYFDTTIDRKRYTSTKEVLDATLIHQSITGLYETRIDLSQLGGDGGGSSEAAAKGGGGGTLNIEDEYRLHETSKEPDVSLGSTWLSDFPQAWAETGGMGLAVRQAPLIIPLKATSTPVSIKQYPMSQEARLGIKPHIQRLLDQGILVPCQSPWNTPLLPVKKPGTNDYRPVQDLREVNKRVEDIHPTVPNPYNLLSGLPPSHQWYTVLDLKDAFFCLRLHPTSQPLFAFEWRDPEMGISGQLTWTRLPQGFKNSPTLFNEALHRDLAGFRIQHPDLILLQYVDDLLLAATSELDCQQGTRALLQTLGDLGYRASAKKAQICQKQVKYLGYLLKEGQRWLTEARKETVMGQPIPKTPRQLREFLGTAGFCRLWIPGFAEMAAPLYPLTKPGTLFNWGPDQQKAFQEIKQALLTAPALGLPDLTKPFELFVDEKQGYAKGVLTQKLGPWRRPVAYLSKKLDPVAAGWPPCLRMVAAIAVLTKDAGKLTMGQPLVILAPHAVEALVKQPPDRWLSNARMTHYQALLLDTDRVQFGPVVALNPATLLPLPEEGLQHDCLDILAEAHGTRSDLMDQPLPDADHTWYTDGSSFLQEGQRKAGAAVTTETEVIWARALPAGTSAQRAELIALTQALKMAEGKKLNVYTDSRYAFATAHIHGEIYRRRGWLTSEGKEIKNKDEILALLKALFLPKRLSIIHCPGHQKGNSAEARGNRMADQAAREVATRETPETSTLLAGKRTADGSEFEKRTADGSEFESPKKKAKVE

SEQ ID NO: 2290 - protein, 2094 aa, synthetic construct
MPAAKRVKLDGGDKKYSIGLDIGTNSVGWAVITDEYKVPSKKFKVLGNTDRHSIKKNLIGALLFDSGETAEATRLKRTARRRYTRRKNRICYLQEIFSNEMAKVDDSFFHRLEESFLVEEDKKHERHPIFGNIVDEVAYHEKYPTIYHLRKKLVDSTDKADLRLIYLALAHMIKFRGHFLIEGDLNPDNSDVDKLFIQLVQTYNQLFEENPINASGVDAKAILSARLSKSRRLENLIAQLPGEKKNGLFGNLIALSLGLTPNFKSNFDLAEDAKLQLSKDTYDDDLDNLLAQIGDQYADLFLAAKNLSDAILLSDILRVNTEITKAPLSASMIKRYDEHHQDLTLLKALVRQQLPEKYKEIFFDQSKNGYAGYIDGGASQEEFYKFIKPILEKMDGTEELLVKLNREDLLRKQRTFDNGSIPHQIHLGELHAILRRQEDFYPFLKDNREKIEKILTFRIPYYVGPLARGNSRFAWMTRKSEETITPWNFEEVVDKGASAQSFIERMTNFDKNLPNEKVLPKHSLLYEYFTVYNELTKVKYVTEGMRKPAFLSGEQKKAIVDLLFKTNRKVTVKQLKEDYFKKIECFDSVEISGVEDRFNASLGTYHDLLKIIKDKDFLDNEENEDILEDIVLTLTLFEDREMIEERLKTYAHLFDDKVMKQLKRRRYTGWGRLSRKLINGIRDKQSGKTILDFLKSDGFANRNFMQLIHDDSLTFKEDIQKAQVSGQGDSLHEHIANLAGSPAIKKGILQTVKVVDELVKVMGRHKPENIVIEMARENQTTQKGQKNSRERMKRIEEGIKELGSQILKEHPVENTQLQNEKLYLYYLQNGRDMYVDQELDINRLSDYDVDHIVPQSFLKDDSIDNKVLTRSDKARGKSDNVPSEEVVKKMKNYWRQLLNAKLITQRKFDNLTKAERGGLSELDKAGFIKRQLVETRQITKHVAQILDSRMNTKYDENDKLIREVKVITLKSKLVSDFRKDFQFYKVREINNYHHAHDAYLNAVVGTALIKKYPKLESEFVYGDYKVYDVRKMIAKSEQEIGKATAKYFFYSNIMNFFKTEITLANGEIRKRPLIETNGETGEIVWDKGRDFATVRKVLSMPQVNIVKKTEVQTGGFSKESILPKRNSDKLIARKKDWDPKKYGGFDSPTVAYSVLVVAKVEKGKSKKLKSVKELLGITIMERSSFEKNPIDFLEAKGYKEVKKDLIIKLPKYSLFELENGRKRMLASAGELQKGNELALPSKYVNFLYLASHYEKLKGSPEDNEQKQLFVEQHKHYLDEIIEQISEFSKRVILADANLDKVLSAYNKHRDKPIREQAENIIHLFTLTNLGAPAAFKYFDTTIDRKRYTSTKEVLDATLIHQSITGLYETRIDLSQLGGDGGGGGPAPGGSGGTLNIEDEYRLHETSKEPDVSLGSTWLSDFPQAWAETGGMGLAVRQAPLIIPLKATSTPVSIKQYPMSQEARLGIKPHIQRLLDQGILVPCQSPWNTPLLPVKKPGTNDYRPVQDLREVNKRVEDIHPTVPNPYNLLSGLPPSHQWYTVLDLKDAFFCLRLHPTSQPLFAFEWRDPEMGISGQLTWTRLPQGFKNSPTLFNEALHRDLAGFRIQHPDLILLQYVDDLLLAATSELDCQQGTRALLQTLGDLGYRASAKKAQICQKQVKYLGYLLKEGQRWLTEARKETVMGQPIPKTPRQLREFLGTAGFCRLWIPGFAEMAAPLYPLTKPGTLFNWGPDQQKAFQEIKQALLTAPALGLPDLTKPFELFVDEKQGYAKGVLTQKLGPWRRPVAYLSKKLDPVAAGWPPCLRMVAAIAVLTKDAGKLTMGQPLVILAPHAVEALVKQPPDRWLSNARMTHYQALLLDTDRVQFGPVVALNPATLLPLPEEGLQHDCLDILAEAHGTRSDLMDQPLPDADHTWYTDGSSFLQEGQRKAGAAVTTETEVIWARALPAGTSAQRAELIALTQALKMAEGKKLNVYTDSRYAFATAHIHGEIYRRRGWLTSEGKEIKNKDEILALLKALFLPKRLSIIHCPGHQKGNSAEARGNRMADQAAREVATRETPETSTLLAGKRTADGSEFEKRTADGSEFESPKKKAKVE

SEQ ID NO: 2291 - protein, 2097 aa, synthetic construct
MPAAKRVKLDGGDKKYSIGLDIGTNSVGWAVITDEYKVPSKKFKVLGNTDRHSIKKNLIGALLFDSGETAEATRLKRTARRRYTRRKNRICYLQEIFSNEMAKVDDSFFHRLEESFLVEEDKKHERHPIFGNIVDEVAYHEKYPTIYHLRKKLVDSTDKADLRLIYLALAHMIKFRGHFLIEGDLNPDNSDVDKLFIQLVQTYNQLFEENPINASGVDAKAILSARLSKSRRLENLIAQLPGEKKNGLFGNLIALSLGLTPNFKSNFDLAEDAKLQLSKDTYDDDLDNLLAQIGDQYADLFLAAKNLSDAILLSDILRVNTEITKAPLSASMIKRYDEHHQDLTLLKALVRQQLPEKYKEIFFDQSKNGYAGYIDGGASQEEFYKFIKPILEKMDGTEELLVKLNREDLLRKQRTFDNGSIPHQIHLGELHAILRRQEDFYPFLKDNREKIEKILTFRIPYYVGPLARGNSRFAWMTRKSEETITPWNFEEVVDKGASAQSFIERMTNFDKNLPNEKVLPKHSLLYEYFTVYNELTKVKYVTEGMRKPAFLSGEQKKAIVDLLFKTNRKVTVKQLKEDYFKKIECFDSVEISGVEDRFNASLGTYHDLLKIIKDKDFLDNEENEDILEDIVLTLTLFEDREMIEERLKTYAHLFDDKVMKQLKRRRYTGWGRLSRKLINGIRDKQSGKTILDFLKSDGFANRNFMQLIHDDSLTFKEDIQKAQVSGQGDSLHEHIANLAGSPAIKKGILQTVKVVDELVKVMGRHKPENIVIEMARENQTTQKGQKNSRERMKRIEEGIKELGSQILKEHPVENTQLQNEKLYLYYLQNGRDMYVDQELDINRLSDYDVDHIVPQSFLKDDSIDNKVLTRSDKARGKSDNVPSEEVVKKMKNYWRQLLNAKLITQRKFDNLTKAERGGLSELDKAGFIKRQLVETRQITKHVAQILDSRMNTKYDENDKLIREVKVITLKSKLVSDFRKDFQFYKVREINNYHHAHDAYLNAVVGTALIKKYPKLESEFVYGDYKVYDVRKMIAKSEQEIGKATAKYFFYSNIMNFFKTEITLANGEIRKRPLIETNGETGEIVWDKGRDFATVRKVLSMPQVNIVKKTEVQTGGFSKESILPKRNSDKLIARKKDWDPKKYGGFDSPTVAYSVLVVAKVEKGKSKKLKSVKELLGITIMERSSFEKNPIDFLEAKGYKEVKKDLIIKLPKYSLFELENGRKRMLASAGELQKGNELALPSKYVNFLYLASHYEKLKGSPEDNEQKQLFVEQHKHYLDEIIEQISEFSKRVILADANLDKVLSAYNKHRDKPIREQAENIIHLFTLTNLGAPAAFKYFDTTIDRKRYTSTKEVLDATLIHQSITGLYETRIDLSQLGGDGGGSSGSSGSSGSSGGTLNIEDEYRLHETSKEPDVSLGSTWLSDFPQAWAETGGMGLAVRQAPLIIPLKATSTPVSIKQYPMSQEARLGIKPHIQRLLDQGILVPCQSPWNTPLLPVKKPGTNDYRPVQDLREVNKRVEDIHPTVPNPYNLLSGLPPSHQWYTVLDLKDAFFCLRLHPTSQPLFAFEWRDPEMGISGQLTWTRLPQGFKNSPTLFNEALHRDLAGFRIQHPDLILLQYVDDLLLAATSELDCQQGTRALLQTLGDLGYRASAKKAQICQKQVKYLGYLLKEGQRWLTEARKETVMGQPIPKTPRQLREFLGTAGFCRLWIPGFAEMAAPLYPLTKPGTLFNWGPDQQKAFQEIKQALLTAPALGLPDLTKPFELFVDEKQGYAKGVLTQKLGPWRRPVAYLSKKLDPVAAGWPPCLRMVAAIAVLTKDAGKLTMGQPLVILAPHAVEALVKQPPDRWLSNARMTHYQALLLDTDRVQFGPVVALNPATLLPLPEEGLQHDCLDILAEAHGTRSDLMDQPLPDADHTWYTDGSSFLQEGQRKAGAAVTTETEVIWARALPAGTSAQRAELIALTQALKMAEGKKLNVYTDSRYAFATAHIHGEIYRRRGWLTSEGKEIKNKDEILALLKALFLPKRLSIIHCPGHQKGNSAEARGNRMADQAAREVATRETPETSTLLAGKRTADGSEFEKRTADGSEFESPKKKAKVE

SEQ ID NO: 2292 - protein, 2096 aa, synthetic construct
MPAAKRVKLDGGDKKYSIGLDIGTNSVGWAVITDEYKVPSKKFKVLGNTDRHSIKKNLIGALLFDSGETAEATRLKRTARRRYTRRKNRICYLQEIFSNEMAKVDDSFFHRLEESFLVEEDKKHERHPIFGNIVDEVAYHEKYPTIYHLRKKLVDSTDKADLRLIYLALAHMIKFRGHFLIEGDLNPDNSDVDKLFIQLVQTYNQLFEENPINASGVDAKAILSARLSKSRRLENLIAQLPGEKKNGLFGNLIALSLGLTPNFKSNFDLAEDAKLQLSKDTYDDDLDNLLAQIGDQYADLFLAAKNLSDAILLSDILRVNTEITKAPLSASMIKRYDEHHQDLTLLKALVRQQLPEKYKEIFFDQSKNGYAGYIDGGASQEEFYKFIKPILEKMDGTEELLVKLNREDLLRKQRTFDNGSIPHQIHLGELHAILRRQEDFYPFLKDNREKIEKILTFRIPYYVGPLARGNSRFAWMTRKSEETITPWNFEEVVDKGASAQSFIERMTNFDKNLPNEKVLPKHSLLYEYFTVYNELTKVKYVTEGMRKPAFLSGEQKKAIVDLLFKTNRKVTVKQLKEDYFKKIECFDSVEISGVEDRFNASLGTYHDLLKIIKDKDFLDNEENEDILEDIVLTLTLFEDREMIEERLKTYAHLFDDKVMKQLKRRRYTGWGRLSRKLINGIRDKQSGKTILDFLKSDGFANRNFMQLIHDDSLTFKEDIQKAQVSGQGDSLHEHIANLAGSPAIKKGILQTVKVVDELVKVMGRHKPENIVIEMARENQTTQKGQKNSRERMKRIEEGIKELGSQILKEHPVENTQLQNEKLYLYYLQNGRDMYVDQELDINRLSDYDVDHIVPQSFLKDDSIDNKVLTRSDKARGKSDNVPSEEVVKKMKNYWRQLLNAKLITQRKFDNLTKAERGGLSELDKAGFIKRQLVETRQITKHVAQILDSRMNTKYDENDKLIREVKVITLKSKLVSDFRKDFQFYKVREINNYHHAHDAYLNAVVGTALIKKYPKLESEFVYGDYKVYDVRKMIAKSEQEIGKATAKYFFYSNIMNFFKTEITLANGEIRKRPLIETNGETGEIVWDKGRDFATVRKVLSMPQVNIVKKTEVQTGGFSKESILPKRNSDKLIARKKDWDPKKYGGFDSPTVAYSVLVVAKVEKGKSKKLKSVKELLGITIMERSSFEKNPIDFLEAKGYKEVKKDLIIKLPKYSLFELENGRKRMLASAGELQKGNELALPSKYVNFLYLASHYEKLKGSPEDNEQKQLFVEQHKHYLDEIIEQISEFSKRVILADANLDKVLSAYNKHRDKPIREQAENIIHLFTLTNLGAPAAFKYFDTTIDRKRYTSTKEVLDATLIHQSITGLYETRIDLSQLGGDGGGSSGGGEAAAKGGTLNIEDEYRLHETSKEPDVSLGSTWLSDFPQAWAETGGMGLAVRQAPLIIPLKATSTPVSIKQYPMSQEARLGIKPHIQRLLDQGILVPCQSPWNTPLLPVKKPGTNDYRPVQDLREVNKRVEDIHPTVPNPYNLLSGLPPSHQWYTVLDLKDAFFCLRLHPTSQPLFAFEWRDPEMGISGQLTWTRLPQGFKNSPTLFNEALHRDLAGFRIQHPDLILLQYVDDLLLAATSELDCQQGTRALLQTLGDLGYRASAKKAQICQKQVKYLGYLLKEGQRWLTEARKETVMGQPIPKTPRQLREFLGTAGFCRLWIPGFAEMAAPLYPLTKPGTLFNWGPDQQKAFQEIKQALLTAPALGLPDLTKPFELFVDEKQGYAKGVLTQKLGPWRRPVAYLSKKLDPVAAGWPPCLRMVAAIAVLTKDAGKLTMGQPLVILAPHAVEALVKQPPDRWLSNARMTHYQALLLDTDRVQFGPVVALNPATLLPLPEEGLQHDCLDILAEAHGTRSDLMDQPLPDADHTWYTDGSSFLQEGQRKAGAAVTTETEVIWARALPAGTSAQRAELIALTQALKMAEGKKLNVYTDSRYAFATAHIHGEIYRRRGWLTSEGKEIKNKDEILALLKALFLPKRLSIIHCPGHQKGNSAEARGNRMADQAAREVATRETPETSTLLAGKRTADGSEFEKRTADGSEFESPKKKAKVE

SEQ ID NO: 2293 - protein, 2094 aa, synthetic construct
MPAAKRVKLDGGDKKYSIGLDIGTNSVGWAVITDEYKVPSKKFKVLGNTDRHSIKKNLIGALLFDSGETAEATRLKRTARRRYTRRKNRICYLQEIFSNEMAKVDDSFFHRLEESFLVEEDKKHERHPIFGNIVDEVAYHEKYPTIYHLRKKLVDSTDKADLRLIYLALAHMIKFRGHFLIEGDLNPDNSDVDKLFIQLVQTYNQLFEENPINASGVDAKAILSARLSKSRRLENLIAQLPGEKKNGLFGNLIALSLGLTPNFKSNFDLAEDAKLQLSKDTYDDDLDNLLAQIGDQYADLFLAAKNLSDAILLSDILRVNTEITKAPLSASMIKRYDEHHQDLTLLKALVRQQLPEKYKEIFFDQSKNGYAGYIDGGASQEEFYKFIKPILEKMDGTEELLVKLNREDLLRKQRTFDNGSIPHQIHLGELHAILRRQEDFYPFLKDNREKIEKILTFRIPYYVGPLARGNSRFAWMTRKSEETITPWNFEEVVDKGASAQSFIERMTNFDKNLPNEKVLPKHSLLYEYFTVYNELTKVKYVTEGMRKPAFLSGEQKKAIVDLLFKTNRKVTVKQLKEDYFKKIECFDSVEISGVEDRFNASLGTYHDLLKIIKDKDFLDNEENEDILEDIVLTLTLFEDREMIEERLKTYAHLFDDKVMKQLKRRRYTGWGRLSRKLINGIRDKQSGKTILDFLKSDGFANRNFMQLIHDDSLTFKEDIQKAQVSGQGDSLHEHIANLAGSPAIKKGILQTVKVVDELVKVMGRHKPENIVIEMARENQTTQKGQKNSRERMKRIEEGIKELGSQILKEHPVENTQLQNEKLYLYYLQNGRDMYVDQELDINRLSDYDVDHIVPQSFLKDDSIDNKVLTRSDKARGKSDNVPSEEVVKKMKNYWRQLLNAKLITQRKFDNLTKAERGGLSELDKAGFIKRQLVETRQITKHVAQILDSRMNTKYDENDKLIREVKVITLKSKLVSDFRKDFQFYKVREINNYHHAHDAYLNAVVGTALIKKYPKLESEFVYGDYKVYDVRKMIAKSEQEIGKATAKYFFYSNIMNFFKTEITLANGEIRKRPLIETNGETGEIVWDKGRDFATVRKVLSMPQVNIVKKTEVQTGGFSKESILPKRNSDKLIARKKDWDPKKYGGFDSPTVAYSVLVVAKVEKGKSKKLKSVKELLGITIMERSSFEKNPIDFLEAKGYKEVKKDLIIKLPKYSLFELENGRKRMLASAGELQKGNELALPSKYVNFLYLASHYEKLKGSPEDNEQKQLFVEQHKHYLDEIIEQISEFSKRVILADANLDKVLSAYNKHRDKPIREQAENIIHLFTLTNLGAPAAFKYFDTTIDRKRYTSTKEVLDATLIHQSITGLYETRIDLSQLGGDGGGGSGSSGGGGGTLNIEDEYRLHETSKEPDVSLGSTWLSDFPQAWAETGGMGLAVRQAPLIIPLKATSTPVSIKQYPMSQEARLGIKPHIQRLLDQGILVPCQSPWNTPLLPVKKPGTNDYRPVQDLREVNKRVEDIHPTVPNPYNLLSGLPPSHQWYTVLDLKDAFFCLRLHPTSQPLFAFEWRDPEMGISGQLTWTRLPQGFKNSPTLFNEALHRDLAGFRIQHPDLILLQYVDDLLLAATSELDCQQGTRALLQTLGDLGYRASAKKAQICQKQVKYLGYLLKEGQRWLTEARKETVMGQPIPKTPRQLREFLGTAGFCRLWIPGFAEMAAPLYPLTKPGTLFNWGPDQQKAFQEIKQALLTAPALGLPDLTKPFELFVDEKQGYAKGVLTQKLGPWRRPVAYLSKKLDPVAAGWPPCLRMVAAIAVLTKDAGKLTMGQPLVILAPHAVEALVKQPPDRWLSNARMTHYQALLLDTDRVQFGPVVALNPATLLPLPEEGLQHDCLDILAEAHGTRSDLMDQPLPDADHTWYTDGSSFLQEGQRKAGAAVTTETEVIWARALPAGTSAQRAELIALTQALKMAEGKKLNVYTDSRYAFATAHIHGEIYRRRGWLTSEGKEIKNKDEILALLKALFLPKRLSIIHCPGHQKGNSAEARGNRMADQAAREVATRETPETSTLLAGKRTADGSEFEKRTADGSEFESPKKKAKVE

SEQ ID NO: 2294 - protein, 2092 aa, synthetic construct
MPAAKRVKLDGGDKKYSIGLDIGTNSVGWAVITDEYKVPSKKFKVLGNTDRHSIKKNLIGALLFDSGETAEATRLKRTARRRYTRRKNRICYLQEIFSNEMAKVDDSFFHRLEESFLVEEDKKHERHPIFGNIVDEVAYHEKYPTIYHLRKKLVDSTDKADLRLIYLALAHMIKFRGHFLIEGDLNPDNSDVDKLFIQLVQTYNQLFEENPINASGVDAKAILSARLSKSRRLENLIAQLPGEKKNGLFGNLIALSLGLTPNFKSNFDLAEDAKLQLSKDTYDDDLDNLLAQIGDQYADLFLAAKNLSDAILLSDILRVNTEITKAPLSASMIKRYDEHHQDLTLLKALVRQQLPEKYKEIFFDQSKNGYAGYIDGGASQEEFYKFIKPILEKMDGTEELLVKLNREDLLRKQRTFDNGSIPHQIHLGELHAILRRQEDFYPFLKDNREKIEKILTFRIPYYVGPLARGNSRFAWMTRKSEETITPWNFEEVVDKGASAQSFIERMTNFDKNLPNEKVLPKHSLLYEYFTVYNELTKVKYVTEGMRKPAFLSGEQKKAIVDLLFKTNRKVTVKQLKEDYFKKIECFDSVEISGVEDRFNASLGTYHDLLKIIKDKDFLDNEENEDILEDIVLTLTLFEDREMIEERLKTYAHLFDDKVMKQLKRRRYTGWGRLSRKLINGIRDKQSGKTILDFLKSDGFANRNFMQLIHDDSLTFKEDIQKAQVSGQGDSLHEHIANLAGSPAIKKGILQTVKVVDELVKVMGRHKPENIVIEMARENQTTQKGQKNSRERMKRIEEGIKELGSQILKEHPVENTQLQNEKLYLYYLQNGRDMYVDQELDINRLSDYDVDHIVPQSFLKDDSIDNKVLTRSDKARGKSDNVPSEEVVKKMKNYWRQLLNAKLITQRKFDNLTKAERGGLSELDKAGFIKRQLVETRQITKHVAQILDSRMNTKYDENDKLIREVKVITLKSKLVSDFRKDFQFYKVREINNYHHAHDAYLNAVVGTALIKKYPKLESEFVYGDYKVYDVRKMIAKSEQEIGKATAKYFFYSNIMNFFKTEITLANGEIRKRPLIETNGETGEIVWDKGRDFATVRKVLSMPQVNIVKKTEVQTGGFSKESILPKRNSDKLIARKKDWDPKKYGGFDSPTVAYSVLVVAKVEKGKSKKLKSVKELLGITIMERSSFEKNPIDFLEAKGYKEVKKDLIIKLPKYSLFELENGRKRMLASAGELQKGNELALPSKYVNFLYLASHYEKLKGSPEDNEQKQLFVEQHKHYLDEIIEQISEFSKRVILADANLDKVLSAYNKHRDKPIREQAENIIHLFTLTNLGAPAAFKYFDTTIDRKRYTSTKEVLDATLIHQSITGLYETRIDLSQLGGDGGPAPAPAPGGTLNIEDEYRLHETSKEPDVSLGSTWLSDFPQAWAETGGMGLAVRQAPLIIPLKATSTPVSIKQYPMSQEARLGIKPHIQRLLDQGILVPCQSPWNTPLLPVKKPGTNDYRPVQDLREVNKRVEDIHPTVPNPYNLLSGLPPSHQWYTVLDLKDAFFCLRLHPTSQPLFAFEWRDPEMGISGQLTWTRLPQGFKNSPTLFNEALHRDLAGFRIQHPDLILLQYVDDLLLAATSELDCQQGTRALLQTLGDLGYRASAKKAQICQKQVKYLGYLLKEGQRWLTEARKETVMGQPIPKTPRQLREFLGTAGFCRLWIPGFAEMAAPLYPLTKPGTLFNWGPDQQKAFQEIKQALLTAPALGLPDLTKPFELFVDEKQGYAKGVLTQKLGPWRRPVAYLSKKLDPVAAGWPPCLRMVAAIAVLTKDAGKLTMGQPLVILAPHAVEALVKQPPDRWLSNARMTHYQALLLDTDRVQFGPVVALNPATLLPLPEEGLQHDCLDILAEAHGTRSDLMDQPLPDADHTWYTDGSSFLQEGQRKAGAAVTTETEVIWARALPAGTSAQRAELIALTQALKMAEGKKLNVYTDSRYAFATAHIHGEIYRRRGWLTSEGKEIKNKDEILALLKALFLPKRLSIIHCPGHQKGNSAEARGNRMADQAAREVATRETPETSTLLAGKRTADGSEFEKRTADGSEFESPKKKAKVE

SEQ ID NO: 2295 - protein, 2094 aa, synthetic construct
MPAAKRVKLDGGDKKYSIGLDIGTNSVGWAVITDEYKVPSKKFKVLGNTDRHSIKKNLIGALLFDSGETAEATRLKRTARRRYTRRKNRICYLQEIFSNEMAKVDDSFFHRLEESFLVEEDKKHERHPIFGNIVDEVAYHEKYPTIYHLRKKLVDSTDKADLRLIYLALAHMIKFRGHFLIEGDLNPDNSDVDKLFIQLVQTYNQLFEENPINASGVDAKAILSARLSKSRRLENLIAQLPGEKKNGLFGNLIALSLGLTPNFKSNFDLAEDAKLQLSKDTYDDDLDNLLAQIGDQYADLFLAAKNLSDAILLSDILRVNTEITKAPLSASMIKRYDEHHQDLTLLKALVRQQLPEKYKEIFFDQSKNGYAGYIDGGASQEEFYKFIKPILEKMDGTEELLVKLNREDLLRKQRTFDNGSIPHQIHLGELHAILRRQEDFYPFLKDNREKIEKILTFRIPYYVGPLARGNSRFAWMTRKSEETITPWNFEEVVDKGASAQSFIERMTNFDKNLPNEKVLPKHSLLYEYFTVYNELTKVKYVTEGMRKPAFLSGEQKKAIVDLLFKTNRKVTVKQLKEDYFKKIECFDSVEISGVEDRFNASLGTYHDLLKIIKDKDFLDNEENEDILEDIVLTLTLFEDREMIEERLKTYAHLFDDKVMKQLKRRRYTGWGRLSRKLINGIRDKQSGKTILDFLKSDGFANRNFMQLIHDDSLTFKEDIQKAQVSGQGDSLHEHIANLAGSPAIKKGILQTVKVVDELVKVMGRHKPENIVIEMARENQTTQKGQKNSRERMKRIEEGIKELGSQILKEHPVENTQLQNEKLYLYYLQNGRDMYVDQELDINRLSDYDVDHIVPQSFLKDDSIDNKVLTRSDKARGKSDNVPSEEVVKKMKNYWRQLLNAKLITQRKFDNLTKAERGGLSELDKAGFIKRQLVETRQITKHVAQILDSRMNTKYDENDKLIREVKVITLKSKLVSDFRKDFQFYKVREINNYHHAHDAYLNAVVGTALIKKYPKLESEFVYGDYKVYDVRKMIAKSEQEIGKATAKYFFYSNIMNFFKTEITLANGEIRKRPLIETNGETGEIVWDKGRDFATVRKVLSMPQVNIVKKTEVQTGGFSKESILPKRNSDKLIARKKDWDPKKYGGFDSPTVAYSVLVVAKVEKGKSKKLKSVKELLGITIMERSSFEKNPIDFLEAKGYKEVKKDLIIKLPKYSLFELENGRKRMLASAGELQKGNELALPSKYVNFLYLASHYEKLKGSPEDNEQKQLFVEQHKHYLDEIIEQISEFSKRVILADANLDKVLSAYNKHRDKPIREQAENIIHLFTLTNLGAPAAFKYFDTTIDRKRYTSTKEVLDATLIHQSITGLYETRIDLSQLGGDGGPAPAPAPAPGGTLNIEDEYRLHETSKEPDVSLGSTWLSDFPQAWAETGGMGLAVRQAPLIIPLKATSTPVSIKQYPMSQEARLGIKPHIQRLLDQGILVPCQSPWNTPLLPVKKPGTNDYRPVQDLREVNKRVEDIHPTVPNPYNLLSGLPPSHQWYTVLDLKDAFFCLRLHPTSQPLFAFEWRDPEMGISGQLTWTRLPQGFKNSPTLFNEALHRDLAGFRIQHPDLILLQYVDDLLLAATSELDCQQGTRALLQTLGDLGYRASAKKAQICQKQVKYLGYLLKEGQRWLTEARKETVMGQPIPKTPRQLREFLGTAGFCRLWIPGFAEMAAPLYPLTKPGTLFNWGPDQQKAFQEIKQALLTAPALGLPDLTKPFELFVDEKQGYAKGVLTQKLGPWRRPVAYLSKKLDPVAAGWPPCLRMVAAIAVLTKDAGKLTMGQPLVILAPHAVEALVKQPPDRWLSNARMTHYQALLLDTDRVQFGPVVALNPATLLPLPEEGLQHDCLDILAEAHGTRSDLMDQPLPDADHTWYTDGSSFLQEGQRKAGAAVTTETEVIWARALPAGTSAQRAELIALTQALKMAEGKKLNVYTDSRYAFATAHIHGEIYRRRGWLTSEGKEIKNKDEILALLKALFLPKRLSIIHCPGHQKGNSAEARGNRMADQAAREVATRETPETSTLLAGKRTADGSEFEKRTADGSEFESPKKKAKVE

SEQ ID NO: 2296 - protein, 2096 aa, synthetic construct
MPAAKRVKLDGGDKKYSIGLDIGTNSVGWAVITDEYKVPSKKFKVLGNTDRHSIKKNLIGALLFDSGETAEATRLKRTARRRYTRRKNRICYLQEIFSNEMAKVDDSFFHRLEESFLVEEDKKHERHPIFGNIVDEVAYHEKYPTIYHLRKKLVDSTDKADLRLIYLALAHMIKFRGHFLIEGDLNPDNSDVDKLFIQLVQTYNQLFEENPINASGVDAKAILSARLSKSRRLENLIAQLPGEKKNGLFGNLIALSLGLTPNFKSNFDLAEDAKLQLSKDTYDDDLDNLLAQIGDQYADLFLAAKNLSDAILLSDILRVNTEITKAPLSASMIKRYDEHHQDLTLLKALVRQQLPEKYKEIFFDQSKNGYAGYIDGGASQEEFYKFIKPILEKMDGTEELLVKLNREDLLRKQRTFDNGSIPHQIHLGELHAILRRQEDFYPFLKDNREKIEKILTFRIPYYVGPLARGNSRFAWMTRKSEETITPWNFEEVVDKGASAQSFIERMTNFDKNLPNEKVLPKHSLLYEYFTVYNELTKVKYVTEGMRKPAFLSGEQKKAIVDLLFKTNRKVTVKQLKEDYFKKIECFDSVEISGVEDRFNASLGTYHDLLKIIKDKDFLDNEENEDILEDIVLTLTLFEDREMIEERLKTYAHLFDDKVMKQLKRRRYTGWGRLSRKLINGIRDKQSGKTILDFLKSDGFANRNFMQLIHDDSLTFKEDIQKAQVSGQGDSLHEHIANLAGSPAIKKGILQTVKVVDELVKVMGRHKPENIVIEMARENQTTQKGQKNSRERMKRIEEGIKELGSQILKEHPVENTQLQNEKLYLYYLQNGRDMYVDQELDINRLSDYDVDHIVPQSFLKDDSIDNKVLTRSDKARGKSDNVPSEEVVKKMKNYWRQLLNAKLITQRKFDNLTKAERGGLSELDKAGFIKRQLVETRQITKHVAQILDSRMNTKYDENDKLIREVKVITLKSKLVSDFRKDFQFYKVREINNYHHAHDAYLNAVVGTALIKKYPKLESEFVYGDYKVYDVRKMIAKSEQEIGKATAKYFFYSNIMNFFKTEITLANGEIRKRPLIETNGETGEIVWDKGRDFATVRKVLSMPQVNIVKKTEVQTGGFSKESILPKRNSDKLIARKKDWDPKKYGGFDSPTVAYSVLVVAKVEKGKSKKLKSVKELLGITIMERSSFEKNPIDFLEAKGYKEVKKDLIIKLPKYSLFELENGRKRMLASAGELQKGNELALPSKYVNFLYLASHYEKLKGSPEDNEQKQLFVEQHKHYLDEIIEQISEFSKRVILADANLDKVLSAYNKHRDKPIREQAENIIHLFTLTNLGAPAAFKYFDTTIDRKRYTSTKEVLDATLIHQSITGLYETRIDLSQLGGDGGGGSEAAAKGSSGGTLNIEDEYRLHETSKEPDVSLGSTWLSDFPQAWAETGGMGLAVRQAPLIIPLKATSTPVSIKQYPMSQEARLGIKPHIQRLLDQGILVPCQSPWNTPLLPVKKPGTNDYRPVQDLREVNKRVEDIHPTVPNPYNLLSGLPPSHQWYTVLDLKDAFFCLRLHPTSQPLFAFEWRDPEMGISGQLTWTRLPQGFKNSPTLFNEALHRDLAGFRIQHPDLILLQYVDDLLLAATSELDCQQGTRALLQTLGDLGYRASAKKAQICQKQVKYLGYLLKEGQRWLTEARKETVMGQPIPKTPRQLREFLGTAGFCRLWIPGFAEMAAPLYPLTKPGTLFNWGPDQQKAFQEIKQALLTAPALGLPDLTKPFELFVDEKQGYAKGVLTQKLGPWRRPVAYLSKKLDPVAAGWPPCLRMVAAIAVLTKDAGKLTMGQPLVILAPHAVEALVKQPPDRWLSNARMTHYQALLLDTDRVQFGPVVALNPATLLPLPEEGLQHDCLDILAEAHGTRSDLMDQPLPDADHTWYTDGSSFLQEGQRKAGAAVTTETEVIWARALPAGTSAQRAELIALTQALKMAEGKKLNVYTDSRYAFATAHIHGEIYRRRGWLTSEGKEIKNKDEILALLKALFLPKRLSIIHCPGHQKGNSAEARGNRMADQAAREVATRETPETSTLLAGKRTADGSEFEKRTADGSEFESPKKKAKVE

SEQ ID NO: 2297 - protein, 2093 aa, synthetic construct
MPAAKRVKLDGGDKKYSIGLDIGTNSVGWAVITDEYKVPSKKFKVLGNTDRHSIKKNLIGALLFDSGETAEATRLKRTARRRYTRRKNRICYLQEIFSNEMAKVDDSFFHRLEESFLVEEDKKHERHPIFGNIVDEVAYHEKYPTIYHLRKKLVDSTDKADLRLIYLALAHMIKFRGHFLIEGDLNPDNSDVDKLFIQLVQTYNQLFEENPINASGVDAKAILSARLSKSRRLENLIAQLPGEKKNGLFGNLIALSLGLTPNFKSNFDLAEDAKLQLSKDTYDDDLDNLLAQIGDQYADLFLAAKNLSDAILLSDILRVNTEITKAPLSASMIKRYDEHHQDLTLLKALVRQQLPEKYKEIFFDQSKNGYAGYIDGGASQEEFYKFIKPILEKMDGTEELLVKLNREDLLRKQRTFDNGSIPHQIHLGELHAILRRQEDFYPFLKDNREKIEKILTFRIPYYVGPLARGNSRFAWMTRKSEETITPWNFEEVVDKGASAQSFIERMTNFDKNLPNEKVLPKHSLLYEYFTVYNELTKVKYVTEGMRKPAFLSGEQKKAIVDLLFKTNRKVTVKQLKEDYFKKIECFDSVEISGVEDRFNASLGTYHDLLKIIKDKDFLDNEENEDILEDIVLTLTLFEDREMIEERLKTYAHLFDDKVMKQLKRRRYTGWGRLSRKLINGIRDKQSGKTILDFLKSDGFANRNFMQLIHDDSLTFKEDIQKAQVSGQGDSLHEHIANLAGSPAIKKGILQTVKVVDELVKVMGRHKPENIVIEMARENQTTQKGQKNSRERMKRIEEGIKELGSQILKEHPVENTQLQNEKLYLYYLQNGRDMYVDQELDINRLSDYDVDHIVPQSFLKDDSIDNKVLTRSDKARGKSDNVPSEEVVKKMKNYWRQLLNAKLITQRKFDNLTKAERGGLSELDKAGFIKRQLVETRQITKHVAQILDSRMNTKYDENDKLIREVKVITLKSKLVSDFRKDFQFYKVREINNYHHAHDAYLNAVVGTALIKKYPKLESEFVYGDYKVYDVRKMIAKSEQEIGKATAKYFFYSNIMNFFKTEITLANGEIRKRPLIETNGETGEIVWDKGRDFATVRKVLSMPQVNIVKKTEVQTGGFSKESILPKRNSDKLIARKKDWDPKKYGGFDSPTVAYSVLVVAKVEKGKSKKLKSVKELLGITIMERSSFEKNPIDFLEAKGYKEVKKDLIIKLPKYSLFELENGRKRMLASAGELQKGNELALPSKYVNFLYLASHYEKLKGSPEDNEQKQLFVEQHKHYLDEIIEQISEFSKRVILADANLDKVLSAYNKHRDKPIREQAENIIHLFTLTNLGAPAAFKYFDTTIDRKRYTSTKEVLDATLIHQSITGLYETRIDLSQLGGDGGEAAAKGSSGGTLNIEDEYRLHETSKEPDVSLGSTWLSDFPQAWAETGGMGLAVRQAPLIIPLKATSTPVSIKQYPMSQEARLGIKPHIQRLLDQGILVPCQSPWNTPLLPVKKPGTNDYRPVQDLREVNKRVEDIHPTVPNPYNLLSGLPPSHQWYTVLDLKDAFFCLRLHPTSQPLFAFEWRDPEMGISGQLTWTRLPQGFKNSPTLFNEALHRDLAGFRIQHPDLILLQYVDDLLLAATSELDCQQGTRALLQTLGDLGYRASAKKAQICQKQVKYLGYLLKEGQRWLTEARKETVMGQPIPKTPRQLREFLGTAGFCRLWIPGFAEMAAPLYPLTKPGTLFNWGPDQQKAFQEIKQALLTAPALGLPDLTKPFELFVDEKQGYAKGVLTQKLGPWRRPVAYLSKKLDPVAAGWPPCLRMVAAIAVLTKDAGKLTMGQPLVILAPHAVEALVKQPPDRWLSNARMTHYQALLLDTDRVQFGPVVALNPATLLPLPEEGLQHDCLDILAEAHGTRSDLMDQPLPDADHTWYTDGSSFLQEGQRKAGAAVTTETEVIWARALPAGTSAQRAELIALTQALKMAEGKKLNVYTDSRYAFATAHIHGEIYRRRGWLTSEGKEIKNKDEILALLKALFLPKRLSIIHCPGHQKGNSAEARGNRMADQAAREVATRETPETSTLLAGKRTADGSEFEKRTADGSEFESPKKKAKVE

SEQ ID NO: 2298 - protein, 2091 aa, synthetic construct
MPAAKRVKLDGGDKKYSIGLDIGTNSVGWAVITDEYKVPSKKFKVLGNTDRHSIKKNLIGALLFDSGETAEATRLKRTARRRYTRRKNRICYLQEIFSNEMAKVDDSFFHRLEESFLVEEDKKHERHPIFGNIVDEVAYHEKYPTIYHLRKKLVDSTDKADLRLIYLALAHMIKFRGHFLIEGDLNPDNSDVDKLFIQLVQTYNQLFEENPINASGVDAKAILSARLSKSRRLENLIAQLPGEKKNGLFGNLIALSLGLTPNFKSNFDLAEDAKLQLSKDTYDDDLDNLLAQIGDQYADLFLAAKNLSDAILLSDILRVNTEITKAPLSASMIKRYDEHHQDLTLLKALVRQQLPEKYKEIFFDQSKNGYAGYIDGGASQEEFYKFIKPILEKMDGTEELLVKLNREDLLRKQRTFDNGSIPHQIHLGELHAILRRQEDFYPFLKDNREKIEKILTFRIPYYVGPLARGNSRFAWMTRKSEETITPWNFEEVVDKGASAQSFIERMTNFDKNLPNEKVLPKHSLLYEYFTVYNELTKVKYVTEGMRKPAFLSGEQKKAIVDLLFKTNRKVTVKQLKEDYFKKIECFDSVEISGVEDRFNASLGTYHDLLKIIKDKDFLDNEENEDILEDIVLTLTLFEDREMIEERLKTYAHLFDDKVMKQLKRRRYTGWGRLSRKLINGIRDKQSGKTILDFLKSDGFANRNFMQLIHDDSLTFKEDIQKAQVSGQGDSLHEHIANLAGSPAIKKGILQTVKVVDELVKVMGRHKPENIVIEMARENQTTQKGQKNSRERMKRIEEGIKELGSQILKEHPVENTQLQNEKLYLYYLQNGRDMYVDQELDINRLSDYDVDHIVPQSFLKDDSIDNKVLTRSDKARGKSDNVPSEEVVKKMKNYWRQLLNAKLITQRKFDNLTKAERGGLSELDKAGFIKRQLVETRQITKHVAQILDSRMNTKYDENDKLIREVKVITLKSKLVSDFRKDFQFYKVREINNYHHAHDAYLNAVVGTALIKKYPKLESEFVYGDYKVYDVRKMIAKSEQEIGKATAKYFFYSNIMNFFKTEITLANGEIRKRPLIETNGETGEIVWDKGRDFATVRKVLSMPQVNIVKKTEVQTGGFSKESILPKRNSDKLIARKKDWDPKKYGGFDSPTVAYSVLVVAKVEKGKSKKLKSVKELLGITIMERSSFEKNPIDFLEAKGYKEVKKDLIIKLPKYSLFELENGRKRMLASAGELQKGNELALPSKYVNFLYLASHYEKLKGSPEDNEQKQLFVEQHKHYLDEIIEQISEFSKRVILADANLDKVLSAYNKHRDKPIREQAENIIHLFTLTNLGAPAAFKYFDTTIDRKRYTSTKEVLDATLIHQSITGLYETRIDLSQLGGDGGPAPGGGGGTLNIEDEYRLHETSKEPDVSLGSTWLSDFPQAWAETGGMGLAVRQAPLIIPLKATSTPVSIKQYPMSQEARLGIKPHIQRLLDQGILVPCQSPWNTPLLPVKKPGTNDYRPVQDLREVNKRVEDIHPTVPNPYNLLSGLPPSHQWYTVLDLKDAFFCLRLHPTSQPLFAFEWRDPEMGISGQLTWTRLPQGFKNSPTLFNEALHRDLAGFRIQHPDLILLQYVDDLLLAATSELDCQQGTRALLQTLGDLGYRASAKKAQICQKQVKYLGYLLKEGQRWLTEARKETVMGQPIPKTPRQLREFLGTAGFCRLWIPGFAEMAAPLYPLTKPGTLFNWGPDQQKAFQEIKQALLTAPALGLPDLTKPFELFVDEKQGYAKGVLTQKLGPWRRPVAYLSKKLDPVAAGWPPCLRMVAAIAVLTKDAGKLTMGQPLVILAPHAVEALVKQPPDRWLSNARMTHYQALLLDTDRVQFGPVVALNPATLLPLPEEGLQHDCLDILAEAHGTRSDLMDQPLPDADHTWYTDGSSFLQEGQRKAGAAVTTETEVIWARALPAGTSAQRAELIALTQALKMAEGKKLNVYTDSRYAFATAHIHGEIYRRRGWLTSEGKEIKNKDEILALLKALFLPKRLSIIHCPGHQKGNSAEARGNRMADQAAREVATRETPETSTLLAGKRTADGSEFEKRTADGSEFESPKKKAKVE

SEQ ID NO: 2299 - protein, 2088 aa, synthetic construct
MPAAKRVKLDGGDKKYSIGLDIGTNSVGWAVITDEYKVPSKKFKVLGNTDRHSIKKNLIGALLFDSGETAEATRLKRTARRRYTRRKNRICYLQEIFSNEMAKVDDSFFHRLEESFLVEEDKKHERHPIFGNIVDEVAYHEKYPTIYHLRKKLVDSTDKADLRLIYLALAHMIKFRGHFLIEGDLNPDNSDVDKLFIQLVQTYNQLFEENPINASGVDAKAILSARLSKSRRLENLIAQLPGEKKNGLFGNLIALSLGLTPNFKSNFDLAEDAKLQLSKDTYDDDLDNLLAQIGDQYADLFLAAKNLSDAILLSDILRVNTEITKAPLSASMIKRYDEHHQDLTLLKALVRQQLPEKYKEIFFDQSKNGYAGYIDGGASQEEFYKFIKPILEKMDGTEELLVKLNREDLLRKQRTFDNGSIPHQIHLGELHAILRRQEDFYPFLKDNREKIEKILTFRIPYYVGPLARGNSRFAWMTRKSEETITPWNFEEVVDKGASAQSFIERMTNFDKNLPNEKVLPKHSLLYEYFTVYNELTKVKYVTEGMRKPAFLSGEQKKAIVDLLFKTNRKVTVKQLKEDYFKKIECFDSVEISGVEDRFNASLGTYHDLLKIIKDKDFLDNEENEDILEDIVLTLTLFEDREMIEERLKTYAHLFDDKVMKQLKRRRYTGWGRLSRKLINGIRDKQSGKTILDFLKSDGFANRNFMQLIHDDSLTFKEDIQKAQVSGQGDSLHEHIANLAGSPAIKKGILQTVKVVDELVKVMGRHKPENIVIEMARENQTTQKGQKNSRERMKRIEEGIKELGSQILKEHPVENTQLQNEKLYLYYLQNGRDMYVDQELDINRLSDYDVDHIVPQSFLKDDSIDNKVLTRSDKARGKSDNVPSEEVVKKMKNYWRQLLNAKLITQRKFDNLTKAERGGLSELDKAGFIKRQLVETRQITKHVAQILDSRMNTKYDENDKLIREVKVITLKSKLVSDFRKDFQFYKVREINNYHHAHDAYLNAVVGTALIKKYPKLESEFVYGDYKVYDVRKMIAKSEQEIGKATAKYFFYSNIMNFFKTEITLANGEIRKRPLIETNGETGEIVWDKGRDFATVRKVLSMPQVNIVKKTEVQTGGFSKESILPKRNSDKLIARKKDWDPKKYGGFDSPTVAYSVLVVAKVEKGKSKKLKSVKELLGITIMERSSFEKNPIDFLEAKGYKEVKKDLIIKLPKYSLFELENGRKRMLASAGELQKGNELALPSKYVNFLYLASHYEKLKGSPEDNEQKQLFVEQHKHYLDEIIEQISEFSKRVILADANLDKVLSAYNKHRDKPIREQAENIIHLFTLTNLGAPAAFKYFDTTIDRKRYTSTKEVLDATLIHQSITGLYETRIDLSQLGGDGGPAPGGTLNIEDEYRLHETSKEPDVSLGSTWLSDFPQAWAETGGMGLAVRQAPLIIPLKATSTPVSIKQYPMSQEARLGIKPHIQRLLDQGILVPCQSPWNTPLLPVKKPGTNDYRPVQDLREVNKRVEDIHPTVPNPYNLLSGLPPSHQWYTVLDLKDAFFCLRLHPTSQPLFAFEWRDPEMGISGQLTWTRLPQGFKNSPTLFNEALHRDLAGFRIQHPDLILLQYVDDLLLAATSELDCQQGTRALLQTLGDLGYRASAKKAQICQKQVKYLGYLLKEGQRWLTEARKETVMGQPIPKTPRQLREFLGKAGFCRLFIPGFAEMAAPLYPLTKPGTLFNWGPDQQKAFQEIKQALLTAPALGLPDLTKPFELFVDEKQGYAKGVLTQKLGPWRRPVAYLSKKLDPVAAGWPPCLRMVAAIAVLTKDAGKLTMGQPLVILAPHAVEALVKQPPDRWLSNARMTHYQALLLDTDRVQFGPVVALNPATLLPLPEEGLQHDCLDILAEAHGTRSDLMDQPLPDADHTWYTDGSSFLQEGQRKAGAAVTTETEVIWARALPAGTSAQRAELIALTQALKMAEGKKLNVYTDSRYAFATAHIHGEIYRRRGWLTSEGKEIKNKDEILALLKALFLPKRLSIIHCPGHQKGNSAEARGNRMADQAAREVATRETPETSTLLAGKRTADGSEFEKRTADGSEFESPKKKAKVE

SEQ ID NO: 2300 - protein, 2103 aa, synthetic construct
MPAAKRVKLDGGDKKYSIGLDIGTNSVGWAVITDEYKVPSKKFKVLGNTDRHSIKKNLIGALLFDSGETAEATRLKRTARRRYTRRKNRICYLQEIFSNEMAKVDDSFFHRLEESFLVEEDKKHERHPIFGNIVDEVAYHEKYPTIYHLRKKLVDSTDKADLRLIYLALAHMIKFRGHFLIEGDLNPDNSDVDKLFIQLVQTYNQLFEENPINASGVDAKAILSARLSKSRRLENLIAQLPGEKKNGLFGNLIALSLGLTPNFKSNFDLAEDAKLQLSKDTYDDDLDNLLAQIGDQYADLFLAAKNLSDAILLSDILRVNTEITKAPLSASMIKRYDEHHQDLTLLKALVRQQLPEKYKEIFFDQSKNGYAGYIDGGASQEEFYKFIKPILEKMDGTEELLVKLNREDLLRKQRTFDNGSIPHQIHLGELHAILRRQEDFYPFLKDNREKIEKILTFRIPYYVGPLARGNSRFAWMTRKSEETITPWNFEEVVDKGASAQSFIERMTNFDKNLPNEKVLPKHSLLYEYFTVYNELTKVKYVTEGMRKPAFLSGEQKKAIVDLLFKTNRKVTVKQLKEDYFKKIECFDSVEISGVEDRFNASLGTYHDLLKIIKDKDFLDNEENEDILEDIVLTLTLFEDREMIEERLKTYAHLFDDKVMKQLKRRRYTGWGRLSRKLINGIRDKQSGKTILDFLKSDGFANRNFMQLIHDDSLTFKEDIQKAQVSGQGDSLHEHIANLAGSPAIKKGILQTVKVVDELVKVMGRHKPENIVIEMARENQTTQKGQKNSRERMKRIEEGIKELGSQILKEHPVENTQLQNEKLYLYYLQNGRDMYVDQELDINRLSDYDVDHIVPQSFLKDDSIDNKVLTRSDKARGKSDNVPSEEVVKKMKNYWRQLLNAKLITQRKFDNLTKAERGGLSELDKAGFIKRQLVETRQITKHVAQILDSRMNTKYDENDKLIREVKVITLKSKLVSDFRKDFQFYKVREINNYHHAHDAYLNAVVGTALIKKYPKLESEFVYGDYKVYDVRKMIAKSEQEIGKATAKYFFYSNIMNFFKTEITLANGEIRKRPLIETNGETGEIVWDKGRDFATVRKVLSMPQVNIVKKTEVQTGGFSKESILPKRNSDKLIARKKDWDPKKYGGFDSPTVAYSVLVVAKVEKGKSKKLKSVKELLGITIMERSSFEKNPIDFLEAKGYKEVKKDLIIKLPKYSLFELENGRKRMLASAGELQKGNELALPSKYVNFLYLASHYEKLKGSPEDNEQKQLFVEQHKHYLDEIIEQISEFSKRVILADANLDKVLSAYNKHRDKPIREQAENIIHLFTLTNLGAPAAFKYFDTTIDRKRYTSTKEVLDATLIHQSITGLYETRIDLSQLGGDGGGGSGGSGGSGGSGGSGGSGGTLNIEDEYRLHETSKEPDVSLGSTWLSDFPQAWAETGGMGLAVRQAPLIIPLKATSTPVSIKQYPMSQEARLGIKPHIQRLLDQGILVPCQSPWNTPLLPVKKPGTNDYRPVQDLREVNKRVEDIHPTVPNPYNLLSGLPPSHQWYTVLDLKDAFFCLRLHPTSQPLFAFEWRDPEMGISGQLTWTRLPQGFKNSPTLFNEALHRDLAGFRIQHPDLILLQYVDDLLLAATSELDCQQGTRALLQTLGDLGYRASAKKAQICQKQVKYLGYLLKEGQRWLTEARKETVMGQPIPKTPRQLREFLGKAGFCRLFIPGFAEMAAPLYPLTKPGTLFNWGPDQQKAFQEIKQALLTAPALGLPDLTKPFELFVDEKQGYAKGVLTQKLGPWRRPVAYLSKKLDPVAAGWPPCLRMVAAIAVLTKDAGKLTMGQPLVILAPHAVEALVKQPPDRWLSNARMTHYQALLLDTDRVQFGPVVALNPATLLPLPEEGLQHDCLDILAEAHGTRSDLMDQPLPDADHTWYTDGSSFLQEGQRKAGAAVTTETEVIWARALPAGTSAQRAELIALTQALKMAEGKKLNVYTDSRYAFATAHIHGEIYRRRGWLTSEGKEIKNKDEILALLKALFLPKRLSIIHCPGHQKGNSAEARGNRMADQAAREVATRETPETSTLLAGKRTADGSEFEKRTADGSEFESPKKKAKVE

SEQ ID NO: 2301 - protein, 2096 aa, synthetic construct
MPAAKRVKLDGGDKKYSIGLDIGTNSVGWAVITDEYKVPSKKFKVLGNTDRHSIKKNLIGALLFDSGETAEATRLKRTARRRYTRRKNRICYLQEIFSNEMAKVDDSFFHRLEESFLVEEDKKHERHPIFGNIVDEVAYHEKYPTIYHLRKKLVDSTDKADLRLIYLALAHMIKFRGHFLIEGDLNPDNSDVDKLFIQLVQTYNQLFEENPINASGVDAKAILSARLSKSRRLENLIAQLPGEKKNGLFGNLIALSLGLTPNFKSNFDLAEDAKLQLSKDTYDDDLDNLLAQIGDQYADLFLAAKNLSDAILLSDILRVNTEITKAPLSASMIKRYDEHHQDLTLLKALVRQQLPEKYKEIFFDQSKNGYAGYIDGGASQEEFYKFIKPILEKMDGTEELLVKLNREDLLRKQRTFDNGSIPHQIHLGELHAILRRQEDFYPFLKDNREKIEKILTFRIPYYVGPLARGNSRFAWMTRKSEETITPWNFEEVVDKGASAQSFIERMTNFDKNLPNEKVLPKHSLLYEYFTVYNELTKVKYVTEGMRKPAFLSGEQKKAIVDLLFKTNRKVTVKQLKEDYFKKIECFDSVEISGVEDRFNASLGTYHDLLKIIKDKDFLDNEENEDILEDIVLTLTLFEDREMIEERLKTYAHLFDDKVMKQLKRRRYTGWGRLSRKLINGIRDKQSGKTILDFLKSDGFANRNFMQLIHDDSLTFKEDIQKAQVSGQGDSLHEHIANLAGSPAIKKGILQTVKVVDELVKVMGRHKPENIVIEMARENQTTQKGQKNSRERMKRIEEGIKELGSQILKEHPVENTQLQNEKLYLYYLQNGRDMYVDQELDINRLSDYDVDHIVPQSFLKDDSIDNKVLTRSDKARGKSDNVPSEEVVKKMKNYWRQLLNAKLITQRKFDNLTKAERGGLSELDKAGFIKRQLVETRQITKHVAQILDSRMNTKYDENDKLIREVKVITLKSKLVSDFRKDFQFYKVREINNYHHAHDAYLNAVVGTALIKKYPKLESEFVYGDYKVYDVRKMIAKSEQEIGKATAKYFFYSNIMNFFKTEITLANGEIRKRPLIETNGETGEIVWDKGRDFATVRKVLSMPQVNIVKKTEVQTGGFSKESILPKRNSDKLIARKKDWDPKKYGGFDSPTVAYSVLVVAKVEKGKSKKLKSVKELLGITIMERSSFEKNPIDFLEAKGYKEVKKDLIIKLPKYSLFELENGRKRMLASAGELQKGNELALPSKYVNFLYLASHYEKLKGSPEDNEQKQLFVEQHKHYLDEIIEQISEFSKRVILADANLDKVLSAYNKHRDKPIREQAENIIHLFTLTNLGAPAAFKYFDTTIDRKRYTSTKEVLDATLIHQSITGLYETRIDLSQLGGDGGPAPAPAPAPAPGGTLNIEDEYRLHETSKEPDVSLGSTWLSDFPQAWAETGGMGLAVRQAPLIIPLKATSTPVSIKQYPMSQEARLGIKPHIQRLLDQGILVPCQSPWNTPLLPVKKPGTNDYRPVQDLREVNKRVEDIHPTVPNPYNLLSGLPPSHQWYTVLDLKDAFFCLRLHPTSQPLFAFEWRDPEMGISGQLTWTRLPQGFKNSPTLFNEALHRDLAGFRIQHPDLILLQYVDDLLLAATSELDCQQGTRALLQTLGDLGYRASAKKAQICQKQVKYLGYLLKEGQRWLTEARKETVMGQPIPKTPRQLREFLGKAGFCRLFIPGFAEMAAPLYPLTKPGTLFNWGPDQQKAFQEIKQALLTAPALGLPDLTKPFELFVDEKQGYAKGVLTQKLGPWRRPVAYLSKKLDPVAAGWPPCLRMVAAIAVLTKDAGKLTMGQPLVILAPHAVEALVKQPPDRWLSNARMTHYQALLLDTDRVQFGPVVALNPATLLPLPEEGLQHDCLDILAEAHGTRSDLMDQPLPDADHTWYTDGSSFLQEGQRKAGAAVTTETEVIWARALPAGTSAQRAELIALTQALKMAEGKKLNVYTDSRYAFATAHIHGEIYRRRGWLTSEGKEIKNKDEILALLKALFLPKRLSIIHCPGHQKGNSAEARGNRMADQAAREVATRETPETSTLLAGKRTADGSEFEKRTADGSEFESPKKKAKVE

SEQ ID NO: 2302 - protein, 2091 aa, synthetic construct
MPAAKRVKLDGGDKKYSIGLDIGTNSVGWAVITDEYKVPSKKFKVLGNTDRHSIKKNLIGALLFDSGETAEATRLKRTARRRYTRRKNRICYLQEIFSNEMAKVDDSFFHRLEESFLVEEDKKHERHPIFGNIVDEVAYHEKYPTIYHLRKKLVDSTDKADLRLIYLALAHMIKFRGHFLIEGDLNPDNSDVDKLFIQLVQTYNQLFEENPINASGVDAKAILSARLSKSRRLENLIAQLPGEKKNGLFGNLIALSLGLTPNFKSNFDLAEDAKLQLSKDTYDDDLDNLLAQIGDQYADLFLAAKNLSDAILLSDILRVNTEITKAPLSASMIKRYDEHHQDLTLLKALVRQQLPEKYKEIFFDQSKNGYAGYIDGGASQEEFYKFIKPILEKMDGTEELLVKLNREDLLRKQRTFDNGSIPHQIHLGELHAILRRQEDFYPFLKDNREKIEKILTFRIPYYVGPLARGNSRFAWMTRKSEETITPWNFEEVVDKGASAQSFIERMTNFDKNLPNEKVLPKHSLLYEYFTVYNELTKVKYVTEGMRKPAFLSGEQKKAIVDLLFKTNRKVTVKQLKEDYFKKIECFDSVEISGVEDRFNASLGTYHDLLKIIKDKDFLDNEENEDILEDIVLTLTLFEDREMIEERLKTYAHLFDDKVMKQLKRRRYTGWGRLSRKLINGIRDKQSGKTILDFLKSDGFANRNFMQLIHDDSLTFKEDIQKAQVSGQGDSLHEHIANLAGSPAIKKGILQTVKVVDELVKVMGRHKPENIVIEMARENQTTQKGQKNSRERMKRIEEGIKELGSQILKEHPVENTQLQNEKLYLYYLQNGRDMYVDQELDINRLSDYDVDHIVPQSFLKDDSIDNKVLTRSDKARGKSDNVPSEEVVKKMKNYWRQLLNAKLITQRKFDNLTKAERGGLSELDKAGFIKRQLVETRQITKHVAQILDSRMNTKYDENDKLIREVKVITLKSKLVSDFRKDFQFYKVREINNYHHAHDAYLNAVVGTALIKKYPKLESEFVYGDYKVYDVRKMIAKSEQEIGKATAKYFFYSNIMNFFKTEITLANGEIRKRPLIETNGETGEIVWDKGRDFATVRKVLSMPQVNIVKKTEVQTGGFSKESILPKRNSDKLIARKKDWDPKKYGGFDSPTVAYSVLVVAKVEKGKSKKLKSVKELLGITIMERSSFEKNPIDFLEAKGYKEVKKDLIIKLPKYSLFELENGRKRMLASAGELQKGNELALPSKYVNFLYLASHYEKLKGSPEDNEQKQLFVEQHKHYLDEIIEQISEFSKRVILADANLDKVLSAYNKHRDKPIREQAENIIHLFTLTNLGAPAAFKYFDTTIDRKRYTSTKEVLDATLIHQSITGLYETRIDLSQLGGDGGGGGPAPGGTLNIEDEYRLHETSKEPDVSLGSTWLSDFPQAWAETGGMGLAVRQAPLIIPLKATSTPVSIKQYPMSQEARLGIKPHIQRLLDQGILVPCQSPWNTPLLPVKKPGTNDYRPVQDLREVNKRVEDIHPTVPNPYNLLSGLPPSHQWYTVLDLKDAFFCLRLHPTSQPLFAFEWRDPEMGISGQLTWTRLPQGFKNSPTLFNEALHRDLAGFRIQHPDLILLQYVDDLLLAATSELDCQQGTRALLQTLGDLGYRASAKKAQICQKQVKYLGYLLKEGQRWLTEARKETVMGQPIPKTPRQLREFLGKAGFCRLFIPGFAEMAAPLYPLTKPGTLFNWGPDQQKAFQEIKQALLTAPALGLPDLTKPFELFVDEKQGYAKGVLTQKLGPWRRPVAYLSKKLDPVAAGWPPCLRMVAAIAVLTKDAGKLTMGQPLVILAPHAVEALVKQPPDRWLSNARMTHYQALLLDTDRVQFGPVVALNPATLLPLPEEGLQHDCLDILAEAHGTRSDLMDQPLPDADHTWYTDGSSFLQEGQRKAGAAVTTETEVIWARALPAGTSAQRAELIALTQALKMAEGKKLNVYTDSRYAFATAHIHGEIYRRRGWLTSEGKEIKNKDEILALLKALFLPKRLSIIHCPGHQKGNSAEARGNRMADQAAREVATRETPETSTLLAGKRTADGSEFEKRTADGSEFESPKKKAKVE
